United States Patent Application Publication US 2021/0170017 A1 - sequence listing, part 2

SEQ ID NO: 1205 - RNA, 2319 nt, Artificial Sequence
  mRNA product Design h-2 comprising derived and/or modified sequence from HRSV(A2)__F0_DSCav1 (opt2)
gggagacccgugacccggaaguuguacggcuacgcgacuuucccucccacaaacccucgcgcccuuccuuuccuacuugggcccggcagaaagcuuaccauggagcuccucauccucaaggccaacgccaucaccaccauccucaccgccgucaccuucugcuucgccuccggccagaacaucaccgaggaguucuaccaguccaccugcuccgccgucuccaagggcuaccucuccgcccuccgcaccggcugguacaccuccgucaucaccaucgagcucuccaacaucaaggagaacaagugcaacggcaccgacgccaaggucaagcucaucaagcaggagcucgacaaguacaagaacgccgucaccgagcuccagcuccucaugcaguccacccccgccaccaacaaccgcgcccgccgcgagcucccccgcuucaugaacuacacccucaacaacgccaagaagaccaacgucacccucuccaagaagcgcaagcgccgcuuccucggcuuccuccucggcgucggcuccgccaucgccuccggcgucgccgucugcaagguccuccaccucgagggcgaggucaacaagaucaaguccgcccuccucuccaccaacaaggccgucgucucccucuccaacggcgucuccguccucaccuucaagguccucgaccucaagaacuacaucgacaagcagcuccuccccauccucaacaagcaguccugcuccaucuccaacaucgagaccgucaucgaguuccagcagaagaacaaccgccuccucgagaucacccgcgaguucuccgucaacgccggcgucaccacccccgucuccaccuacaugcucaccaacuccgagcuccucucccucaucaacgacaugcccaucaccaacgaccagaagaagcucauguccaacaacguccagaucguccgccagcaguccuacuccaucaugugcaucaucaaggaggagguccucgccuacgucguccagcucccccucuacggcgucaucgacacccccugcuggaagcuccacaccuccccccucugcaccaccaacaccaaggagggcuccaacaucugccucacccgcaccgaccgcggcugguacugcgacaacgccggcuccgucuccuucuucccccaggccgagaccugcaagguccaguccaaccgcgucuucugcgacaccaugaacucccucacccuccccuccgaggucaaccucugcaacgucgacaucuucaaccccaaguacgacugcaagaucaugaccuccaagaccgacgucuccuccuccgucaucaccucccucggcgccaucgucuccugcuacggcaagaccaagugcaccgccuccaacaagaaccgcggcaucaucaagaccuucuccaacggcugcgacuacgucuccaacaagggcgucgacaccgucuccgucggcaacacccucuacuacgucaacaagcaggagggcaagucccucuacgucaagggcgagcccaucaucaacuucuacgacccccucgucuuccccuccgacgaguucgacgccuccaucucccaggucaacgagaagaucaaccagucccucgccuucauccgcaaguccgacgagcuccuccacaacgucaacgccggcaaguccaccaccaacaucaugaucaccaccaucaucaucgucaucaucgucauccuccucucccucaucgccgucggccuccuccucuacugcaaggcccgcuccacccccgucacccucuccaaggaccagcucuccggcaucaacaacaucgccuucuccaacugaggacuagugaagggaacacccaaauuuaauucagccuuaagcacaauuaauuaagagugaaacguaauuguacaagcaguuggucacccaccauagggcaugaucaacaccgcaaccuuuccuuuuucccccagugauucugaaaaaccccucuucccuucagcuugcuuagauguuccaaauuuaguaagcuuaaggcggccuacagaagaaaaagaaaaaaaaggccacaaaaguucccucucacuuucaguaaauaaaauaaaagcagcaacagaaauaaagaaauaaaugaaauucaaaaugaaauaaauauuguguugugcagcauuaaaaaaucaauaaaaauuaaaaaugagcaagaucuaaaaaaaaaaaaaaaaaaaaaaaaaaaaaaaaaaaaaaaaaaaaaaaaaaaaaaaaaaaaaaaaugcaucccccccccccccccccccccccccccccccaaaggcucuuuucagagccaccagaauu

SEQ ID NO: 1206 - RNA, 2319 nt, Artificial Sequence
  mRNA product Design h-2 comprising derived and/or modified sequence from HRSV(A2)__F0_DSCav1 (opt3)
gggagacccgugacccggaaguuguacggcuacgcgacuuucccucccacaaacccucgcgcccuuccuuuccuacuugggcccggcagaaagcuuaccauggagcugcucauccuuaaggccaacgcuauuaccacaauacugacugcagugacguucugcuuugccagcggccagaauaucaccgaagaguucuaccaauccacauguucugcggucucaaaaggguauuugagugcuuuaagaacuggaugguacaccagcguuauuacaaucgaacuguccaacauuaaggagaauaaaugcaacgguaccgacgccaaggugaaacuaaucaagcaggaacucgauaaguauaaaaaugcaguaacugagcugcagcuucugaugcagucuacacccgccaccaacaauagggcucggcgcgaguugccucgauuuaugaacuacacgcucaauaacgcaaagaaaacuaaugugacccugucgaagaaacguaagagaagguuccugggcuuucucuuaggggucggaucagccauagcuagcggcguggccguuuguaaggugcugcaccuugaaggugaggucaacaaaaucaagagugcguugcuguccacaaauaaagcagugguaucucuaagcaacgggguuuccgugcucacuuucaagguccuggaccuuaaaaauuauauugauaagcaacuguugccaauccucaacaaacagucaugcaguauuagcaacaucgaaaccgugauagaguuucagcagaagaauaaccggcuguuagagauuacacgcgaguucucugugaaugccggagucaccacgccgguuuccacuuacaugcugacaaacucagaacuccuuagccugaucaaugacaugcccauuaccaacgaucaaaagaaauugaugaguaauaacgugcagaucguaagacagcagucuuauuccaucauguguauuauaaaggaagaggugcuagcuuacgucgugcaacugccucucuacggcguuaucgacacuccaugcuggaaacugcauacaagcccccuuuguaccacgaauaccaaggaaggcucgaacauuugccugacaaggacugaucgggggugguauugugacaaugccggaucuguguccuuuuucccucaggcagagaccugcaaaguccagucaaaccgcguguuuugugauacaaugaauaguuugacucucccaagcgagguaaaccugugcaauguugacaucuucaaccccaaguacgauugcaagauaaugaccuccaaaacagacgugucuagcucagucauuaccaguuuaggugcuaucguguccuguuauggcaagacuaaaugcacggccagcaacaagaaucgagggaucauuaaaacauuuucuaacggaugugauuacgucucaaauaagggcguggacaccguuaguguggguaacacucuguauuacguaaauaagcaagaagggaaaagccuauaugucaagggagagccuaucauuaacuucuacgacccacucguguucccguccgaugaauuugacgcgucuauaucgcagguuaaugagaaaaucaaccagagccuggccuucauuagaaaguccgaugaacuuuugcacaaugugaacgcaggcaaaucaaccacaaauaucaugaucaccacuauuauaaucgucauuaucgugauucugcucagucugaucgcuguaggccuucuguuguacugcaaggccaggucuacacccgugacgcucagcaaggaccagcuguccgggauaaacaauaucgcuuuuucaaacugaggacuagugaagggaacacccaaauuuaauucagccuuaagcacaauuaauuaagagugaaacguaauuguacaagcaguuggucacccaccauagggcaugaucaacaccgcaaccuuuccuuuuucccccagugauucugaaaaaccccucuucccuucagcuugcuuagauguuccaaauuuaguaagcuuaaggcggccuacagaagaaaaagaaaaaaaaggccacaaaaguucccucucacuuucaguaaauaaaauaaaagcagcaacagaaauaaagaaauaaaugaaauucaaaaugaaauaaauauuguguugugcagcauuaaaaaaucaauaaaaauuaaaaaugagcaagaucuaaaaaaaaaaaaaaaaaaaaaaaaaaaaaaaaaaaaaaaaaaaaaaaaaaaaaaaaaaaaaaaaugcaucccccccccccccccccccccccccccccccaaaggcucuuuucagagccaccagaauu

SEQ ID NO: 1207 - RNA, 2319 nt, Artificial Sequence
  mRNA product Design h-2 comprising derived and/or modified sequence from HRSV(A2)__F0_DSCav1 (opt4)
gggagacccgugacccggaaguuguacggcuacgcgacuuucccucccacaaacccucgcgcccuuccuuuccuacuugggcccggcagaaagcuuaccauggagcugcugauccugaaggccaacgccaucaccaccauccugaccgccgugaccuucugcuucgccagcggccagaacaucaccgaggaguucuaccagagcaccugcagcgccgugagcaagggcuaccugagcgcccugagaaccggcugguacaccagcgugaucaccaucgagcugagcaacaucaaggagaacaagugcaacggcaccgacgccaaggugaagcugaucaagcaggagcuggacaaguacaagaacgccgugaccgagcugcagcugcugaugcagagcacccccgccaccaacaacagagccagaagagagcugcccagauucaugaacuacacccugaacaacgccaagaagaccaacgugacccugagcaagaagagaaagagaagauuccugggcuuccugcugggcgugggcagcgccaucgccagcggcguggccgugugcaaggugcugcaccuggagggcgaggugaacaagaucaagagcgcccugcugagcaccaacaaggccguggugagccugagcaacggcgugagcgugcugaccuucaaggugcuggaccugaagaacuacaucgacaagcagcugcugcccauccugaacaagcagagcugcagcaucagcaacaucgagaccgugaucgaguuccagcagaagaacaacagacugcuggagaucaccagagaguucagcgugaacgccggcgugaccacccccgugagcaccuacaugcugaccaacagcgagcugcugagccugaucaacgacaugcccaucaccaacgaccagaagaagcugaugagcaacaacgugcagaucgugagacagcagagcuacagcaucaugugcaucaucaaggaggaggugcuggccuacguggugcagcugccccuguacggcgugaucgacacccccugcuggaagcugcacaccagcccccugugcaccaccaacaccaaggagggcagcaacaucugccugaccagaaccgacagaggcugguacugcgacaacgccggcagcgugagcuucuucccccaggccgagaccugcaaggugcagagcaacagaguguucugcgacaccaugaacagccugacccugcccagcgaggugaaccugugcaacguggacaucuucaaccccaaguacgacugcaagaucaugaccagcaagaccgacgugagcagcagcgugaucaccagccugggcgccaucgugagcugcuacggcaagaccaagugcaccgccagcaacaagaacagaggcaucaucaagaccuucagcaacggcugcgacuacgugagcaacaagggcguggacaccgugagcgugggcaacacccuguacuacgugaacaagcaggagggcaagagccuguacgugaagggcgagcccaucaucaacuucuacgacccccugguguuccccagcgacgaguucgacgccagcaucagccaggugaacgagaagaucaaccagagccuggccuucaucagaaagagcgacgagcugcugcacaacgugaacgccggcaagagcaccaccaacaucaugaucaccaccaucaucaucgugaucaucgugauccugcugagccugaucgccgugggccugcugcuguacugcaaggccagaagcacccccgugacccugagcaaggaccagcugagcggcaucaacaacaucgccuucagcaacugaggacuagugaagggaacacccaaauuuaauucagccuuaagcacaauuaauuaagagugaaacguaauuguacaagcaguuggucacccaccauagggcaugaucaacaccgcaaccuuuccuuuuucccccagugauucugaaaaaccccucuucccuucagcuugcuuagauguuccaaauuuaguaagcuuaaggcggccuacagaagaaaaagaaaaaaaaggccacaaaaguucccucucacuuucaguaaauaaaauaaaagcagcaacagaaauaaagaaauaaaugaaauucaaaaugaaauaaauauuguguugugcagcauuaaaaaaucaauaaaaauuaaaaaugagcaagaucuaaaaaaaaaaaaaaaaaaaaaaaaaaaaaaaaaaaaaaaaaaaaaaaaaaaaaaaaaaaaaaaaugcaucccccccccccccccccccccccccccccccaaaggcucuuuucagagccaccagaauu

SEQ ID NO: 1208 - RNA, 2319 nt, Artificial Sequence
  mRNA product Design h-2 comprising derived and/or modified sequence from HRSV(A2)__F0_DSCav1 (opt5)
gggagacccgugacccggaaguuguacggcuacgcgacuuucccucccacaaacccucgcgcccuuccuuuccuacuugggcccggcagaaagcuuaccauggagcugcucauccugaaggccaacgcuauuaccacaauccuuacggccgugaccuucugcuuugcgagcggccagaauauuacagaagaguucuaccaauccaccuguucugcugucagcaaaggguaucuguccgcccucagaacaggaugguacaccucuguuaucacaauugaacugagcaacaucaaggagaauaaaugcaacggcaccgacgccaaggugaaacuuaucaagcaggaacuggauaaguauaaaaaugcugugacggagcuccagcugcugaugcaguccacccccgccacaaacaaucgggcucgcagagagcucccucgguuuaugaacuacacccugaauaacgccaagaaaacaaaugucacccuuucuaagaaacgcaagagacgguuccugggguuucuccugggagugggcagcgcgauugccuccgggguugcuguguguaagguccuucaccuggaaggagaggugaacaaaaucaagagcgcccuccugucuacgaauaaagcuguugugucccugagcaacggcgucucugugcucacauucaaggugcuggaccuuaaaaauuauauugauaagcaacugcucccgauccugaacaaacaguccugcagcauuucuaacaucgaaaccgucauugaguuucagcagaagaauaaccgccuucuggagaucacaagagaauuuuccguuaaugccggcgugaccacccccgugagcacauacaugcucacgaacuccgagcugcugucucucaucaaugacaugccuauuaccaacgaucaaaagaaacugaugagcaauaacguccagaucgugcggcagcaguccuauagcauuauguguaucauuaaggaagagguucuugcguacgugguccaacugccccucuacggggugaucgacacaccuugcuggaaacugcauaccucuccccuuuguacaaccaauacgaaggaaggauccaacaucugccugacacgcaccgauagaggcugguauugugacaaugccgggagcguuucuuucuucccucaggcugagaccugcaaagugcagagcaaccgggucuuuugugauacaaugaacucccucacccugccgucugaggugaaucugugcaaugucgacauuuucaaccccaaguacgauugcaagaucaugacaagcaaaacggacguguccagcucuguuauuaccucccucggagccaucgugagcuguuauggcaagacaaaaugcaccgcuucuaacaagaaucgcgggauuaucaaaacauuuuccaacggaugugauuacgucagcaauaagggcguggacaccguuuccgugggcaacacgcuguauuacgucaauaagcaagaagggaaaucucuuuaugugaagggagagccuaucauuaacuucuacgacccccugguguucccuagcgaugaauuugacgccuccaucucucagguuaaugagaaaauuaaccagagccucgccuucaucagaaaguccgaugaacugcugcacaaugucaacgcuggcaaaagcaccacaaauauuaugaucaccacaauuaucaucgugauuaucgugauucuucucucucugaucgcggucgggcugcuccuguacugcaaggcccgguccacccccgugacgcuuagcaaggaccagcugucuggaauuaacaauaucgcuuuuuccaacugaggacuagugaagggaacacccaaauuuaauucagccuuaagcacaauuaauuaagagugaaacguaauuguacaagcaguuggucacccaccauagggcaugaucaacaccgcaaccuuuccuuuuucccccagugauucugaaaaaccccucuucccuucagcuugcuuagauguuccaaauuuaguaagcuuaaggcggccuacagaagaaaaagaaaaaaaaggccacaaaaguucccucucacuuucaguaaauaaaauaaaagcagcaacagaaauaaagaaauaaaugaaauucaaaaugaaauaaauauuguguugugcagcauuaaaaaaucaauaaaaauuaaaaaugagcaagaucuaaaaaaaaaaaaaaaaaaaaaaaaaaaaaaaaaaaaaaaaaaaaaaaaaaaaaaaaaaaaaaaaugcaucccccccccccccccccccccccccccccccaaaggcucuuuucagagccaccagaauu

SEQ ID NO: 1209 - RNA, 2319 nt, Artificial Sequence
  mRNA product Design h-2 comprising derived and/or modified sequence from HRSV(A2)__F0_DSCav1 (opt6)
gggagacccgugacccggaaguuguacggcuacgcgacuuucccucccacaaacccucgcgcccuuccuuuccuacuugggcccggcagaaagcuuaccauggaauuauuaauccucaaagcgaacgcuauuacuaccauucuaacagcagucacauucugcuucgccucaggccaaaacauuacagaagaauuuuaccaaucaacaugcucugccguaucaaaaggcuaccuauccgcccuacgaacaggcugguacacaagcguaauaacaaucgaacuaucaaacauaaaagaaaacaaaugcaacgguacagacgccaaaguuaaacuaauaaaacaagaacucgauaaauacaaaaacgcaguaacagaauuacaacuacuaaugcaaucaacaccugcaacaaacaauagagccaggagagaauuaccucgauucaugaauuacacacucaauaacgcaaaaaaaaccaacguuacacuaucaaaaaaaagaaaacgacgauucuuaggauuccuacucggagucggaucagcaauagcaucuggcguugcaguaugcaaaguauuacacuuagaaggugaagucaauaaaauaaaaagcgcgcuacuaaguacaaacaaagcagucgucucccuaucaaacggagucucaguccuaacauucaaaguacucgaccuaaaaaauuacauagauaaacaacuacuuccaauauuaaacaaacaauccuguagcaucagcaauauagaaacaguaauagaauuucaacaaaaaaacaaccgauuauuagaaaucacucgagaauuuuccguaaacgccgggguaacaacuccagucucaaccuacaugcuaaccaauucagaacuauugagcuuaauaaacgacaugccaauaaccaacgaccaaaaaaaacuaaugucuaacaauguucaaaucgucagacaacaaaguuacaguauaauguguauaaucaaagaagaaguccuagcauacguaguccaacucccacuauauggaguuaucgacacaccauguuggaaauuacacaccucaccauuaugcacaaccaauacaaaagaaggaucaaacauaugccuuacacggacagaccgcggaugguauugugacaacgcuggcucagucuccuuuuucccacaagcagaaacaugcaaaguacaaucaaacagagucuuuugcgauaccaugaacucacuuacauuaccaagcgaaguaaaucuuuguaacgucgacaucuucaauccuaaauaugacugcaaaaucaugaccucaaaaacagacguuagcucuucaguaaucacuagcuuaggagcaaucguaucaugcuacggcaaaacaaaauguacagcaucaaauaaaaacagaggaaucauaaaaacauuuucaaacggaugcgauuauguaagcaacaaaggaguagauacuguaagcguaggaaacacauuguacuauguaaacaaacaagaaggaaaaucacucuauguaaaaggagaaccuauaaucaauuucuacgauccauuaguguucccaucagaugaauuugacgccucaauaucacaaguuaaugaaaaaauaaaucaaucgcuagcauucauacguaaaucagaugaauuacuacauaacguaaacgcaggcaaauccacaacaaauaucaugaucacaacaauuauaauaguaauaauaguaauacuacuaucacuaauagccguaggacuccuacuauacugcaaagcaagaucuacuccaguaacccucucaaaagaucaacuaagcggaauuaauaacaucgcauucagcaacuaaggacuagugaagggaacacccaaauuuaauucagccuuaagcacaauuaauuaagagugaaacguaauuguacaagcaguuggucacccaccauagggcaugaucaacaccgcaaccuuuccuuuuucccccagugauucugaaaaaccccucuucccuucagcuugcuuagauguuccaaauuuaguaagcuuaaggcggccuacagaagaaaaagaaaaaaaaggccacaaaaguucccucucacuuucaguaaauaaaauaaaagcagcaacagaaauaaagaaauaaaugaaauucaaaaugaaauaaauauuguguugugcagcauuaaaaaaucaauaaaaauuaaaaaugagcaagaucuaaaaaaaaaaaaaaaaaaaaaaaaaaaaaaaaaaaaaaaaaaaaaaaaaaaaaaaaaaaaaaaaugcaucccccccccccccccccccccccccccccccaaaggcucuuuucagagccaccagaauu

SEQ ID NO: 1210 - RNA, 2319 nt, Artificial Sequence
  mRNA product Design h-2 comprising derived and/or modified sequence from HRSV(A2)__F0_DSCav1 (opt11)
gggagacccgugacccggaaguuguacggcuacgcgacuuucccucccacaaacccucgcgcccuuccuuuccuacuugggcccggcagaaagcuuaccauggaacuacuuauccucaaagccaacgccaucaccaccauccucacagcaguaaccuuuugcuucgccucaggccaaaauaucacagaagaauuuuaccagaguaccugcuccgccguauccaaaggauaccucagcgcgcuccgcaccggcugguacacuucaguaaucacaaucgaacuauccaacaucaaagaaaacaaaugcaacggcaccgacgcgaaagucaaacucaucaaacaagaacuagacaaauacaaaaaugccguaacagaacuacaacuguuaaugcagagcacacccgccaccaacaaccgcgcccgccgggaacucccccgauucaugaacuacacacucaacaacgccaaaaagacgaacgucacccucagcaagaaacgaaaacgcagauuccucgguuuccuacuaggcguaggcucagcaauagccuccggaguagccgucugcaaaguccugcacuuagaaggcgaagucaacaaaaucaaauccgcccuacucuccacgaacaaagccgucgucucccuguccaacggugucuccguuuuaaccuucaaaguucuggaccucaaaaacuacauagacaaacagcuucuccccauccucaacaaacaauccuguagcaucuccaacaucgaaaccgucauagaauuucaacagaaaaacaacagacugcucgaaaucacccgcgaguucuccgucaacgccggcgucacgacucccgucuccaccuauaugcucacgaacucggaacuccuuucccuaaucaacgacaugccgaucaccaacgaccaaaagaaacucaugucaaacaacguacaaauuguccgccaacaaucauacuccaucaugugcauaauuaaagaagaaguccucgcauacguaguccaacucccccucuacggcgucaucgacacccccugcuggaaacuccacaccuccccacucugcacaaccaacaccaaagaaggcucaaacauaugccuaacgcgcaccgaucgcgguugguacugcgacaacgccgguuccgucagcuucuucccccaagcagagacaugcaaaguccaaucaaaccgcgucuucugcgacaccaugaacucacuaacccuuccaagcgaagucaaccucugcaacguugacaucuucaaccccaaauacgacuguaaaaucaugaccuccaagaccgacguauccucuuccgucaucacaucccuaggcgcuaucguauccugcuaugguaaaaccaaaugcaccgccuccaacaaaaaccgcggcaucaucaagacauuuuccaacggcugcgacuacgugagcaacaaaggcgucgacaccgucuccguaggcaacacccucuacuauguaaacaaacaagagggcaaaucacucuacgucaaaggggaacccaucaucaacuucuacgacccgcucguauuccccagcgaugaguucgacgccuccaucucccaggucaacgaaaagauaaaccaaucacucgcauucauucguaaauccgacgaacuccuacacaacgugaaugcaggcaaaucgaccacuaacaucaugaucaccaccaucaucaucgucaucauagucauccuccugucccuuaucgccgucggucuuuuauuauacugcaaagcccgcagcacccccgucacccucucuaaggaccaacucagcggcaucaauaacaucgcauucucuaacuaaggacuagugaagggaacacccaaauuuaauucagccuuaagcacaauuaauuaagagugaaacguaauuguacaagcaguuggucacccaccauagggcaugaucaacaccgcaaccuuuccuuuuucccccagugauucugaaaaaccccucuucccuucagcuugcuuagauguuccaaauuuaguaagcuuaaggcggccuacagaagaaaaagaaaaaaaaggccacaaaaguucccucucacuuucaguaaauaaaauaaaagcagcaacagaaauaaagaaauaaaugaaauucaaaaugaaauaaauauuguguugugcagcauuaaaaaaucaauaaaaauuaaaaaugagcaagaucuaaaaaaaaaaaaaaaaaaaaaaaaaaaaaaaaaaaaaaaaaaaaaaaaaaaaaaaaaaaaaaaaugcaucccccccccccccccccccccccccccccccaaaggcucuuuucagagccaccagaauu

SEQ ID NO: 1211 - RNA, 2099 nt, Artificial Sequence
  mRNA product Design h-3 comprising derived and/or modified sequence from HRSV(A2)__F0_DSCav1 (opt1)
gggagacccgugacccggaaguuguacggcuacgcgacuuucccucccacaaacccucgcgcccuuccuuuccuacuugggcccggcagaaagcuuaccauggagcugcucauccugaaggccaacgccaucaccaccauccugacggcggugaccuucugcuucgccagcggccagaacaucaccgaggaguucuaccaguccacgugcagcgccgucuccaagggguaccucagcgcccugcggaccggcugguacaccuccgugaucaccaucgagcugagcaacaucaaggagaacaagugcaacgggaccgacgccaaggugaagcucaucaagcaggagcuggacaaguacaagaacgcggucacggagcugcagcuccugaugcaguccaccccggcaaccaacaaccgcgcccggcgcgagcugccccgguucaugaacuacacccucaacaacgccaagaagacgaacgugacccugagcaagaagcgcaagcggcgcuuccugggcuuccuccugggggugggcuccgccaucgcgagcggcgucgccgugugcaaggugcugcaccucgagggggaggucaacaagaucaagagcgcccugcuguccaccaacaaggccguggugagccucuccaacggcgucagcgugcugaccuucaaggugcuggaccucaagaacuacaucgacaagcagcugcugcccauccugaacaagcagagcugcuccaucagcaacaucgagacggugaucgaguuccagcagaagaacaaccggcuccuggagaucacccgcgaguucagcgugaacgccggggucaccacccccguguccacguacaugcugaccaacagcgagcuccugucccugaucaacgacaugccgaucaccaacgaccagaagaagcucaugagcaacaacgugcagaucguccggcagcaguccuacagcaucaugugcaucaucaaggaggaggugcuggcguacgugguccagcugccccucuacggcgugaucgacacccccugcuggaagcugcacacgagcccccugugcaccaccaacaccaaggagggguccaacaucugccucacgcgcaccgaccggggcugguacugcgacaacgccggcagcgucuccuucuucccgcaggccgagaccugcaaggugcagagcaaccgcguguucugcgacaccaugaacucccugacgcugcccagcgagguaaaccucugcaacgucgacaucuucaaccccaaguacgacugcaagaucaugaccuccaagaccgacgugagcuccagcgugaucaccucccugggggccaucgucagcugcuacggcaagacgaagugcaccgccagcaacaagaaccgggggaucaucaagaccuucuccaacggcugcgacuacgugagcaacaagggcguggacaccguguccgucgggaacacccuguacuacgugaacaagcaggagggcaagagccucuacgugaagggggagcccaucaucaacuucuacgacccgcuggucuuccccuccgacgaguucgacgcgagcaucucccaggugaacgagaagaucaaccagagccuggccuucauccgcaaguccgacgagcugcuccacaacgugaacgccggcaagagcacgaccaacaucaugaucaccaccaucaucaucgucaucaucgugauccugcugucccucaucgccguggggcugcugcucuacugcaaggcccggagcacgcccgucacccuguccaaggaccagcugagcggcaucaacaacaucgcguucuccaacugaggacuaguggaagcauuuuccuggcugauuaaaagaaauuacucagcuauggucaucuguuccuguuagaaggcuaugcagcauauuauauacuaugcgcauguuaugaaaugcauaauaaaaaauuuuaaaaaaucuaaaagaucuaaaaaaaaaaaaaaaaaaaaaaaaaaaaaaaaaaaaaaaaaaaaaaaaaaaaaaaaaaaaaaaaugcaucccccccccccccccccccccccccccccccaaaggcucuuuucagagccaccagaauu

SEQ ID NO: 1212 - RNA, 2099 nt, Artificial Sequence
  mRNA product Design h-3 comprising derived and/or modified sequence from HRSV(A2)__F0_DSCav1 (opt1)
gggagacccgugacccggaaguuguacggcuacgcgacuuucccucccacaaacccucgcgcccuuccuuuccuacuugggcccggcagaaagcuuaccauggagcugcucauccugaaggccaacgccaucaccaccauccugacggcggugaccuucugcuucgccagcggccagaacaucaccgaggaguucuaccaguccacgugcagcgccgucuccaagggguaccucagcgcccugcgcaccggcugguacaccuccgugaucaccaucgagcugagcaacaucaaggagaacaagugcaacgggaccgacgccaaggugaagcucaucaagcaggagcuggacaaguacaagaacgcggucacggagcugcagcuccugaugcaguccacccccgccaccaacaaccgggcccgccgggagcugccgcgcuucaugaacuacacccucaacaacgccaagaagacgaacgugacccugagcaagaagcggaagcgccgguuccugggcuuccuccugggggugggcuccgcgaucgccagcggcgucgccgugugcaaggugcugcaccucgagggggaggucaacaagaucaaguccgcccugcugagcaccaacaaggccguggugucccucagcaacggcgucuccgugcugaccuucaaggugcuggaccucaagaacuacaucgacaagcagcugcugcccauccucaacaagcagagcugcuccaucagcaacaucgagacggucaucgaguuccagcagaagaacaaccgccugcuggagaucacccgggaguucuccgugaacgcgggggugaccacccccgucagcacguacaugcucaccaacagcgagcugcugucccucaucaacgacaugcccaucaccaacgaccagaagaagcugaugagcaacaacgugcagaucgugcgccagcaguccuacagcaucaugugcaucaucaaggaggagguccuggccuacguggugcagcucccgcuguacggcgucaucgacacccccugcuggaagcugcacacgagcccccucugcaccaccaacaccaaggaggggagcaacaucugccugacgcggaccgaccgcggcugguacugcgacaacgccggcuccgugagcuucuucccccaggccgagaccugcaagguccaguccaaccggguguucugcgacaccaugaacagccugacgcucccguccgaggugaaccugugcaacgucgacaucuucaaccccaaguacgacugcaagaucaugaccagcaagaccgacguguccagcuccgugaucaccagccugggggccaucgucuccugcuacggcaagacgaagugcaccgcgagcaacaagaaccgcgggaucaucaagaccuucuccaacggcugcgacuacgugagcaacaagggcguggacaccgucagcguggggaacacccucuacuacgugaacaagcaggagggcaagucccuguacgucaagggggagcccaucaucaacuucuacgacccccugguguucccgagcgacgaguucgacgccuccaucagccaggugaacgagaagaucaaccagucccucgccuucauccggaaguccgacgagcugcugcacaacgucaacgccggcaaguccacgaccaacaucaugaucaccaccaucaucaucgugaucaucgugauccugcucagccugaucgccgucgggcugcuccuguacugcaaggcgcgcuccacgcccgugacccugagcaaggaccagcucuccggcaucaacaacaucgccuucagcaacugaggacuaguggaagcauuuuccuggcugauuaaaagaaauuacucagcuauggucaucuguuccuguuagaaggcuaugcagcauauuauauacuaugcgcauguuaugaaaugcauaauaaaaaauuuuaaaaaaucuaaaagaucuaaaaaaaaaaaaaaaaaaaaaaaaaaaaaaaaaaaaaaaaaaaaaaaaaaaaaaaaaaaaaaaaugcaucccccccccccccccccccccccccccccccaaaggcucuuuucagagccaccagaauu

SEQ ID NO: 1213 - RNA, 2099 nt, Artificial Sequence
  mRNA product Design h-3 comprising derived and/or modified sequence from HRSV(A2)__F0_DSCav1 (opt2)
gggagacccgugacccggaaguuguacggcuacgcgacuuucccucccacaaacccucgcgcccuuccuuuccuacuugggcccggcagaaagcuuaccauggagcuccucauccucaaggccaacgccaucaccaccauccucaccgccgucaccuucugcuucgccuccggccagaacaucaccgaggaguucuaccaguccaccugcuccgccgucuccaagggcuaccucuccgcccuccgcaccggcugguacaccuccgucaucaccaucgagcucuccaacaucaaggagaacaagugcaacggcaccgacgccaaggucaagcucaucaagcaggagcucgacaaguacaagaacgccgucaccgagcuccagcuccucaugcaguccacccccgccaccaacaaccgcgcccgccgcgagcucccccgcuucaugaacuacacccucaacaacgccaagaagaccaacgucacccucuccaagaagcgcaagcgccgcuuccucggcuuccuccucggcgucggcuccgccaucgccuccggcgucgccgucugcaagguccuccaccucgagggcgaggucaacaagaucaaguccgcccuccucuccaccaacaaggccgucgucucccucuccaacggcgucuccguccucaccuucaagguccucgaccucaagaacuacaucgacaagcagcuccuccccauccucaacaagcaguccugcuccaucuccaacaucgagaccgucaucgaguuccagcagaagaacaaccgccuccucgagaucacccgcgaguucuccgucaacgccggcgucaccacccccgucuccaccuacaugcucaccaacuccgagcuccucucccucaucaacgacaugcccaucaccaacgaccagaagaagcucauguccaacaacguccagaucguccgccagcaguccuacuccaucaugugcaucaucaaggaggagguccucgccuacgucguccagcucccccucuacggcgucaucgacacccccugcuggaagcuccacaccuccccccucugcaccaccaacaccaaggagggcuccaacaucugccucacccgcaccgaccgcggcugguacugcgacaacgccggcuccgucuccuucuucccccaggccgagaccugcaagguccaguccaaccgcgucuucugcgacaccaugaacucccucacccuccccuccgaggucaaccucugcaacgucgacaucuucaaccccaaguacgacugcaagaucaugaccuccaagaccgacgucuccuccuccgucaucaccucccucggcgccaucgucuccugcuacggcaagaccaagugcaccgccuccaacaagaaccgcggcaucaucaagaccuucuccaacggcugcgacuacgucuccaacaagggcgucgacaccgucuccgucggcaacacccucuacuacgucaacaagcaggagggcaagucccucuacgucaagggcgagcccaucaucaacuucuacgacccccucgucuuccccuccgacgaguucgacgccuccaucucccaggucaacgagaagaucaaccagucccucgccuucauccgcaaguccgacgagcuccuccacaacgucaacgccggcaaguccaccaccaacaucaugaucaccaccaucaucaucgucaucaucgucauccuccucucccucaucgccgucggccuccuccucuacugcaaggcccgcuccacccccgucacccucuccaaggaccagcucuccggcaucaacaacaucgccuucuccaacugaggacuaguggaagcauuuuccuggcugauuaaaagaaauuacucagcuauggucaucuguuccuguuagaaggcuaugcagcauauuauauacuaugcgcauguuaugaaaugcauaauaaaaaauuuuaaaaaaucuaaaagaucuaaaaaaaaaaaaaaaaaaaaaaaaaaaaaaaaaaaaaaaaaaaaaaaaaaaaaaaaaaaaaaaaugcaucccccccccccccccccccccccccccccccaaaggcucuuuucagagccaccagaauu

SEQ ID NO: 1214 - RNA, 2099 nt, Artificial Sequence
  mRNA product Design h-3 comprising derived and/or modified sequence from HRSV(A2)__F0_DSCav1 (opt3)
gggagacccgugacccggaaguuguacggcuacgcgacuuucccucccacaaacccucgcgcccuuccuuuccuacuugggcccggcagaaagcuuaccauggagcugcucauccuuaaggccaacgcuauuaccacaauacugacugcagugacguucugcuuugccagcggccagaauaucaccgaagaguucuaccaauccacauguucugcggucucaaaaggguauuugagugcuuuaagaacuggaugguacaccagcguuauuacaaucgaacuguccaacauuaaggagaauaaaugcaacgguaccgacgccaaggugaaacuaaucaagcaggaacucgauaaguauaaaaaugcaguaacugagcugcagcuucugaugcagucuacacccgccaccaacaauagggcucggcgcgaguugccucgauuuaugaacuacacgcucaauaacgcaaagaaaacuaaugugacccugucgaagaaacguaagagaagguuccugggcuuucucuuaggggucggaucagccauagcuagcggcguggccguuuguaaggugcugcaccuugaaggugaggucaacaaaaucaagagugcguugcuguccacaaauaaagcagugguaucucuaagcaacgggguuuccgugcucacuuucaagguccuggaccuuaaaaauuauauugauaagcaacuguugccaauccucaacaaacagucaugcaguauuagcaacaucgaaaccgugauagaguuucagcagaagaauaaccggcuguuagagauuacacgcgaguucucugugaaugccggagucaccacgccgguuuccacuuacaugcugacaaacucagaacuccuuagccugaucaaugacaugcccauuaccaacgaucaaaagaaauugaugaguaauaacgugcagaucguaagacagcagucuuauuccaucauguguauuauaaaggaagaggugcuagcuuacgucgugcaacugccucucuacggcguuaucgacacuccaugcuggaaacugcauacaagcccccuuuguaccacgaauaccaaggaaggcucgaacauuugccugacaaggacugaucgggggugguauugugacaaugccggaucuguguccuuuuucccucaggcagagaccugcaaaguccagucaaaccgcguguuuugugauacaaugaauaguuugacucucccaagcgagguaaaccugugcaauguugacaucuucaaccccaaguacgauugcaagauaaugaccuccaaaacagacgugucuagcucagucauuaccaguuuaggugcuaucguguccuguuauggcaagacuaaaugcacggccagcaacaagaaucgagggaucauuaaaacauuuucuaacggaugugauuacgucucaaauaagggcguggacaccguuaguguggguaacacucuguauuacguaaauaagcaagaagggaaaagccuauaugucaagggagagccuaucauuaacuucuacgacccacucguguucccguccgaugaauuugacgcgucuauaucgcagguuaaugagaaaaucaaccagagccuggccuucauuagaaaguccgaugaacuuuugcacaaugugaacgcaggcaaaucaaccacaaauaucaugaucaccacuauuauaaucgucauuaucgugauucugcucagucugaucgcuguaggccuucuguuguacugcaaggccaggucuacacccgugacgcucagcaaggaccagcuguccgggauaaacaauaucgcuuuuucaaacugaggacuaguggaagcauuuuccuggcugauuaaaagaaauuacucagcuauggucaucuguuccuguuagaaggcuaugcagcauauuauauacuaugcgcauguuaugaaaugcauaauaaaaaauuuuaaaaaaucuaaaagaucuaaaaaaaaaaaaaaaaaaaaaaaaaaaaaaaaaaaaaaaaaaaaaaaaaaaaaaaaaaaaaaaaugcaucccccccccccccccccccccccccccccccaaaggcucuuuucagagccaccagaauu

SEQ ID NO: 1215 - RNA, 2099 nt, Artificial Sequence
  mRNA product Design h-3 comprising derived and/or modified sequence from HRSV(A2)__F0_DSCav1 (opt4)
gggagacccgugacccggaaguuguacggcuacgcgacuuucccucccacaaacccucgcgcccuuccuuuccuacuugggcccggcagaaagcuuaccauggagcugcugauccugaaggccaacgccaucaccaccauccugaccgccgugaccuucugcuucgccagcggccagaacaucaccgaggaguucuaccagagcaccugcagcgccgugagcaagggcuaccugagcgcccugagaaccggcugguacaccagcgugaucaccaucgagcugagcaacaucaaggagaacaagugcaacggcaccgacgccaaggugaagcugaucaagcaggagcuggacaaguacaagaacgccgugaccgagcugcagcugcugaugcagagcacccccgccaccaacaacagagccagaagagagcugcccagauucaugaacuacacccugaacaacgccaagaagaccaacgugacccugagcaagaagagaaagagaagauuccugggcuuccugcugggcgugggcagcgccaucgccagcggcguggccgugugcaaggugcugcaccuggagggcgaggugaacaagaucaagagcgcccugcugagcaccaacaaggccguggugagccugagcaacggcgugagcgugcugaccuucaaggugcuggaccugaagaacuacaucgacaagcagcugcugcccauccugaacaagcagagcugcagcaucagcaacaucgagaccgugaucgaguuccagcagaagaacaacagacugcuggagaucaccagagaguucagcgugaacgccggcgugaccacccccgugagcaccuacaugcugaccaacagcgagcugcugagccugaucaacgacaugcccaucaccaacgaccagaagaagcugaugagcaacaacgugcagaucgugagacagcagagcuacagcaucaugugcaucaucaaggaggaggugcuggccuacguggugcagcugccccuguacggcgugaucgacacccccugcuggaagcugcacaccagcccccugugcaccaccaacaccaaggagggcagcaacaucugccugaccagaaccgacagaggcugguacugcgacaacgccggcagcgugagcuucuucccccaggccgagaccugcaaggugcagagcaacagaguguucugcgacaccaugaacagccugacccugcccagcgaggugaaccugugcaacguggacaucuucaaccccaaguacgacugcaagaucaugaccagcaagaccgacgugagcagcagcgugaucaccagccugggcgccaucgugagcugcuacggcaagaccaagugcaccgccagcaacaagaacagaggcaucaucaagaccuucagcaacggcugcgacuacgugagcaacaagggcguggacaccgugagcgugggcaacacccuguacuacgugaacaagcaggagggcaagagccuguacgugaagggcgagcccaucaucaacuucuacgacccccugguguuccccagcgacgaguucgacgccagcaucagccaggugaacgagaagaucaaccagagccuggccuucaucagaaagagcgacgagcugcugcacaacgugaacgccggcaagagcaccaccaacaucaugaucaccaccaucaucaucgugaucaucgugauccugcugagccugaucgccgugggccugcugcuguacugcaaggccagaagcacccccgugacccugagcaaggaccagcugagcggcaucaacaacaucgccuucagcaacugaggacuaguggaagcauuuuccuggcugauuaaaagaaauuacucagcuauggucaucuguuccuguuagaaggcuaugcagcauauuauauacuaugcgcauguuaugaaaugcauaauaaaaaauuuuaaaaaaucuaaaagaucuaaaaaaaaaaaaaaaaaaaaaaaaaaaaaaaaaaaaaaaaaaaaaaaaaaaaaaaaaaaaaaaaugcaucccccccccccccccccccccccccccccccaaaggcucuuuucagagccaccagaauu

SEQ ID NO: 1216 - RNA, 2099 nt, Artificial Sequence
  mRNA product Design h-3 comprising derived and/or modified sequence from HRSV(A2)__F0_DSCav1 (opt5)
gggagacccgugacccggaaguuguacggcuacgcgacuuucccucccacaaacccucgcgcccuuccuuuccuacuugggcccggcagaaagcuuaccauggagcugcucauccugaaggccaacgcuauuaccacaauccuuacggccgugaccuucugcuuugcgagcggccagaauauuacagaagaguucuaccaauccaccuguucugcugucagcaaaggguaucuguccgcccucagaacaggaugguacaccucuguuaucacaauugaacugagcaacaucaaggagaauaaaugcaacggcaccgacgccaaggugaaacuuaucaagcaggaacuggauaaguauaaaaaugcugugacggagcuccagcugcugaugcaguccacccccgccacaaacaaucgggcucgcagagagcucccucgguuuaugaacuacacccugaauaacgccaagaaaacaaaugucacccuuucuaagaaacgcaagagacgguuccugggguuucuccugggagugggcagcgcgauugccuccgggguugcuguguguaagguccuucaccuggaaggagaggugaacaaaaucaagagcgcccuccugucuacgaauaaagcuguugugucccugagcaacggcgucucugugcucacauucaaggugcuggaccuuaaaaauuauauugauaagcaacugcucccgauccugaacaaacaguccugcagcauuucuaacaucgaaaccgucauugaguuucagcagaagaauaaccgccuucuggagaucacaagagaauuuuccguuaaugccggcgugaccacccccgugagcacauacaugcucacgaacuccgagcugcugucucucaucaaugacaugccuauuaccaacgaucaaaagaaacugaugagcaauaacguccagaucgugcggcagcaguccuauagcauuauguguaucauuaaggaagagguucuugcguacgugguccaacugccccucuacggggugaucgacacaccuugcuggaaacugcauaccucuccccuuuguacaaccaauacgaaggaaggauccaacaucugccugacacgcaccgauagaggcugguauugugacaaugccgggagcguuucuuucuucccucaggcugagaccugcaaagugcagagcaaccgggucuuuugugauacaaugaacucccucacccugccgucugaggugaaucugugcaaugucgacauuuucaaccccaaguacgauugcaagaucaugacaagcaaaacggacguguccagcucuguuauuaccucccucggagccaucgugagcuguuauggcaagacaaaaugcaccgcuucuaacaagaaucgcgggauuaucaaaacauuuuccaacggaugugauuacgucagcaauaagggcguggacaccguuuccgugggcaacacgcuguauuacgucaauaagcaagaagggaaaucucuuuaugugaagggagagccuaucauuaacuucuacgacccccugguguucccuagcgaugaauuugacgccuccaucucucagguuaaugagaaaauuaaccagagccucgccuucaucagaaaguccgaugaacugcugcacaaugucaacgcuggcaaaagcaccacaaauauuaugaucaccacaauuaucaucgugauuaucgugauucuucucucucugaucgcggucgggcugcuccuguacugcaaggcccgguccacccccgugacgcuuagcaaggaccagcugucuggaauuaacaauaucgcuuuuuccaacugaggacuaguggaagcauuuuccuggcugauuaaaagaaauuacucagcuauggucaucuguuccuguuagaaggcuaugcagcauauuauauacuaugcgcauguuaugaaaugcauaauaaaaaauuuuaaaaaaucuaaaagaucuaaaaaaaaaaaaaaaaaaaaaaaaaaaaaaaaaaaaaaaaaaaaaaaaaaaaaaaaaaaaaaaaugcaucccccccccccccccccccccccccccccccaaaggcucuuuucagagccaccagaauu

SEQ ID NO: 1217 - RNA, 2099 nt, Artificial Sequence
  mRNA product Design h-3 comprising derived and/or modified sequence from HRSV(A2)__F0_DSCav1 (opt6)
gggagacccgugacccggaaguuguacggcuacgcgacuuucccucccacaaacccucgcgcccuuccuuuccuacuugggcccggcagaaagcuuaccauggaauuauuaauccucaaagcgaacgcuauuacuaccauucuaacagcagucacauucugcuucgccucaggccaaaacauuacagaagaauuuuaccaaucaacaugcucugccguaucaaaaggcuaccuauccgcccuacgaacaggcugguacacaagcguaauaacaaucgaacuaucaaacauaaaagaaaacaaaugcaacgguacagacgccaaaguuaaacuaauaaaacaagaacucgauaaauacaaaaacgcaguaacagaauuacaacuacuaaugcaaucaacaccugcaacaaacaauagagccaggagagaauuaccucgauucaugaauuacacacucaauaacgcaaaaaaaaccaacguuacacuaucaaaaaaaagaaaacgacgauucuuaggauuccuacucggagucggaucagcaauagcaucuggcguugcaguaugcaaaguauuacacuuagaaggugaagucaauaaaauaaaaagcgcgcuacuaaguacaaacaaagcagucgucucccuaucaaacggagucucaguccuaacauucaaaguacucgaccuaaaaaauuacauagauaaacaacuacuuccaauauuaaacaaacaauccuguagcaucagcaauauagaaacaguaauagaauuucaacaaaaaaacaaccgauuauuagaaaucacucgagaauuuuccguaaacgccgggguaacaacuccagucucaaccuacaugcuaaccaauucagaacuauugagcuuaauaaacgacaugccaauaaccaacgaccaaaaaaaacuaaugucuaacaauguucaaaucgucagacaacaaaguuacaguauaauguguauaaucaaagaagaaguccuagcauacguaguccaacucccacuauauggaguuaucgacacaccauguuggaaauuacacaccucaccauuaugcacaaccaauacaaaagaaggaucaaacauaugccuuacacggacagaccgcggaugguauugugacaacgcuggcucagucuccuuuuucccacaagcagaaacaugcaaaguacaaucaaacagagucuuuugcgauaccaugaacucacuuacauuaccaagcgaaguaaaucuuuguaacgucgacaucuucaauccuaaauaugacugcaaaaucaugaccucaaaaacagacguuagcucuucaguaaucacuagcuuaggagcaaucguaucaugcuacggcaaaacaaaauguacagcaucaaauaaaaacagaggaaucauaaaaacauuuucaaacggaugcgauuauguaagcaacaaaggaguagauacuguaagcguaggaaacacauuguacuauguaaacaaacaagaaggaaaaucacucuauguaaaaggagaaccuauaaucaauuucuacgauccauuaguguucccaucagaugaauuugacgccucaauaucacaaguuaaugaaaaaauaaaucaaucgcuagcauucauacguaaaucagaugaauuacuacauaacguaaacgcaggcaaauccacaacaaauaucaugaucacaacaauuauaauaguaauaauaguaauacuacuaucacuaauagccguaggacuccuacuauacugcaaagcaagaucuacuccaguaacccucucaaaagaucaacuaagcggaauuaauaacaucgcauucagcaacuaaggacuaguggaagcauuuuccuggcugauuaaaagaaauuacucagcuauggucaucuguuccuguuagaaggcuaugcagcauauuauauacuaugcgcauguuaugaaaugcauaauaaaaaauuuuaaaaaaucuaaaagaucuaaaaaaaaaaaaaaaaaaaaaaaaaaaaaaaaaaaaaaaaaaaaaaaaaaaaaaaaaaaaaaaaugcaucccccccccccccccccccccccccccccccaaaggcucuuuucagagccaccagaauu

SEQ ID NO: 1218 - RNA, 2099 nt, Artificial Sequence
  mRNA product Design h-3 comprising derived and/or modified sequence from HRSV(A2)__F0_DSCav1 (opt11)
gggagacccgugacccggaaguuguacggcuacgcgacuuucccucccacaaacccucgcgcccuuccuuuccuacuugggcccggcagaaagcuuaccauggaacuacuuauccucaaagccaacgccaucaccaccauccucacagcaguaaccuuuugcuucgccucaggccaaaauaucacagaagaauuuuaccagaguaccugcuccgccguauccaaaggauaccucagcgcgcuccgcaccggcugguacacuucaguaaucacaaucgaacuauccaacaucaaagaaaacaaaugcaacggcaccgacgcgaaagucaaacucaucaaacaagaacuagacaaauacaaaaaugccguaacagaacuacaacuguuaaugcagagcacacccgccaccaacaaccgcgcccgccgggaacucccccgauucaugaacuacacacucaacaacgccaaaaagacgaacgucacccucagcaagaaacgaaaacgcagauuccucgguuuccuacuaggcguaggcucagcaauagccuccggaguagccgucugcaaaguccugcacuuagaaggcgaagucaacaaaaucaaauccgcccuacucuccacgaacaaagccgucgucucccuguccaacggugucuccguuuuaaccuucaaaguucuggaccucaaaaacuacauagacaaacagcuucuccccauccucaacaaacaauccuguagcaucuccaacaucgaaaccgucauagaauuucaacagaaaaacaacagacugcucgaaaucacccgcgaguucuccgucaacgccggcgucacgacucccgucuccaccuauaugcucacgaacucggaacuccuuucccuaaucaacgacaugccgaucaccaacgaccaaaagaaacucaugucaaacaacguacaaauuguccgccaacaaucauacuccaucaugugcauaauuaaagaagaaguccucgcauacguaguccaacucccccucuacggcgucaucgacacccccugcuggaaacuccacaccuccccacucugcacaaccaacaccaaagaaggcucaaacauaugccuaacgcgcaccgaucgcgguugguacugcgacaacgccgguuccgucagcuucuucccccaagcagagacaugcaaaguccaaucaaaccgcgucuucugcgacaccaugaacucacuaacccuuccaagcgaagucaaccucugcaacguugacaucuucaaccccaaauacgacuguaaaaucaugaccuccaagaccgacguauccucuuccgucaucacaucccuaggcgcuaucguauccugcuaugguaaaaccaaaugcaccgccuccaacaaaaaccgcggcaucaucaagacauuuuccaacggcugcgacuacgugagcaacaaaggcgucgacaccgucuccguaggcaacacccucuacuauguaaacaaacaagagggcaaaucacucuacgucaaaggggaacccaucaucaacuucuacgacccgcucguauuccccagcgaugaguucgacgccuccaucucccaggucaacgaaaagauaaaccaaucacucgcauucauucguaaauccgacgaacuccuacacaacgugaaugcaggcaaaucgaccacuaacaucaugaucaccaccaucaucaucgucaucauagucauccuccugucccuuaucgccgucggucuuuuauuauacugcaaagcccgcagcacccccgucacccucucuaaggaccaacucagcggcaucaauaacaucgcauucucuaacuaaggacuaguggaagcauuuuccuggcugauuaaaagaaauuacucagcuauggucaucuguuccuguuagaaggcuaugcagcauauuauauacuaugcgcauguuaugaaaugcauaauaaaaaauuuuaaaaaaucuaaaagaucuaaaaaaaaaaaaaaaaaaaaaaaaaaaaaaaaaaaaaaaaaaaaaaaaaaaaaaaaaaaaaaaaugcaucccccccccccccccccccccccccccccccaaaggcucuuuucagagccaccagaauu

SEQ ID NO: 1219 - RNA, 2162 nt, Artificial Sequence
  mRNA product Design h-4 comprising derived and/or modified sequence from HRSV(A2)__F0_DSCav1 (opt1)
gggagagggcgcuuggcuugcaaggacccugagcugcggcauugaagcacacccaacccaacucgacugaagucagccucacugaaccggaucugagaaucuucucucucugggcuugccagggcucuccgaaccuagcuagcauccucuucaauuccaacuagaaagcuuaccauggagcugcucauccugaaggccaacgccaucaccaccauccugacggcggugaccuucugcuucgccagcggccagaacaucaccgaggaguucuaccaguccacgugcagcgccgucuccaagggguaccucagcgcccugcggaccggcugguacaccuccgugaucaccaucgagcugagcaacaucaaggagaacaagugcaacgggaccgacgccaaggugaagcucaucaagcaggagcuggacaaguacaagaacgcggucacggagcugcagcuccugaugcaguccaccccggcaaccaacaaccgcgcccggcgcgagcugccccgguucaugaacuacacccucaacaacgccaagaagacgaacgugacccugagcaagaagcgcaagcggcgcuuccugggcuuccuccugggggugggcuccgccaucgcgagcggcgucgccgugugcaaggugcugcaccucgagggggaggucaacaagaucaagagcgcccugcuguccaccaacaaggccguggugagccucuccaacggcgucagcgugcugaccuucaaggugcuggaccucaagaacuacaucgacaagcagcugcugcccauccugaacaagcagagcugcuccaucagcaacaucgagacggugaucgaguuccagcagaagaacaaccggcuccuggagaucacccgcgaguucagcgugaacgccggggucaccacccccguguccacguacaugcugaccaacagcgagcuccugucccugaucaacgacaugccgaucaccaacgaccagaagaagcucaugagcaacaacgugcagaucguccggcagcaguccuacagcaucaugugcaucaucaaggaggaggugcuggcguacgugguccagcugccccucuacggcgugaucgacacccccugcuggaagcugcacacgagcccccugugcaccaccaacaccaaggagggguccaacaucugccucacgcgcaccgaccggggcugguacugcgacaacgccggcagcgucuccuucuucccgcaggccgagaccugcaaggugcagagcaaccgcguguucugcgacaccaugaacucccugacgcugcccagcgagguaaaccucugcaacgucgacaucuucaaccccaaguacgacugcaagaucaugaccuccaagaccgacgugagcuccagcgugaucaccucccugggggccaucgucagcugcuacggcaagacgaagugcaccgccagcaacaagaaccgggggaucaucaagaccuucuccaacggcugcgacuacgugagcaacaagggcguggacaccguguccgucgggaacacccuguacuacgugaacaagcaggagggcaagagccucuacgugaagggggagcccaucaucaacuucuacgacccgcuggucuuccccuccgacgaguucgacgcgagcaucucccaggugaacgagaagaucaaccagagccuggccuucauccgcaaguccgacgagcugcuccacaacgugaacgccggcaagagcacgaccaacaucaugaucaccaccaucaucaucgucaucaucgugauccugcugucccucaucgccguggggcugcugcucuacugcaaggcccggagcacgcccgucacccuguccaaggaccagcugagcggcaucaacaacaucgcguucuccaacugaggacuaguaauaaggaaacuguaugaaugucugugggcaggaagugaagagauccuucuguaaagguuuuuggaauuaugucugcugaauaauaaacuuuuuugaaauaauaaaucugguagaaaaaugagaucuaaaaaaaaaaaaaaaaaaaaaaaaaaaaaaaaaaaaaaaaaaaaaaaaaaaaaaaaaaaaaaaaugcaucccccccccccccccccccccccccccccccaaaggcucuuuucagagccaccagaauu

SEQ ID NO: 1220 - RNA, 2162 nt, Artificial Sequence
  mRNA product Design h-4 comprising derived and/or modified sequence from HRSV(A2)__F0_DSCav1 (opt1)
gggagagggcgcuuggcuugcaaggacccugagcugcggcauugaagcacacccaacccaacucgacugaagucagccucacugaaccggaucugagaaucuucucucucugggcuugccagggcucuccgaaccuagcuagcauccucuucaauuccaacuagaaagcuuaccauggagcugcucauccugaaggccaacgccaucaccaccauccugacggcggugaccuucugcuucgccagcggccagaacaucaccgaggaguucuaccaguccacgugcagcgccgucuccaagggguaccucagcgcccugcgcaccggcugguacaccuccgugaucaccaucgagcugagcaacaucaaggagaacaagugcaacgggaccgacgccaaggugaagcucaucaagcaggagcuggacaaguacaagaacgcggucacggagcugcagcuccugaugcaguccacccccgccaccaacaaccgggcccgccgggagcugccgcgcuucaugaacuacacccucaacaacgccaagaagacgaacgugacccugagcaagaagcggaagcgccgguuccugggcuuccuccugggggugggcuccgcgaucgccagcggcgucgccgugugcaaggugcugcaccucgagggggaggucaacaagaucaaguccgcccugcugagcaccaacaaggccguggugucccucagcaacggcgucuccgugcugaccuucaaggugcuggaccucaagaacuacaucgacaagcagcugcugcccauccucaacaagcagagcugcuccaucagcaacaucgagacggucaucgaguuccagcagaagaacaaccgccugcuggagaucacccgggaguucuccgugaacgcgggggugaccacccccgucagcacguacaugcucaccaacagcgagcugcugucccucaucaacgacaugcccaucaccaacgaccagaagaagcugaugagcaacaacgugcagaucgugcgccagcaguccuacagcaucaugugcaucaucaaggaggagguccuggccuacguggugcagcucccgcuguacggcgucaucgacacccccugcuggaagcugcacacgagcccccucugcaccaccaacaccaaggaggggagcaacaucugccugacgcggaccgaccgcggcugguacugcgacaacgccggcuccgugagcuucuucccccaggccgagaccugcaagguccaguccaaccggguguucugcgacaccaugaacagccugacgcucccguccgaggugaaccugugcaacgucgacaucuucaaccccaaguacgacugcaagaucaugaccagcaagaccgacguguccagcuccgugaucaccagccugggggccaucgucuccugcuacggcaagacgaagugcaccgcgagcaacaagaaccgcgggaucaucaagaccuucuccaacggcugcgacuacgugagcaacaagggcguggacaccgucagcguggggaacacccucuacuacgugaacaagcaggagggcaagucccuguacgucaagggggagcccaucaucaacuucuacgacccccugguguucccgagcgacgaguucgacgccuccaucagccaggugaacgagaagaucaaccagucccucgccuucauccggaaguccgacgagcugcugcacaacgucaacgccggcaaguccacgaccaacaucaugaucaccaccaucaucaucgugaucaucgugauccugcucagccugaucgccgucgggcugcuccuguacugcaaggcgcgcuccacgcccgugacccugagcaaggaccagcucuccggcaucaacaacaucgccuucagcaacugaggacuaguaauaaggaaacuguaugaaugucugugggcaggaagugaagagauccuucuguaaagguuuuuggaauuaugucugcugaauaauaaacuuuuuugaaauaauaaaucugguagaaaaaugagaucuaaaaaaaaaaaaaaaaaaaaaaaaaaaaaaaaaaaaaaaaaaaaaaaaaaaaaaaaaaaaaaaaugcaucccccccccccccccccccccccccccccccaaaggcucuuuucagagccaccagaauu

SEQ ID NO: 1221 - RNA, 2162 nt, Artificial Sequence
  mRNA product Design h-4 comprising derived and/or modified sequence from HRSV(A2)__F0_DSCav1 (opt2)
gggagagggcgcuuggcuugcaaggacccugagcugcggcauugaagcacacccaacccaacucgacugaagucagccucacugaaccggaucugagaaucuucucucucugggcuugccagggcucuccgaaccuagcuagcauccucuucaauuccaacuagaaagcuuaccauggagcuccucauccucaaggccaacgccaucaccaccauccucaccgccgucaccuucugcuucgccuccggccagaacaucaccgaggaguucuaccaguccaccugcuccgccgucuccaagggcuaccucuccgcccuccgcaccggcugguacaccuccgucaucaccaucgagcucuccaacaucaaggagaacaagugcaacggcaccgacgccaaggucaagcucaucaagcaggagcucgacaaguacaagaacgccgucaccgagcuccagcuccucaugcaguccacccccgccaccaacaaccgcgcccgccgcgagcucccccgcuucaugaacuacacccucaacaacgccaagaagaccaacgucacccucuccaagaagcgcaagcgccgcuuccucggcuuccuccucggcgucggcuccgccaucgccuccggcgucgccgucugcaagguccuccaccucgagggcgaggucaacaagaucaaguccgcccuccucuccaccaacaaggccgucgucucccucuccaacggcgucuccguccucaccuucaagguccucgaccucaagaacuacaucgacaagcagcuccuccccauccucaacaagcaguccugcuccaucuccaacaucgagaccgucaucgaguuccagcagaagaacaaccgccuccucgagaucacccgcgaguucuccgucaacgccggcgucaccacccccgucuccaccuacaugcucaccaacuccgagcuccucucccucaucaacgacaugcccaucaccaacgaccagaagaagcucauguccaacaacguccagaucguccgccagcaguccuacuccaucaugugcaucaucaaggaggagguccucgccuacgucguccagcucccccucuacggcgucaucgacacccccugcuggaagcuccacaccuccccccucugcaccaccaacaccaaggagggcuccaacaucugccucacccgcaccgaccgcggcugguacugcgacaacgccggcuccgucuccuucuucccccaggccgagaccugcaagguccaguccaaccgcgucuucugcgacaccaugaacucccucacccuccccuccgaggucaaccucugcaacgucgacaucuucaaccccaaguacgacugcaagaucaugaccuccaagaccgacgucuccuccuccgucaucaccucccucggcgccaucgucuccugcuacggcaagaccaagugcaccgccuccaacaagaaccgcggcaucaucaagaccuucuccaacggcugcgacuacgucuccaacaagggcgucgacaccgucuccgucggcaacacccucuacuacgucaacaagcaggagggcaagucccucuacgucaagggcgagcccaucaucaacuucuacgacccccucgucuuccccuccgacgaguucgacgccuccaucucccaggucaacgagaagaucaaccagucccucgccuucauccgcaaguccgacgagcuccuccacaacgucaacgccggcaaguccaccaccaacaucaugaucaccaccaucaucaucgucaucaucgucauccuccucucccucaucgccgucggccuccuccucuacugcaaggcccgcuccacccccgucacccucuccaaggaccagcucuccggcaucaacaacaucgccuucuccaacugaggacuaguaauaaggaaacuguaugaaugucugugggcaggaagugaagagauccuucuguaaagguuuuuggaauuaugucugcugaauaauaaacuuuuuugaaauaauaaaucugguagaaaaaugagaucuaaaaaaaaaaaaaaaaaaaaaaaaaaaaaaaaaaaaaaaaaaaaaaaaaaaaaaaaaaaaaaaaugcaucccccccccccccccccccccccccccccccaaaggcucuuuucagagccaccagaauu

SEQ ID NO: 1222 - RNA, 2162 nt, Artificial Sequence
  mRNA product Design h-4 comprising derived and/or modified sequence from HRSV(A2)__F0_DSCav1 (opt3)
gggagagggcgcuuggcuugcaaggacccugagcugcggcauugaagcacacccaacccaacucgacugaagucagccucacugaaccggaucugagaaucuucucucucugggcuugccagggcucuccgaaccuagcuagcauccucuucaauuccaacuagaaagcuuaccauggagcugcucauccuuaaggccaacgcuauuaccacaauacugacugcagugacguucugcuuugccagcggccagaauaucaccgaagaguucuaccaauccacauguucugcggucucaaaaggguauuugagugcuuuaagaacuggaugguacaccagcguuauuacaaucgaacuguccaacauuaaggagaauaaaugcaacgguaccgacgccaaggugaaacuaaucaagcaggaacucgauaaguauaaaaaugcaguaacugagcugcagcuucugaugcagucuacacccgccaccaacaauagggcucggcgcgaguugccucgauuuaugaacuacacgcucaauaacgcaaagaaaacuaaugugacccugucgaagaaacguaagagaagguuccugggcuuucucuuaggggucggaucagccauagcuagcggcguggccguuuguaaggugcugcaccuugaaggugaggucaacaaaaucaagagugcguugcuguccacaaauaaagcagugguaucucuaagcaacgggguuuccgugcucacuuucaagguccuggaccuuaaaaauuauauugauaagcaacuguugccaauccucaacaaacagucaugcaguauuagcaacaucgaaaccgugauagaguuucagcagaagaauaaccggcuguuagagauuacacgcgaguucucugugaaugccggagucaccacgccgguuuccacuuacaugcugacaaacucagaacuccuuagccugaucaaugacaugcccauuaccaacgaucaaaagaaauugaugaguaauaacgugcagaucguaagacagcagucuuauuccaucauguguauuauaaaggaagaggugcuagcuuacgucgugcaacugccucucuacggcguuaucgacacuccaugcuggaaacugcauacaagcccccuuuguaccacgaauaccaaggaaggcucgaacauuugccugacaaggacugaucgggggugguauugugacaaugccggaucuguguccuuuuucccucaggcagagaccugcaaaguccagucaaaccgcguguuuugugauacaaugaauaguuugacucucccaagcgagguaaaccugugcaauguugacaucuucaaccccaaguacgauugcaagauaaugaccuccaaaacagacgugucuagcucagucauuaccaguuuaggugcuaucguguccuguuauggcaagacuaaaugcacggccagcaacaagaaucgagggaucauuaaaacauuuucuaacggaugugauuacgucucaaauaagggcguggacaccguuaguguggguaacacucuguauuacguaaauaagcaagaagggaaaagccuauaugucaagggagagccuaucauuaacuucuacgacccacucguguucccguccgaugaauuugacgcgucuauaucgcagguuaaugagaaaaucaaccagagccuggccuucauuagaaaguccgaugaacuuuugcacaaugugaacgcaggcaaaucaaccacaaauaucaugaucaccacuauuauaaucgucauuaucgugauucugcucagucugaucgcuguaggccuucuguuguacugcaaggccaggucuacacccgugacgcucagcaaggaccagcuguccgggauaaacaauaucgcuuuuucaaacugaggacuaguaauaaggaaacuguaugaaugucugugggcaggaagugaagagauccuucuguaaagguuuuuggaauuaugucugcugaauaauaaacuuuuuugaaauaauaaaucugguagaaaaaugagaucuaaaaaaaaaaaaaaaaaaaaaaaaaaaaaaaaaaaaaaaaaaaaaaaaaaaaaaaaaaaaaaaaugcaucccccccccccccccccccccccccccccccaaaggcucuuuucagagccaccagaauu

SEQ ID NO: 1223 - RNA, 2162 nt, Artificial Sequence
  mRNA product Design h-4 comprising derived and/or modified sequence from HRSV(A2)__F0_DSCav1 (opt4)
gggagagggcgcuuggcuugcaaggacccugagcugcggcauugaagcacacccaacccaacucgacugaagucagccucacugaaccggaucugagaaucuucucucucugggcuugccagggcucuccgaaccuagcuagcauccucuucaauuccaacuagaaagcuuaccauggagcugcugauccugaaggccaacgccaucaccaccauccugaccgccgugaccuucugcuucgccagcggccagaacaucaccgaggaguucuaccagagcaccugcagcgccgugagcaagggcuaccugagcgcccugagaaccggcugguacaccagcgugaucaccaucgagcugagcaacaucaaggagaacaagugcaacggcaccgacgccaaggugaagcugaucaagcaggagcuggacaaguacaagaacgccgugaccgagcugcagcugcugaugcagagcacccccgccaccaacaacagagccagaagagagcugcccagauucaugaacuacacccugaacaacgccaagaagaccaacgugacccugagcaagaagagaaagagaagauuccugggcuuccugcugggcgugggcagcgccaucgccagcggcguggccgugugcaaggugcugcaccuggagggcgaggugaacaagaucaagagcgcccugcugagcaccaacaaggccguggugagccugagcaacggcgugagcgugcugaccuucaaggugcuggaccugaagaacuacaucgacaagcagcugcugcccauccugaacaagcagagcugcagcaucagcaacaucgagaccgugaucgaguuccagcagaagaacaacagacugcuggagaucaccagagaguucagcgugaacgccggcgugaccacccccgugagcaccuacaugcugaccaacagcgagcugcugagccugaucaacgacaugcccaucaccaacgaccagaagaagcugaugagcaacaacgugcagaucgugagacagcagagcuacagcaucaugugcaucaucaaggaggaggugcuggccuacguggugcagcugccccuguacggcgugaucgacacccccugcuggaagcugcacaccagcccccugugcaccaccaacaccaaggagggcagcaacaucugccugaccagaaccgacagaggcugguacugcgacaacgccggcagcgugagcuucuucccccaggccgagaccugcaaggugcagagcaacagaguguucugcgacaccaugaacagccugacccugcccagcgaggugaaccugugcaacguggacaucuucaaccccaaguacgacugcaagaucaugaccagcaagaccgacgugagcagcagcgugaucaccagccugggcgccaucgugagcugcuacggcaagaccaagugcaccgccagcaacaagaacagaggcaucaucaagaccuucagcaacggcugcgacuacgugagcaacaagggcguggacaccgugagcgugggcaacacccuguacuacgugaacaagcaggagggcaagagccuguacgugaagggcgagcccaucaucaacuucuacgacccccugguguuccccagcgacgaguucgacgccagcaucagccaggugaacgagaagaucaaccagagccuggccuucaucagaaagagcgacgagcugcugcacaacgugaacgccggcaagagcaccaccaacaucaugaucaccaccaucaucaucgugaucaucgugauccugcugagccugaucgccgugggccugcugcuguacugcaaggccagaagcacccccgugacccugagcaaggaccagcugagcggcaucaacaacaucgccuucagcaacugaggacuaguaauaaggaaacuguaugaaugucugugggcaggaagugaagagauccuucuguaaagguuuuuggaauuaugucugcugaauaauaaacuuuuuugaaauaauaaaucugguagaaaaaugagaucuaaaaaaaaaaaaaaaaaaaaaaaaaaaaaaaaaaaaaaaaaaaaaaaaaaaaaaaaaaaaaaaaugcaucccccccccccccccccccccccccccccccaaaggcucuuuucagagccaccagaauu

SEQ ID NO: 1224 - RNA, 2162 nt, Artificial Sequence
  mRNA product Design h-4 comprising derived and/or modified sequence from HRSV(A2)__F0_DSCav1 (opt5)
gggagagggcgcuuggcuugcaaggacccugagcugcggcauugaagcacacccaacccaacucgacugaagucagccucacugaaccggaucugagaaucuucucucucugggcuugccagggcucuccgaaccuagcuagcauccucuucaauuccaacuagaaagcuuaccauggagcugcucauccugaaggccaacgcuauuaccacaauccuuacggccgugaccuucugcuuugcgagcggccagaauauuacagaagaguucuaccaauccaccuguucugcugucagcaaaggguaucuguccgcccucagaacaggaugguacaccucuguuaucacaauugaacugagcaacaucaaggagaauaaaugcaacggcaccgacgccaaggugaaacuuaucaagcaggaacuggauaaguauaaaaaugcugugacggagcuccagcugcugaugcaguccacccccgccacaaacaaucgggcucgcagagagcucccucgguuuaugaacuacacccugaauaacgccaagaaaacaaaugucacccuuucuaagaaacgcaagagacgguuccugggguuucuccugggagugggcagcgcgauugccuccgggguugcuguguguaagguccuucaccuggaaggagaggugaacaaaaucaagagcgcccuccugucuacgaauaaagcuguugugucccugagcaacggcgucucugugcucacauucaaggugcuggaccuuaaaaauuauauugauaagcaacugcucccgauccugaacaaacaguccugcagcauuucuaacaucgaaaccgucauugaguuucagcagaagaauaaccgccuucuggagaucacaagagaauuuuccguuaaugccggcgugaccacccccgugagcacauacaugcucacgaacuccgagcugcugucucucaucaaugacaugccuauuaccaacgaucaaaagaaacugaugagcaauaacguccagaucgugcggcagcaguccuauagcauuauguguaucauuaaggaagagguucuugcguacgugguccaacugccccucuacggggugaucgacacaccuugcuggaaacugcauaccucuccccuuuguacaaccaauacgaaggaaggauccaacaucugccugacacgcaccgauagaggcugguauugugacaaugccgggagcguuucuuucuucccucaggcugagaccugcaaagugcagagcaaccgggucuuuugugauacaaugaacucccucacccugccgucugaggugaaucugugcaaugucgacauuuucaaccccaaguacgauugcaagaucaugacaagcaaaacggacguguccagcucuguuauuaccucccucggagccaucgugagcuguuauggcaagacaaaaugcaccgcuucuaacaagaaucgcgggauuaucaaaacauuuuccaacggaugugauuacgucagcaauaagggcguggacaccguuuccgugggcaacacgcuguauuacgucaauaagcaagaagggaaaucucuuuaugugaagggagagccuaucauuaacuucuacgacccccugguguucccuagcgaugaauuugacgccuccaucucucagguuaaugagaaaauuaaccagagccucgccuucaucagaaaguccgaugaacugcugcacaaugucaacgcuggcaaaagcaccacaaauauuaugaucaccacaauuaucaucgugauuaucgugauucuucucucucugaucgcggucgggcugcuccuguacugcaaggcccgguccacccccgugacgcuuagcaaggaccagcugucuggaauuaacaauaucgcuuuuuccaacugaggacuaguaauaaggaaacuguaugaaugucugugggcaggaagugaagagauccuucuguaaagguuuuuggaauuaugucugcugaauaauaaacuuuuuugaaauaauaaaucugguagaaaaaugagaucuaaaaaaaaaaaaaaaaaaaaaaaaaaaaaaaaaaaaaaaaaaaaaaaaaaaaaaaaaaaaaaaaugcaucccccccccccccccccccccccccccccccaaaggcucuuuucagagccaccagaauu

SEQ ID NO: 1225 - RNA, 2162 nt, Artificial Sequence
  mRNA product Design h-4 comprising derived and/or modified sequence from HRSV(A2)__F0_DSCav1 (opt6)
gggagagggcgcuuggcuugcaaggacccugagcugcggcauugaagcacacccaacccaacucgacugaagucagccucacugaaccggaucugagaaucuucucucucugggcuugccagggcucuccgaaccuagcuagcauccucuucaauuccaacuagaaagcuuaccauggaauuauuaauccucaaagcgaacgcuauuacuaccauucuaacagcagucacauucugcuucgccucaggccaaaacauuacagaagaauuuuaccaaucaacaugcucugccguaucaaaaggcuaccuauccgcccuacgaacaggcugguacacaagcguaauaacaaucgaacuaucaaacauaaaagaaaacaaaugcaacgguacagacgccaaaguuaaacuaauaaaacaagaacucgauaaauacaaaaacgcaguaacagaauuacaacuacuaaugcaaucaacaccugcaacaaacaauagagccaggagagaauuaccucgauucaugaauuacacacucaauaacgcaaaaaaaaccaacguuacacuaucaaaaaaaagaaaacgacgauucuuaggauuccuacucggagucggaucagcaauagcaucuggcguugcaguaugcaaaguauuacacuuagaaggugaagucaauaaaauaaaaagcgcgcuacuaaguacaaacaaagcagucgucucccuaucaaacggagucucaguccuaacauucaaaguacucgaccuaaaaaauuacauagauaaacaacuacuuccaauauuaaacaaacaauccuguagcaucagcaauauagaaacaguaauagaauuucaacaaaaaaacaaccgauuauuagaaaucacucgagaauuuuccguaaacgccgggguaacaacuccagucucaaccuacaugcuaaccaauucagaacuauugagcuuaauaaacgacaugccaauaaccaacgaccaaaaaaaacuaaugucuaacaauguucaaaucgucagacaacaaaguuacaguauaauguguauaaucaaagaagaaguccuagcauacguaguccaacucccacuauauggaguuaucgacacaccauguuggaaauuacacaccucaccauuaugcacaaccaauacaaaagaaggaucaaacauaugccuuacacggacagaccgcggaugguauugugacaacgcuggcucagucuccuuuuucccacaagcagaaacaugcaaaguacaaucaaacagagucuuuugcgauaccaugaacucacuuacauuaccaagcgaaguaaaucuuuguaacgucgacaucuucaauccuaaauaugacugcaaaaucaugaccucaaaaacagacguuagcucuucaguaaucacuagcuuaggagcaaucguaucaugcuacggcaaaacaaaauguacagcaucaaauaaaaacagaggaaucauaaaaacauuuucaaacggaugcgauuauguaagcaacaaaggaguagauacuguaagcguaggaaacacauuguacuauguaaacaaacaagaaggaaaaucacucuauguaaaaggagaaccuauaaucaauuucuacgauccauuaguguucccaucagaugaauuugacgccucaauaucacaaguuaaugaaaaaauaaaucaaucgcuagcauucauacguaaaucagaugaauuacuacauaacguaaacgcaggcaaauccacaacaaauaucaugaucacaacaauuauaauaguaauaauaguaauacuacuaucacuaauagccguaggacuccuacuauacugcaaagcaagaucuacuccaguaacccucucaaaagaucaacuaagcggaauuaauaacaucgcauucagcaacuaaggacuaguaauaaggaaacuguaugaaugucugugggcaggaagugaagagauccuucuguaaagguuuuuggaauuaugucugcugaauaauaaacuuuuuugaaauaauaaaucugguagaaaaaugagaucuaaaaaaaaaaaaaaaaaaaaaaaaaaaaaaaaaaaaaaaaaaaaaaaaaaaaaaaaaaaaaaaaugcaucccccccccccccccccccccccccccccccaaaggcucuuuucagagccaccagaauu

SEQ ID NO: 1226 - RNA, 2162 nt, Artificial Sequence
  mRNA product Design h-4 comprising derived and/or modified sequence from HRSV(A2)__F0_DSCav1 (opt11)
gggagagggcgcuuggcuugcaaggacccugagcugcggcauugaagcacacccaacccaacucgacugaagucagccucacugaaccggaucugagaaucuucucucucugggcuugccagggcucuccgaaccuagcuagcauccucuucaauuccaacuagaaagcuuaccauggaacuacuuauccucaaagccaacgccaucaccaccauccucacagcaguaaccuuuugcuucgccucaggccaaaauaucacagaagaauuuuaccagaguaccugcuccgccguauccaaaggauaccucagcgcgcuccgcaccggcugguacacuucaguaaucacaaucgaacuauccaacaucaaagaaaacaaaugcaacggcaccgacgcgaaagucaaacucaucaaacaagaacuagacaaauacaaaaaugccguaacagaacuacaacuguuaaugcagagcacacccgccaccaacaaccgcgcccgccgggaacucccccgauucaugaacuacacacucaacaacgccaaaaagacgaacgucacccucagcaagaaacgaaaacgcagauuccucgguuuccuacuaggcguaggcucagcaauagccuccggaguagccgucugcaaaguccugcacuuagaaggcgaagucaacaaaaucaaauccgcccuacucuccacgaacaaagccgucgucucccuguccaacggugucuccguuuuaaccuucaaaguucuggaccucaaaaacuacauagacaaacagcuucuccccauccucaacaaacaauccuguagcaucuccaacaucgaaaccgucauagaauuucaacagaaaaacaacagacugcucgaaaucacccgcgaguucuccgucaacgccggcgucacgacucccgucuccaccuauaugcucacgaacucggaacuccuuucccuaaucaacgacaugccgaucaccaacgaccaaaagaaacucaugucaaacaacguacaaauuguccgccaacaaucauacuccaucaugugcauaauuaaagaagaaguccucgcauacguaguccaacucccccucuacggcgucaucgacacccccugcuggaaacuccacaccuccccacucugcacaaccaacaccaaagaaggcucaaacauaugccuaacgcgcaccgaucgcgguugguacugcgacaacgccgguuccgucagcuucuucccccaagcagagacaugcaaaguccaaucaaaccgcgucuucugcgacaccaugaacucacuaacccuuccaagcgaagucaaccucugcaacguugacaucuucaaccccaaauacgacuguaaaaucaugaccuccaagaccgacguauccucuuccgucaucacaucccuaggcgcuaucguauccugcuaugguaaaaccaaaugcaccgccuccaacaaaaaccgcggcaucaucaagacauuuuccaacggcugcgacuacgugagcaacaaaggcgucgacaccgucuccguaggcaacacccucuacuauguaaacaaacaagagggcaaaucacucuacgucaaaggggaacccaucaucaacuucuacgacccgcucguauuccccagcgaugaguucgacgccuccaucucccaggucaacgaaaagauaaaccaaucacucgcauucauucguaaauccgacgaacuccuacacaacgugaaugcaggcaaaucgaccacuaacaucaugaucaccaccaucaucaucgucaucauagucauccuccugucccuuaucgccgucggucuuuuauuauacugcaaagcccgcagcacccccgucacccucucuaaggaccaacucagcggcaucaauaacaucgcauucucuaacuaaggacuaguaauaaggaaacuguaugaaugucugugggcaggaagugaagagauccuucuguaaagguuuuuggaauuaugucugcugaauaauaaacuuuuuugaaauaauaaaucugguagaaaaaugagaucuaaaaaaaaaaaaaaaaaaaaaaaaaaaaaaaaaaaaaaaaaaaaaaaaaaaaaaaaaaaaaaaaugcaucccccccccccccccccccccccccccccccaaaggcucuuuucagagccaccagaauu

SEQ ID NO: 1227 - RNA, 2178 nt, Artificial Sequence
  mRNA product Design h-5 comprising derived and/or modified sequence from HRSV(A2)__F0_DSCav1 (opt1)
gggagagggcgcuuggcuugcaaggacccugagcugcggcauugaagcacacccaacccaacucgacugaagucagccucacugaaccggaucugagaaucuucucucucugggcuugccagggcucuccgaaccuagcuagcauccucuucaauuccaacuagaaagcuuaccauggagcugcucauccugaaggccaacgccaucaccaccauccugacggcggugaccuucugcuucgccagcggccagaacaucaccgaggaguucuaccaguccacgugcagcgccgucuccaagggguaccucagcgcccugcggaccggcugguacaccuccgugaucaccaucgagcugagcaacaucaaggagaacaagugcaacgggaccgacgccaaggugaagcucaucaagcaggagcuggacaaguacaagaacgcggucacggagcugcagcuccugaugcaguccaccccggcaaccaacaaccgcgcccggcgcgagcugccccgguucaugaacuacacccucaacaacgccaagaagacgaacgugacccugagcaagaagcgcaagcggcgcuuccugggcuuccuccugggggugggcuccgccaucgcgagcggcgucgccgugugcaaggugcugcaccucgagggggaggucaacaagaucaagagcgcccugcuguccaccaacaaggccguggugagccucuccaacggcgucagcgugcugaccuucaaggugcuggaccucaagaacuacaucgacaagcagcugcugcccauccugaacaagcagagcugcuccaucagcaacaucgagacggugaucgaguuccagcagaagaacaaccggcuccuggagaucacccgcgaguucagcgugaacgccggggucaccacccccguguccacguacaugcugaccaacagcgagcuccugucccugaucaacgacaugccgaucaccaacgaccagaagaagcucaugagcaacaacgugcagaucguccggcagcaguccuacagcaucaugugcaucaucaaggaggaggugcuggcguacgugguccagcugccccucuacggcgugaucgacacccccugcuggaagcugcacacgagcccccugugcaccaccaacaccaaggagggguccaacaucugccucacgcgcaccgaccggggcugguacugcgacaacgccggcagcgucuccuucuucccgcaggccgagaccugcaaggugcagagcaaccgcguguucugcgacaccaugaacucccugacgcugcccagcgagguaaaccucugcaacgucgacaucuucaaccccaaguacgacugcaagaucaugaccuccaagaccgacgugagcuccagcgugaucaccucccugggggccaucgucagcugcuacggcaagacgaagugcaccgccagcaacaagaaccgggggaucaucaagaccuucuccaacggcugcgacuacgugagcaacaagggcguggacaccguguccgucgggaacacccuguacuacgugaacaagcaggagggcaagagccucuacgugaagggggagcccaucaucaacuucuacgacccgcuggucuuccccuccgacgaguucgacgcgagcaucucccaggugaacgagaagaucaaccagagccuggccuucauccgcaaguccgacgagcugcuccacaacgugaacgccggcaagagcacgaccaacaucaugaucaccaccaucaucaucgucaucaucgugauccugcugucccucaucgccguggggcugcugcucuacugcaaggcccggagcacgcccgucacccuguccaaggaccagcugagcggcaucaacaacaucgcguucuccaacugaggacuaguacuggcugcaucucccuuuccucuguccuccauccuucucccaggauggugaagggggaccugguacccagugauccccaccccaggauccuaaaucaugacuuaccugcuaauaaaaacucauuggaaaagugagaagaucuaaaaaaaaaaaaaaaaaaaaaaaaaaaaaaaaaaaaaaaaaaaaaaaaaaaaaaaaaaaaaaaaugcaucccccccccccccccccccccccccccccccaaaggcucuuuucagagccaccagaauu

SEQ ID NO: 1228 - RNA, 2178 nt, Artificial Sequence
  mRNA product Design h-5 comprising derived and/or modified sequence from HRSV(A2)__F0_DSCav1 (opt1)
gggagagggcgcuuggcuugcaaggacccugagcugcggcauugaagcacacccaacccaacucgacugaagucagccucacugaaccggaucugagaaucuucucucucugggcuugccagggcucuccgaaccuagcuagcauccucuucaauuccaacuagaaagcuuaccauggagcugcucauccugaaggccaacgccaucaccaccauccugacggcggugaccuucugcuucgccagcggccagaacaucaccgaggaguucuaccaguccacgugcagcgccgucuccaagggguaccucagcgcccugcgcaccggcugguacaccuccgugaucaccaucgagcugagcaacaucaaggagaacaagugcaacgggaccgacgccaaggugaagcucaucaagcaggagcuggacaaguacaagaacgcggucacggagcugcagcuccugaugcaguccacccccgccaccaacaaccgggcccgccgggagcugccgcgcuucaugaacuacacccucaacaacgccaagaagacgaacgugacccugagcaagaagcggaagcgccgguuccugggcuuccuccugggggugggcuccgcgaucgccagcggcgucgccgugugcaaggugcugcaccucgagggggaggucaacaagaucaaguccgcccugcugagcaccaacaaggccguggugucccucagcaacggcgucuccgugcugaccuucaaggugcuggaccucaagaacuacaucgacaagcagcugcugcccauccucaacaagcagagcugcuccaucagcaacaucgagacggucaucgaguuccagcagaagaacaaccgccugcuggagaucacccgggaguucuccgugaacgcgggggugaccacccccgucagcacguacaugcucaccaacagcgagcugcugucccucaucaacgacaugcccaucaccaacgaccagaagaagcugaugagcaacaacgugcagaucgugcgccagcaguccuacagcaucaugugcaucaucaaggaggagguccuggccuacguggugcagcucccgcuguacggcgucaucgacacccccugcuggaagcugcacacgagcccccucugcaccaccaacaccaaggaggggagcaacaucugccugacgcggaccgaccgcggcugguacugcgacaacgccggcuccgugagcuucuucccccaggccgagaccugcaagguccaguccaaccggguguucugcgacaccaugaacagccugacgcucccguccgaggugaaccugugcaacgucgacaucuucaaccccaaguacgacugcaagaucaugaccagcaagaccgacguguccagcuccgugaucaccagccugggggccaucgucuccugcuacggcaagacgaagugcaccgcgagcaacaagaaccgcgggaucaucaagaccuucuccaacggcugcgacuacgugagcaacaagggcguggacaccgucagcguggggaacacccucuacuacgugaacaagcaggagggcaagucccuguacgucaagggggagcccaucaucaacuucuacgacccccugguguucccgagcgacgaguucgacgccuccaucagccaggugaacgagaagaucaaccagucccucgccuucauccggaaguccgacgagcugcugcacaacgucaacgccggcaaguccacgaccaacaucaugaucaccaccaucaucaucgugaucaucgugauccugcucagccugaucgccgucgggcugcuccuguacugcaaggcgcgcuccacgcccgugacccugagcaaggaccagcucuccggcaucaacaacaucgccuucagcaacugaggacuaguacuggcugcaucucccuuuccucuguccuccauccuucucccaggauggugaagggggaccugguacccagugauccccaccccaggauccuaaaucaugacuuaccugcuaauaaaaacucauuggaaaagugagaagaucuaaaaaaaaaaaaaaaaaaaaaaaaaaaaaaaaaaaaaaaaaaaaaaaaaaaaaaaaaaaaaaaaugcaucccccccccccccccccccccccccccccccaaaggcucuuuucagagccaccagaauu

SEQ ID NO: 1229 - RNA, 2178 nt, Artificial Sequence
  mRNA product Design h-5 comprising derived and/or modified sequence from HRSV(A2)__F0_DSCav1 (opt2)
gggagagggcgcuuggcuugcaaggacccugagcugcggcauugaagcacacccaacccaacucgacugaagucagccucacugaaccggaucugagaaucuucucucucugggcuugccagggcucuccgaaccuagcuagcauccucuucaauuccaacuagaaagcuuaccauggagcuccucauccucaaggccaacgccaucaccaccauccucaccgccgucaccuucugcuucgccuccggccagaacaucaccgaggaguucuaccaguccaccugcuccgccgucuccaagggcuaccucuccgcccuccgcaccggcugguacaccuccgucaucaccaucgagcucuccaacaucaaggagaacaagugcaacggcaccgacgccaaggucaagcucaucaagcaggagcucgacaaguacaagaacgccgucaccgagcuccagcuccucaugcaguccacccccgccaccaacaaccgcgcccgccgcgagcucccccgcuucaugaacuacacccucaacaacgccaagaagaccaacgucacccucuccaagaagcgcaagcgccgcuuccucggcuuccuccucggcgucggcuccgccaucgccuccggcgucgccgucugcaagguccuccaccucgagggcgaggucaacaagaucaaguccgcccuccucuccaccaacaaggccgucgucucccucuccaacggcgucuccguccucaccuucaagguccucgaccucaagaacuacaucgacaagcagcuccuccccauccucaacaagcaguccugcuccaucuccaacaucgagaccgucaucgaguuccagcagaagaacaaccgccuccucgagaucacccgcgaguucuccgucaacgccggcgucaccacccccgucuccaccuacaugcucaccaacuccgagcuccucucccucaucaacgacaugcccaucaccaacgaccagaagaagcucauguccaacaacguccagaucguccgccagcaguccuacuccaucaugugcaucaucaaggaggagguccucgccuacgucguccagcucccccucuacggcgucaucgacacccccugcuggaagcuccacaccuccccccucugcaccaccaacaccaaggagggcuccaacaucugccucacccgcaccgaccgcggcugguacugcgacaacgccggcuccgucuccuucuucccccaggccgagaccugcaagguccaguccaaccgcgucuucugcgacaccaugaacucccucacccuccccuccgaggucaaccucugcaacgucgacaucuucaaccccaaguacgacugcaagaucaugaccuccaagaccgacgucuccuccuccgucaucaccucccucggcgccaucgucuccugcuacggcaagaccaagugcaccgccuccaacaagaaccgcggcaucaucaagaccuucuccaacggcugcgacuacgucuccaacaagggcgucgacaccgucuccgucggcaacacccucuacuacgucaacaagcaggagggcaagucccucuacgucaagggcgagcccaucaucaacuucuacgacccccucgucuuccccuccgacgaguucgacgccuccaucucccaggucaacgagaagaucaaccagucccucgccuucauccgcaaguccgacgagcuccuccacaacgucaacgccggcaaguccaccaccaacaucaugaucaccaccaucaucaucgucaucaucgucauccuccucucccucaucgccgucggccuccuccucuacugcaaggcccgcuccacccccgucacccucuccaaggaccagcucuccggcaucaacaacaucgccuucuccaacugaggacuaguacuggcugcaucucccuuuccucuguccuccauccuucucccaggauggugaagggggaccugguacccagugauccccaccccaggauccuaaaucaugacuuaccugcuaauaaaaacucauuggaaaagugagaagaucuaaaaaaaaaaaaaaaaaaaaaaaaaaaaaaaaaaaaaaaaaaaaaaaaaaaaaaaaaaaaaaaaugcaucccccccccccccccccccccccccccccccaaaggcucuuuucagagccaccagaauu

SEQ ID NO: 1230 - RNA, 2178 nt, Artificial Sequence
  mRNA product Design h-5 comprising derived and/or modified sequence from HRSV(A2)__F0_DSCav1 (opt3)
gggagagggcgcuuggcuugcaaggacccugagcugcggcauugaagcacacccaacccaacucgacugaagucagccucacugaaccggaucugagaaucuucucucucugggcuugccagggcucuccgaaccuagcuagcauccucuucaauuccaacuagaaagcuuaccauggagcugcucauccuuaaggccaacgcuauuaccacaauacugacugcagugacguucugcuuugccagcggccagaauaucaccgaagaguucuaccaauccacauguucugcggucucaaaaggguauuugagugcuuuaagaacuggaugguacaccagcguuauuacaaucgaacuguccaacauuaaggagaauaaaugcaacgguaccgacgccaaggugaaacuaaucaagcaggaacucgauaaguauaaaaaugcaguaacugagcugcagcuucugaugcagucuacacccgccaccaacaauagggcucggcgcgaguugccucgauuuaugaacuacacgcucaauaacgcaaagaaaacuaaugugacccugucgaagaaacguaagagaagguuccugggcuuucucuuaggggucggaucagccauagcuagcggcguggccguuuguaaggugcugcaccuugaaggugaggucaacaaaaucaagagugcguugcuguccacaaauaaagcagugguaucucuaagcaacgggguuuccgugcucacuuucaagguccuggaccuuaaaaauuauauugauaagcaacuguugccaauccucaacaaacagucaugcaguauuagcaacaucgaaaccgugauagaguuucagcagaagaauaaccggcuguuagagauuacacgcgaguucucugugaaugccggagucaccacgccgguuuccacuuacaugcugacaaacucagaacuccuuagccugaucaaugacaugcccauuaccaacgaucaaaagaaauugaugaguaauaacgugcagaucguaagacagcagucuuauuccaucauguguauuauaaaggaagaggugcuagcuuacgucgugcaacugccucucuacggcguuaucgacacuccaugcuggaaacugcauacaagcccccuuuguaccacgaauaccaaggaaggcucgaacauuugccugacaaggacugaucgggggugguauugugacaaugccggaucuguguccuuuuucccucaggcagagaccugcaaaguccagucaaaccgcguguuuugugauacaaugaauaguuugacucucccaagcgagguaaaccugugcaauguugacaucuucaaccccaaguacgauugcaagauaaugaccuccaaaacagacgugucuagcucagucauuaccaguuuaggugcuaucguguccuguuauggcaagacuaaaugcacggccagcaacaagaaucgagggaucauuaaaacauuuucuaacggaugugauuacgucucaaauaagggcguggacaccguuaguguggguaacacucuguauuacguaaauaagcaagaagggaaaagccuauaugucaagggagagccuaucauuaacuucuacgacccacucguguucccguccgaugaauuugacgcgucuauaucgcagguuaaugagaaaaucaaccagagccuggccuucauuagaaaguccgaugaacuuuugcacaaugugaacgcaggcaaaucaaccacaaauaucaugaucaccacuauuauaaucgucauuaucgugauucugcucagucugaucgcuguaggccuucuguuguacugcaaggccaggucuacacccgugacgcucagcaaggaccagcuguccgggauaaacaauaucgcuuuuucaaacugaggacuaguacuggcugcaucucccuuuccucuguccuccauccuucucccaggauggugaagggggaccugguacccagugauccccaccccaggauccuaaaucaugacuuaccugcuaauaaaaacucauuggaaaagugagaagaucuaaaaaaaaaaaaaaaaaaaaaaaaaaaaaaaaaaaaaaaaaaaaaaaaaaaaaaaaaaaaaaaaugcaucccccccccccccccccccccccccccccccaaaggcucuuuucagagccaccagaauu

SEQ ID NO: 1231 - RNA, 2178 nt, Artificial Sequence
  mRNA product Design h-5 comprising derived and/or modified sequence from HRSV(A2)__F0_DSCav1 (opt4)
gggagagggcgcuuggcuugcaaggacccugagcugcggcauugaagcacacccaacccaacucgacugaagucagccucacugaaccggaucugagaaucuucucucucugggcuugccagggcucuccgaaccuagcuagcauccucuucaauuccaacuagaaagcuuaccauggagcugcugauccugaaggccaacgccaucaccaccauccugaccgccgugaccuucugcuucgccagcggccagaacaucaccgaggaguucuaccagagcaccugcagcgccgugagcaagggcuaccugagcgcccugagaaccggcugguacaccagcgugaucaccaucgagcugagcaacaucaaggagaacaagugcaacggcaccgacgccaaggugaagcugaucaagcaggagcuggacaaguacaagaacgccgugaccgagcugcagcugcugaugcagagcacccccgccaccaacaacagagccagaagagagcugcccagauucaugaacuacacccugaacaacgccaagaagaccaacgugacccugagcaagaagagaaagagaagauuccugggcuuccugcugggcgugggcagcgccaucgccagcggcguggccgugugcaaggugcugcaccuggagggcgaggugaacaagaucaagagcgcccugcugagcaccaacaaggccguggugagccugagcaacggcgugagcgugcugaccuucaaggugcuggaccugaagaacuacaucgacaagcagcugcugcccauccugaacaagcagagcugcagcaucagcaacaucgagaccgugaucgaguuccagcagaagaacaacagacugcuggagaucaccagagaguucagcgugaacgccggcgugaccacccccgugagcaccuacaugcugaccaacagcgagcugcugagccugaucaacgacaugcccaucaccaacgaccagaagaagcugaugagcaacaacgugcagaucgugagacagcagagcuacagcaucaugugcaucaucaaggaggaggugcuggccuacguggugcagcugccccuguacggcgugaucgacacccccugcuggaagcugcacaccagcccccugugcaccaccaacaccaaggagggcagcaacaucugccugaccagaaccgacagaggcugguacugcgacaacgccggcagcgugagcuucuucccccaggccgagaccugcaaggugcagagcaacagaguguucugcgacaccaugaacagccugacccugcccagcgaggugaaccugugcaacguggacaucuucaaccccaaguacgacugcaagaucaugaccagcaagaccgacgugagcagcagcgugaucaccagccugggcgccaucgugagcugcuacggcaagaccaagugcaccgccagcaacaagaacagaggcaucaucaagaccuucagcaacggcugcgacuacgugagcaacaagggcguggacaccgugagcgugggcaacacccuguacuacgugaacaagcaggagggcaagagccuguacgugaagggcgagcccaucaucaacuucuacgacccccugguguuccccagcgacgaguucgacgccagcaucagccaggugaacgagaagaucaaccagagccuggccuucaucagaaagagcgacgagcugcugcacaacgugaacgccggcaagagcaccaccaacaucaugaucaccaccaucaucaucgugaucaucgugauccugcugagccugaucgccgugggccugcugcuguacugcaaggccagaagcacccccgugacccugagcaaggaccagcugagcggcaucaacaacaucgccuucagcaacugaggacuaguacuggcugcaucucccuuuccucuguccuccauccuucucccaggauggugaagggggaccugguacccagugauccccaccccaggauccuaaaucaugacuuaccugcuaauaaaaacucauuggaaaagugagaagaucuaaaaaaaaaaaaaaaaaaaaaaaaaaaaaaaaaaaaaaaaaaaaaaaaaaaaaaaaaaaaaaaaugcaucccccccccccccccccccccccccccccccaaaggcucuuuucagagccaccagaauu

SEQ ID NO: 1232 - RNA, 2178 nt, Artificial Sequence
  mRNA product Design h-5 comprising derived and/or modified sequence from HRSV(A2)__F0_DSCav1 (opt5)
gggagagggcgcuuggcuugcaaggacccugagcugcggcauugaagcacacccaacccaacucgacugaagucagccucacugaaccggaucugagaaucuucucucucugggcuugccagggcucuccgaaccuagcuagcauccucuucaauuccaacuagaaagcuuaccauggagcugcucauccugaaggccaacgcuauuaccacaauccuuacggccgugaccuucugcuuugcgagcggccagaauauuacagaagaguucuaccaauccaccuguucugcugucagcaaaggguaucuguccgcccucagaacaggaugguacaccucuguuaucacaauugaacugagcaacaucaaggagaauaaaugcaacggcaccgacgccaaggugaaacuuaucaagcaggaacuggauaaguauaaaaaugcugugacggagcuccagcugcugaugcaguccacccccgccacaaacaaucgggcucgcagagagcucccucgguuuaugaacuacacccugaauaacgccaagaaaacaaaugucacccuuucuaagaaacgcaagagacgguuccugggguuucuccugggagugggcagcgcgauugccuccgggguugcuguguguaagguccuucaccuggaaggagaggugaacaaaaucaagagcgcccuccugucuacgaauaaagcuguugugucccugagcaacggcgucucugugcucacauucaaggugcuggaccuuaaaaauuauauugauaagcaacugcucccgauccugaacaaacaguccugcagcauuucuaacaucgaaaccgucauugaguuucagcagaagaauaaccgccuucuggagaucacaagagaauuuuccguuaaugccggcgugaccacccccgugagcacauacaugcucacgaacuccgagcugcugucucucaucaaugacaugccuauuaccaacgaucaaaagaaacugaugagcaauaacguccagaucgugcggcagcaguccuauagcauuauguguaucauuaaggaagagguucuugcguacgugguccaacugccccucuacggggugaucgacacaccuugcuggaaacugcauaccucuccccuuuguacaaccaauacgaaggaaggauccaacaucugccugacacgcaccgauagaggcugguauugugacaaugccgggagcguuucuuucuucccucaggcugagaccugcaaagugcagagcaaccgggucuuuugugauacaaugaacucccucacccugccgucugaggugaaucugugcaaugucgacauuuucaaccccaaguacgauugcaagaucaugacaagcaaaacggacguguccagcucuguuauuaccucccucggagccaucgugagcuguuauggcaagacaaaaugcaccgcuucuaacaagaaucgcgggauuaucaaaacauuuuccaacggaugugauuacgucagcaauaagggcguggacaccguuuccgugggcaacacgcuguauuacgucaauaagcaagaagggaaaucucuuuaugugaagggagagccuaucauuaacuucuacgacccccugguguucccuagcgaugaauuugacgccuccaucucucagguuaaugagaaaauuaaccagagccucgccuucaucagaaaguccgaugaacugcugcacaaugucaacgcuggcaaaagcaccacaaauauuaugaucaccacaauuaucaucgugauuaucgugauucuucucucucugaucgcggucgggcugcuccuguacugcaaggcccgguccacccccgugacgcuuagcaaggaccagcugucuggaauuaacaauaucgcuuuuuccaacugaggacuaguacuggcugcaucucccuuuccucuguccuccauccuucucccaggauggugaagggggaccugguacccagugauccccaccccaggauccuaaaucaugacuuaccugcuaauaaaaacucauuggaaaagugagaagaucuaaaaaaaaaaaaaaaaaaaaaaaaaaaaaaaaaaaaaaaaaaaaaaaaaaaaaaaaaaaaaaaaugcaucccccccccccccccccccccccccccccccaaaggcucuuuucagagccaccagaauu

SEQ ID NO: 1233 - RNA, 2178 nt, Artificial Sequence
  mRNA product Design h-5 comprising derived and/or modified sequence from HRSV(A2)__F0_DSCav1 (opt6)
gggagagggcgcuuggcuugcaaggacccugagcugcggcauugaagcacacccaacccaacucgacugaagucagccucacugaaccggaucugagaaucuucucucucugggcuugccagggcucuccgaaccuagcuagcauccucuucaauuccaacuagaaagcuuaccauggaauuauuaauccucaaagcgaacgcuauuacuaccauucuaacagcagucacauucugcuucgccucaggccaaaacauuacagaagaauuuuaccaaucaacaugcucugccguaucaaaaggcuaccuauccgcccuacgaacaggcugguacacaagcguaauaacaaucgaacuaucaaacauaaaagaaaacaaaugcaacgguacagacgccaaaguuaaacuaauaaaacaagaacucgauaaauacaaaaacgcaguaacagaauuacaacuacuaaugcaaucaacaccugcaacaaacaauagagccaggagagaauuaccucgauucaugaauuacacacucaauaacgcaaaaaaaaccaacguuacacuaucaaaaaaaagaaaacgacgauucuuaggauuccuacucggagucggaucagcaauagcaucuggcguugcaguaugcaaaguauuacacuuagaaggugaagucaauaaaauaaaaagcgcgcuacuaaguacaaacaaagcagucgucucccuaucaaacggagucucaguccuaacauucaaaguacucgaccuaaaaaauuacauagauaaacaacuacuuccaauauuaaacaaacaauccuguagcaucagcaauauagaaacaguaauagaauuucaacaaaaaaacaaccgauuauuagaaaucacucgagaauuuuccguaaacgccgggguaacaacuccagucucaaccuacaugcuaaccaauucagaacuauugagcuuaauaaacgacaugccaauaaccaacgaccaaaaaaaacuaaugucuaacaauguucaaaucgucagacaacaaaguuacaguauaauguguauaaucaaagaagaaguccuagcauacguaguccaacucccacuauauggaguuaucgacacaccauguuggaaauuacacaccucaccauuaugcacaaccaauacaaaagaaggaucaaacauaugccuuacacggacagaccgcggaugguauugugacaacgcuggcucagucuccuuuuucccacaagcagaaacaugcaaaguacaaucaaacagagucuuuugcgauaccaugaacucacuuacauuaccaagcgaaguaaaucuuuguaacgucgacaucuucaauccuaaauaugacugcaaaaucaugaccucaaaaacagacguuagcucuucaguaaucacuagcuuaggagcaaucguaucaugcuacggcaaaacaaaauguacagcaucaaauaaaaacagaggaaucauaaaaacauuuucaaacggaugcgauuauguaagcaacaaaggaguagauacuguaagcguaggaaacacauuguacuauguaaacaaacaagaaggaaaaucacucuauguaaaaggagaaccuauaaucaauuucuacgauccauuaguguucccaucagaugaauuugacgccucaauaucacaaguuaaugaaaaaauaaaucaaucgcuagcauucauacguaaaucagaugaauuacuacauaacguaaacgcaggcaaauccacaacaaauaucaugaucacaacaauuauaauaguaauaauaguaauacuacuaucacuaauagccguaggacuccuacuauacugcaaagcaagaucuacuccaguaacccucucaaaagaucaacuaagcggaauuaauaacaucgcauucagcaacuaaggacuaguacuggcugcaucucccuuuccucuguccuccauccuucucccaggauggugaagggggaccugguacccagugauccccaccccaggauccuaaaucaugacuuaccugcuaauaaaaacucauuggaaaagugagaagaucuaaaaaaaaaaaaaaaaaaaaaaaaaaaaaaaaaaaaaaaaaaaaaaaaaaaaaaaaaaaaaaaaugcaucccccccccccccccccccccccccccccccaaaggcucuuuucagagccaccagaauu

SEQ ID NO: 1234 - RNA, 2178 nt, Artificial Sequence
  mRNA product Design h-5 comprising derived and/or modified sequence from HRSV(A2)__F0_DSCav1 (opt11)
gggagagggcgcuuggcuugcaaggacccugagcugcggcauugaagcacacccaacccaacucgacugaagucagccucacugaaccggaucugagaaucuucucucucugggcuugccagggcucuccgaaccuagcuagcauccucuucaauuccaacuagaaagcuuaccauggaacuacuuauccucaaagccaacgccaucaccaccauccucacagcaguaaccuuuugcuucgccucaggccaaaauaucacagaagaauuuuaccagaguaccugcuccgccguauccaaaggauaccucagcgcgcuccgcaccggcugguacacuucaguaaucacaaucgaacuauccaacaucaaagaaaacaaaugcaacggcaccgacgcgaaagucaaacucaucaaacaagaacuagacaaauacaaaaaugccguaacagaacuacaacuguuaaugcagagcacacccgccaccaacaaccgcgcccgccgggaacucccccgauucaugaacuacacacucaacaacgccaaaaagacgaacgucacccucagcaagaaacgaaaacgcagauuccucgguuuccuacuaggcguaggcucagcaauagccuccggaguagccgucugcaaaguccugcacuuagaaggcgaagucaacaaaaucaaauccgcccuacucuccacgaacaaagccgucgucucccuguccaacggugucuccguuuuaaccuucaaaguucuggaccucaaaaacuacauagacaaacagcuucuccccauccucaacaaacaauccuguagcaucuccaacaucgaaaccgucauagaauuucaacagaaaaacaacagacugcucgaaaucacccgcgaguucuccgucaacgccggcgucacgacucccgucuccaccuauaugcucacgaacucggaacuccuuucccuaaucaacgacaugccgaucaccaacgaccaaaagaaacucaugucaaacaacguacaaauuguccgccaacaaucauacuccaucaugugcauaauuaaagaagaaguccucgcauacguaguccaacucccccucuacggcgucaucgacacccccugcuggaaacuccacaccuccccacucugcacaaccaacaccaaagaaggcucaaacauaugccuaacgcgcaccgaucgcgguugguacugcgacaacgccgguuccgucagcuucuucccccaagcagagacaugcaaaguccaaucaaaccgcgucuucugcgacaccaugaacucacuaacccuuccaagcgaagucaaccucugcaacguugacaucuucaaccccaaauacgacuguaaaaucaugaccuccaagaccgacguauccucuuccgucaucacaucccuaggcgcuaucguauccugcuaugguaaaaccaaaugcaccgccuccaacaaaaaccgcggcaucaucaagacauuuuccaacggcugcgacuacgugagcaacaaaggcgucgacaccgucuccguaggcaacacccucuacuauguaaacaaacaagagggcaaaucacucuacgucaaaggggaacccaucaucaacuucuacgacccgcucguauuccccagcgaugaguucgacgccuccaucucccaggucaacgaaaagauaaaccaaucacucgcauucauucguaaauccgacgaacuccuacacaacgugaaugcaggcaaaucgaccacuaacaucaugaucaccaccaucaucaucgucaucauagucauccuccugucccuuaucgccgucggucuuuuauuauacugcaaagcccgcagcacccccgucacccucucuaaggaccaacucagcggcaucaauaacaucgcauucucuaacuaaggacuaguacuggcugcaucucccuuuccucuguccuccauccuucucccaggauggugaagggggaccugguacccagugauccccaccccaggauccuaaaucaugacuuaccugcuaauaaaaacucauuggaaaagugagaagaucuaaaaaaaaaaaaaaaaaaaaaaaaaaaaaaaaaaaaaaaaaaaaaaaaaaaaaaaaaaaaaaaaugcaucccccccccccccccccccccccccccccccaaaggcucuuuucagagccaccagaauu

SEQ ID NO: 1235 - RNA, 2111 nt, Artificial Sequence
  mRNA product Design i-1 comprising derived and/or modified sequence from HRSV(A2)__F0_DSCav1 (opt1)
gggagagggcgcuuggcuugcaaggacccugagcugcggcauugaagcacacccaacccaacucgacugaagucagccucacugaaccggaucugagaaucuucucucucugggcuugccagggcucuccgaaccuagcuagcauccucuucaauuccaacuagaaagcuuaccauggagcugcucauccugaaggccaacgccaucaccaccauccugacggcggugaccuucugcuucgccagcggccagaacaucaccgaggaguucuaccaguccacgugcagcgccgucuccaagggguaccucagcgcccugcggaccggcugguacaccuccgugaucaccaucgagcugagcaacaucaaggagaacaagugcaacgggaccgacgccaaggugaagcucaucaagcaggagcuggacaaguacaagaacgcggucacggagcugcagcuccugaugcaguccaccccggcaaccaacaaccgcgcccggcgcgagcugccccgguucaugaacuacacccucaacaacgccaagaagacgaacgugacccugagcaagaagcgcaagcggcgcuuccugggcuuccuccugggggugggcuccgccaucgcgagcggcgucgccgugugcaaggugcugcaccucgagggggaggucaacaagaucaagagcgcccugcuguccaccaacaaggccguggugagccucuccaacggcgucagcgugcugaccuucaaggugcuggaccucaagaacuacaucgacaagcagcugcugcccauccugaacaagcagagcugcuccaucagcaacaucgagacggugaucgaguuccagcagaagaacaaccggcuccuggagaucacccgcgaguucagcgugaacgccggggucaccacccccguguccacguacaugcugaccaacagcgagcuccugucccugaucaacgacaugccgaucaccaacgaccagaagaagcucaugagcaacaacgugcagaucguccggcagcaguccuacagcaucaugugcaucaucaaggaggaggugcuggcguacgugguccagcugccccucuacggcgugaucgacacccccugcuggaagcugcacacgagcccccugugcaccaccaacaccaaggagggguccaacaucugccucacgcgcaccgaccggggcugguacugcgacaacgccggcagcgucuccuucuucccgcaggccgagaccugcaaggugcagagcaaccgcguguucugcgacaccaugaacucccugacgcugcccagcgagguaaaccucugcaacgucgacaucuucaaccccaaguacgacugcaagaucaugaccuccaagaccgacgugagcuccagcgugaucaccucccugggggccaucgucagcugcuacggcaagacgaagugcaccgccagcaacaagaaccgggggaucaucaagaccuucuccaacggcugcgacuacgugagcaacaagggcguggacaccguguccgucgggaacacccuguacuacgugaacaagcaggagggcaagagccucuacgugaagggggagcccaucaucaacuucuacgacccgcuggucuuccccuccgacgaguucgacgcgagcaucucccaggugaacgagaagaucaaccagagccuggccuucauccgcaaguccgacgagcugcuccacaacgugaacgccggcaagagcacgaccaacaucaugaucaccaccaucaucaucgucaucaucgugauccugcugucccucaucgccguggggcugcugcucuacugcaaggcccggagcacgcccgucacccuguccaaggaccagcugagcggcaucaacaacaucgcguucuccaacugaggacuaguguccaccugucccuccugggcugcuggauugucucguuuuccugccaaauaaacaggaucagcgcuuuacagaucuaaaaaaaaaaaaaaaaaaaaaaaaaaaaaaaaaaaaaaaaaaaaaaaaaaaaaaaaaaaaaaaaugcaucccccccccccccccccccccccccccccccaaaggcucuuuucagagccaccagaauu

SEQ ID NO: 1236 - RNA, 2111 nt, Artificial Sequence
  mRNA product Design i-1 comprising derived and/or modified sequence from HRSV(A2)__F0_DSCav1 (opt1)
gggagagggcgcuuggcuugcaaggacccugagcugcggcauugaagcacacccaacccaacucgacugaagucagccucacugaaccggaucugagaaucuucucucucugggcuugccagggcucuccgaaccuagcuagcauccucuucaauuccaacuagaaagcuuaccauggagcugcucauccugaaggccaacgccaucaccaccauccugacggcggugaccuucugcuucgccagcggccagaacaucaccgaggaguucuaccaguccacgugcagcgccgucuccaagggguaccucagcgcccugcgcaccggcugguacaccuccgugaucaccaucgagcugagcaacaucaaggagaacaagugcaacgggaccgacgccaaggugaagcucaucaagcaggagcuggacaaguacaagaacgcggucacggagcugcagcuccugaugcaguccacccccgccaccaacaaccgggcccgccgggagcugccgcgcuucaugaacuacacccucaacaacgccaagaagacgaacgugacccugagcaagaagcggaagcgccgguuccugggcuuccuccugggggugggcuccgcgaucgccagcggcgucgccgugugcaaggugcugcaccucgagggggaggucaacaagaucaaguccgcccugcugagcaccaacaaggccguggugucccucagcaacggcgucuccgugcugaccuucaaggugcuggaccucaagaacuacaucgacaagcagcugcugcccauccucaacaagcagagcugcuccaucagcaacaucgagacggucaucgaguuccagcagaagaacaaccgccugcuggagaucacccgggaguucuccgugaacgcgggggugaccacccccgucagcacguacaugcucaccaacagcgagcugcugucccucaucaacgacaugcccaucaccaacgaccagaagaagcugaugagcaacaacgugcagaucgugcgccagcaguccuacagcaucaugugcaucaucaaggaggagguccuggccuacguggugcagcucccgcuguacggcgucaucgacacccccugcuggaagcugcacacgagcccccucugcaccaccaacaccaaggaggggagcaacaucugccugacgcggaccgaccgcggcugguacugcgacaacgccggcuccgugagcuucuucccccaggccgagaccugcaagguccaguccaaccggguguucugcgacaccaugaacagccugacgcucccguccgaggugaaccugugcaacgucgacaucuucaaccccaaguacgacugcaagaucaugaccagcaagaccgacguguccagcuccgugaucaccagccugggggccaucgucuccugcuacggcaagacgaagugcaccgcgagcaacaagaaccgcgggaucaucaagaccuucuccaacggcugcgacuacgugagcaacaagggcguggacaccgucagcguggggaacacccucuacuacgugaacaagcaggagggcaagucccuguacgucaagggggagcccaucaucaacuucuacgacccccugguguucccgagcgacgaguucgacgccuccaucagccaggugaacgagaagaucaaccagucccucgccuucauccggaaguccgacgagcugcugcacaacgucaacgccggcaaguccacgaccaacaucaugaucaccaccaucaucaucgugaucaucgugauccugcucagccugaucgccgucgggcugcuccuguacugcaaggcgcgcuccacgcccgugacccugagcaaggaccagcucuccggcaucaacaacaucgccuucagcaacugaggacuaguguccaccugucccuccugggcugcuggauugucucguuuuccugccaaauaaacaggaucagcgcuuuacagaucuaaaaaaaaaaaaaaaaaaaaaaaaaaaaaaaaaaaaaaaaaaaaaaaaaaaaaaaaaaaaaaaaugcaucccccccccccccccccccccccccccccccaaaggcucuuuucagagccaccagaauu

SEQ ID NO: 1237 - RNA, 2111 nt, Artificial Sequence
  mRNA product Design i-1 comprising derived and/or modified sequence from HRSV(A2)__F0_DSCav1 (opt2)
gggagagggcgcuuggcuugcaaggacccugagcugcggcauugaagcacacccaacccaacucgacugaagucagccucacugaaccggaucugagaaucuucucucucugggcuugccagggcucuccgaaccuagcuagcauccucuucaauuccaacuagaaagcuuaccauggagcuccucauccucaaggccaacgccaucaccaccauccucaccgccgucaccuucugcuucgccuccggccagaacaucaccgaggaguucuaccaguccaccugcuccgccgucuccaagggcuaccucuccgcccuccgcaccggcugguacaccuccgucaucaccaucgagcucuccaacaucaaggagaacaagugcaacggcaccgacgccaaggucaagcucaucaagcaggagcucgacaaguacaagaacgccgucaccgagcuccagcuccucaugcaguccacccccgccaccaacaaccgcgcccgccgcgagcucccccgcuucaugaacuacacccucaacaacgccaagaagaccaacgucacccucuccaagaagcgcaagcgccgcuuccucggcuuccuccucggcgucggcuccgccaucgccuccggcgucgccgucugcaagguccuccaccucgagggcgaggucaacaagaucaaguccgcccuccucuccaccaacaaggccgucgucucccucuccaacggcgucuccguccucaccuucaagguccucgaccucaagaacuacaucgacaagcagcuccuccccauccucaacaagcaguccugcuccaucuccaacaucgagaccgucaucgaguuccagcagaagaacaaccgccuccucgagaucacccgcgaguucuccgucaacgccggcgucaccacccccgucuccaccuacaugcucaccaacuccgagcuccucucccucaucaacgacaugcccaucaccaacgaccagaagaagcucauguccaacaacguccagaucguccgccagcaguccuacuccaucaugugcaucaucaaggaggagguccucgccuacgucguccagcucccccucuacggcgucaucgacacccccugcuggaagcuccacaccuccccccucugcaccaccaacaccaaggagggcuccaacaucugccucacccgcaccgaccgcggcugguacugcgacaacgccggcuccgucuccuucuucccccaggccgagaccugcaagguccaguccaaccgcgucuucugcgacaccaugaacucccucacccuccccuccgaggucaaccucugcaacgucgacaucuucaaccccaaguacgacugcaagaucaugaccuccaagaccgacgucuccuccuccgucaucaccucccucggcgccaucgucuccugcuacggcaagaccaagugcaccgccuccaacaagaaccgcggcaucaucaagaccuucuccaacggcugcgacuacgucuccaacaagggcgucgacaccgucuccgucggcaacacccucuacuacgucaacaagcaggagggcaagucccucuacgucaagggcgagcccaucaucaacuucuacgacccccucgucuuccccuccgacgaguucgacgccuccaucucccaggucaacgagaagaucaaccagucccucgccuucauccgcaaguccgacgagcuccuccacaacgucaacgccggcaaguccaccaccaacaucaugaucaccaccaucaucaucgucaucaucgucauccuccucucccucaucgccgucggccuccuccucuacugcaaggcccgcuccacccccgucacccucuccaaggaccagcucuccggcaucaacaacaucgccuucuccaacugaggacuaguguccaccugucccuccugggcugcuggauugucucguuuuccugccaaauaaacaggaucagcgcuuuacagaucuaaaaaaaaaaaaaaaaaaaaaaaaaaaaaaaaaaaaaaaaaaaaaaaaaaaaaaaaaaaaaaaaugcaucccccccccccccccccccccccccccccccaaaggcucuuuucagagccaccagaauu

SEQ ID NO: 1238 - RNA, 2111 nt, Artificial Sequence
  mRNA product Design i-1 comprising derived and/or modified sequence from HRSV(A2)__F0_DSCav1 (opt3)
gggagagggcgcuuggcuugcaaggacccugagcugcggcauugaagcacacccaacccaacucgacugaagucagccucacugaaccggaucugagaaucuucucucucugggcuugccagggcucuccgaaccuagcuagcauccucuucaauuccaacuagaaagcuuaccauggagcugcucauccuuaaggccaacgcuauuaccacaauacugacugcagugacguucugcuuugccagcggccagaauaucaccgaagaguucuaccaauccacauguucugcggucucaaaaggguauuugagugcuuuaagaacuggaugguacaccagcguuauuacaaucgaacuguccaacauuaaggagaauaaaugcaacgguaccgacgccaaggugaaacuaaucaagcaggaacucgauaaguauaaaaaugcaguaacugagcugcagcuucugaugcagucuacacccgccaccaacaauagggcucggcgcgaguugccucgauuuaugaacuacacgcucaauaacgcaaagaaaacuaaugugacccugucgaagaaacguaagagaagguuccugggcuuucucuuaggggucggaucagccauagcuagcggcguggccguuuguaaggugcugcaccuugaaggugaggucaacaaaaucaagagugcguugcuguccacaaauaaagcagugguaucucuaagcaacgggguuuccgugcucacuuucaagguccuggaccuuaaaaauuauauugauaagcaacuguugccaauccucaacaaacagucaugcaguauuagcaacaucgaaaccgugauagaguuucagcagaagaauaaccggcuguuagagauuacacgcgaguucucugugaaugccggagucaccacgccgguuuccacuuacaugcugacaaacucagaacuccuuagccugaucaaugacaugcccauuaccaacgaucaaaagaaauugaugaguaauaacgugcagaucguaagacagcagucuuauuccaucauguguauuauaaaggaagaggugcuagcuuacgucgugcaacugccucucuacggcguuaucgacacuccaugcuggaaacugcauacaagcccccuuuguaccacgaauaccaaggaaggcucgaacauuugccugacaaggacugaucgggggugguauugugacaaugccggaucuguguccuuuuucccucaggcagagaccugcaaaguccagucaaaccgcguguuuugugauacaaugaauaguuugacucucccaagcgagguaaaccugugcaauguugacaucuucaaccccaaguacgauugcaagauaaugaccuccaaaacagacgugucuagcucagucauuaccaguuuaggugcuaucguguccuguuauggcaagacuaaaugcacggccagcaacaagaaucgagggaucauuaaaacauuuucuaacggaugugauuacgucucaaauaagggcguggacaccguuaguguggguaacacucuguauuacguaaauaagcaagaagggaaaagccuauaugucaagggagagccuaucauuaacuucuacgacccacucguguucccguccgaugaauuugacgcgucuauaucgcagguuaaugagaaaaucaaccagagccuggccuucauuagaaaguccgaugaacuuuugcacaaugugaacgcaggcaaaucaaccacaaauaucaugaucaccacuauuauaaucgucauuaucgugauucugcucagucugaucgcuguaggccuucuguuguacugcaaggccaggucuacacccgugacgcucagcaaggaccagcuguccgggauaaacaauaucgcuuuuucaaacugaggacuaguguccaccugucccuccugggcugcuggauugucucguuuuccugccaaauaaacaggaucagcgcuuuacagaucuaaaaaaaaaaaaaaaaaaaaaaaaaaaaaaaaaaaaaaaaaaaaaaaaaaaaaaaaaaaaaaaaugcaucccccccccccccccccccccccccccccccaaaggcucuuuucagagccaccagaauu

SEQ ID NO: 1239 - RNA, 2111 nt, Artificial Sequence
  mRNA product Design i-1 comprising derived and/or modified sequence from HRSV(A2)__F0_DSCav1 (opt4)
gggagagggcgcuuggcuugcaaggacccugagcugcggcauugaagcacacccaacccaacucgacugaagucagccucacugaaccggaucugagaaucuucucucucugggcuugccagggcucuccgaaccuagcuagcauccucuucaauuccaacuagaaagcuuaccauggagcugcugauccugaaggccaacgccaucaccaccauccugaccgccgugaccuucugcuucgccagcggccagaacaucaccgaggaguucuaccagagcaccugcagcgccgugagcaagggcuaccugagcgcccugagaaccggcugguacaccagcgugaucaccaucgagcugagcaacaucaaggagaacaagugcaacggcaccgacgccaaggugaagcugaucaagcaggagcuggacaaguacaagaacgccgugaccgagcugcagcugcugaugcagagcacccccgccaccaacaacagagccagaagagagcugcccagauucaugaacuacacccugaacaacgccaagaagaccaacgugacccugagcaagaagagaaagagaagauuccugggcuuccugcugggcgugggcagcgccaucgccagcggcguggccgugugcaaggugcugcaccuggagggcgaggugaacaagaucaagagcgcccugcugagcaccaacaaggccguggugagccugagcaacggcgugagcgugcugaccuucaaggugcuggaccugaagaacuacaucgacaagcagcugcugcccauccugaacaagcagagcugcagcaucagcaacaucgagaccgugaucgaguuccagcagaagaacaacagacugcuggagaucaccagagaguucagcgugaacgccggcgugaccacccccgugagcaccuacaugcugaccaacagcgagcugcugagccugaucaacgacaugcccaucaccaacgaccagaagaagcugaugagcaacaacgugcagaucgugagacagcagagcuacagcaucaugugcaucaucaaggaggaggugcuggccuacguggugcagcugccccuguacggcgugaucgacacccccugcuggaagcugcacaccagcccccugugcaccaccaacaccaaggagggcagcaacaucugccugaccagaaccgacagaggcugguacugcgacaacgccggcagcgugagcuucuucccccaggccgagaccugcaaggugcagagcaacagaguguucugcgacaccaugaacagccugacccugcccagcgaggugaaccugugcaacguggacaucuucaaccccaaguacgacugcaagaucaugaccagcaagaccgacgugagcagcagcgugaucaccagccugggcgccaucgugagcugcuacggcaagaccaagugcaccgccagcaacaagaacagaggcaucaucaagaccuucagcaacggcugcgacuacgugagcaacaagggcguggacaccgugagcgugggcaacacccuguacuacgugaacaagcaggagggcaagagccuguacgugaagggcgagcccaucaucaacuucuacgacccccugguguuccccagcgacgaguucgacgccagcaucagccaggugaacgagaagaucaaccagagccuggccuucaucagaaagagcgacgagcugcugcacaacgugaacgccggcaagagcaccaccaacaucaugaucaccaccaucaucaucgugaucaucgugauccugcugagccugaucgccgugggccugcugcuguacugcaaggccagaagcacccccgugacccugagcaaggaccagcugagcggcaucaacaacaucgccuucagcaacugaggacuaguguccaccugucccuccugggcugcuggauugucucguuuuccugccaaauaaacaggaucagcgcuuuacagaucuaaaaaaaaaaaaaaaaaaaaaaaaaaaaaaaaaaaaaaaaaaaaaaaaaaaaaaaaaaaaaaaaugcaucccccccccccccccccccccccccccccccaaaggcucuuuucagagccaccagaauu

SEQ ID NO: 1240 - RNA, 2111 nt, Artificial Sequence
  mRNA product Design i-1 comprising derived and/or modified sequence from HRSV(A2)__F0_DSCav1 (opt5)
gggagagggcgcuuggcuugcaaggacccugagcugcggcauugaagcacacccaacccaacucgacugaagucagccucacugaaccggaucugagaaucuucucucucugggcuugccagggcucuccgaaccuagcuagcauccucuucaauuccaacuagaaagcuuaccauggagcugcucauccugaaggccaacgcuauuaccacaauccuuacggccgugaccuucugcuuugcgagcggccagaauauuacagaagaguucuaccaauccaccuguucugcugucagcaaaggguaucuguccgcccucagaacaggaugguacaccucuguuaucacaauugaacugagcaacaucaaggagaauaaaugcaacggcaccgacgccaaggugaaacuuaucaagcaggaacuggauaaguauaaaaaugcugugacggagcuccagcugcugaugcaguccacccccgccacaaacaaucgggcucgcagagagcucccucgguuuaugaacuacacccugaauaacgccaagaaaacaaaugucacccuuucuaagaaacgcaagagacgguuccugggguuucuccugggagugggcagcgcgauugccuccgggguugcuguguguaagguccuucaccuggaaggagaggugaacaaaaucaagagcgcccuccugucuacgaauaaagcuguugugucccugagcaacggcgucucugugcucacauucaaggugcuggaccuuaaaaauuauauugauaagcaacugcucccgauccugaacaaacaguccugcagcauuucuaacaucgaaaccgucauugaguuucagcagaagaauaaccgccuucuggagaucacaagagaauuuuccguuaaugccggcgugaccacccccgugagcacauacaugcucacgaacuccgagcugcugucucucaucaaugacaugccuauuaccaacgaucaaaagaaacugaugagcaauaacguccagaucgugcggcagcaguccuauagcauuauguguaucauuaaggaagagguucuugcguacgugguccaacugccccucuacggggugaucgacacaccuugcuggaaacugcauaccucuccccuuuguacaaccaauacgaaggaaggauccaacaucugccugacacgcaccgauagaggcugguauugugacaaugccgggagcguuucuuucuucccucaggcugagaccugcaaagugcagagcaaccgggucuuuugugauacaaugaacucccucacccugccgucugaggugaaucugugcaaugucgacauuuucaaccccaaguacgauugcaagaucaugacaagcaaaacggacguguccagcucuguuauuaccucccucggagccaucgugagcuguuauggcaagacaaaaugcaccgcuucuaacaagaaucgcgggauuaucaaaacauuuuccaacggaugugauuacgucagcaauaagggcguggacaccguuuccgugggcaacacgcuguauuacgucaauaagcaagaagggaaaucucuuuaugugaagggagagccuaucauuaacuucuacgacccccugguguucccuagcgaugaauuugacgccuccaucucucagguuaaugagaaaauuaaccagagccucgccuucaucagaaaguccgaugaacugcugcacaaugucaacgcuggcaaaagcaccacaaauauuaugaucaccacaauuaucaucgugauuaucgugauucuucucucucugaucgcggucgggcugcuccuguacugcaaggcccgguccacccccgugacgcuuagcaaggaccagcugucuggaauuaacaauaucgcuuuuuccaacugaggacuaguguccaccugucccuccugggcugcuggauugucucguuuuccugccaaauaaacaggaucagcgcuuuacagaucuaaaaaaaaaaaaaaaaaaaaaaaaaaaaaaaaaaaaaaaaaaaaaaaaaaaaaaaaaaaaaaaaugcaucccccccccccccccccccccccccccccccaaaggcucuuuucagagccaccagaauu

SEQ ID NO: 1241 - RNA, 2111 nt, Artificial Sequence
  mRNA product Design i-1 comprising derived and/or modified sequence from HRSV(A2)__F0_DSCav1 (opt6)
gggagagggcgcuuggcuugcaaggacccugagcugcggcauugaagcacacccaacccaacucgacugaagucagccucacugaaccggaucugagaaucuucucucucugggcuugccagggcucuccgaaccuagcuagcauccucuucaauuccaacuagaaagcuuaccauggaauuauuaauccucaaagcgaacgcuauuacuaccauucuaacagcagucacauucugcuucgccucaggccaaaacauuacagaagaauuuuaccaaucaacaugcucugccguaucaaaaggcuaccuauccgcccuacgaacaggcugguacacaagcguaauaacaaucgaacuaucaaacauaaaagaaaacaaaugcaacgguacagacgccaaaguuaaacuaauaaaacaagaacucgauaaauacaaaaacgcaguaacagaauuacaacuacuaaugcaaucaacaccugcaacaaacaauagagccaggagagaauuaccucgauucaugaauuacacacucaauaacgcaaaaaaaaccaacguuacacuaucaaaaaaaagaaaacgacgauucuuaggauuccuacucggagucggaucagcaauagcaucuggcguugcaguaugcaaaguauuacacuuagaaggugaagucaauaaaauaaaaagcgcgcuacuaaguacaaacaaagcagucgucucccuaucaaacggagucucaguccuaacauucaaaguacucgaccuaaaaaauuacauagauaaacaacuacuuccaauauuaaacaaacaauccuguagcaucagcaauauagaaacaguaauagaauuucaacaaaaaaacaaccgauuauuagaaaucacucgagaauuuuccguaaacgccgggguaacaacuccagucucaaccuacaugcuaaccaauucagaacuauugagcuuaauaaacgacaugccaauaaccaacgaccaaaaaaaacuaaugucuaacaauguucaaaucgucagacaacaaaguuacaguauaauguguauaaucaaagaagaaguccuagcauacguaguccaacucccacuauauggaguuaucgacacaccauguuggaaauuacacaccucaccauuaugcacaaccaauacaaaagaaggaucaaacauaugccuuacacggacagaccgcggaugguauugugacaacgcuggcucagucuccuuuuucccacaagcagaaacaugcaaaguacaaucaaacagagucuuuugcgauaccaugaacucacuuacauuaccaagcgaaguaaaucuuuguaacgucgacaucuucaauccuaaauaugacugcaaaaucaugaccucaaaaacagacguuagcucuucaguaaucacuagcuuaggagcaaucguaucaugcuacggcaaaacaaaauguacagcaucaaauaaaaacagaggaaucauaaaaacauuuucaaacggaugcgauuauguaagcaacaaaggaguagauacuguaagcguaggaaacacauuguacuauguaaacaaacaagaaggaaaaucacucuauguaaaaggagaaccuauaaucaauuucuacgauccauuaguguucccaucagaugaauuugacgccucaauaucacaaguuaaugaaaaaauaaaucaaucgcuagcauucauacguaaaucagaugaauuacuacauaacguaaacgcaggcaaauccacaacaaauaucaugaucacaacaauuauaauaguaauaauaguaauacuacuaucacuaauagccguaggacuccuacuauacugcaaagcaagaucuacuccaguaacccucucaaaagaucaacuaagcggaauuaauaacaucgcauucagcaacuaaggacuaguguccaccugucccuccugggcugcuggauugucucguuuuccugccaaauaaacaggaucagcgcuuuacagaucuaaaaaaaaaaaaaaaaaaaaaaaaaaaaaaaaaaaaaaaaaaaaaaaaaaaaaaaaaaaaaaaaugcaucccccccccccccccccccccccccccccccaaaggcucuuuucagagccaccagaauu

SEQ ID NO: 1242 - RNA, 2111 nt, Artificial Sequence
  mRNA product Design i-1 comprising derived and/or modified sequence from HRSV(A2)__F0_DSCav1 (opt11)
gggagagggcgcuuggcuugcaaggacccugagcugcggcauugaagcacacccaacccaacucgacugaagucagccucacugaaccggaucugagaaucuucucucucugggcuugccagggcucuccgaaccuagcuagcauccucuucaauuccaacuagaaagcuuaccauggaacuacuuauccucaaagccaacgccaucaccaccauccucacagcaguaaccuuuugcuucgccucaggccaaaauaucacagaagaauuuuaccagaguaccugcuccgccguauccaaaggauaccucagcgcgcuccgcaccggcugguacacuucaguaaucacaaucgaacuauccaacaucaaagaaaacaaaugcaacggcaccgacgcgaaagucaaacucaucaaacaagaacuagacaaauacaaaaaugccguaacagaacuacaacuguuaaugcagagcacacccgccaccaacaaccgcgcccgccgggaacucccccgauucaugaacuacacacucaacaacgccaaaaagacgaacgucacccucagcaagaaacgaaaacgcagauuccucgguuuccuacuaggcguaggcucagcaauagccuccggaguagccgucugcaaaguccugcacuuagaaggcgaagucaacaaaaucaaauccgcccuacucuccacgaacaaagccgucgucucccuguccaacggugucuccguuuuaaccuucaaaguucuggaccucaaaaacuacauagacaaacagcuucuccccauccucaacaaacaauccuguagcaucuccaacaucgaaaccgucauagaauuucaacagaaaaacaacagacugcucgaaaucacccgcgaguucuccgucaacgccggcgucacgacucccgucuccaccuauaugcucacgaacucggaacuccuuucccuaaucaacgacaugccgaucaccaacgaccaaaagaaacucaugucaaacaacguacaaauuguccgccaacaaucauacuccaucaugugcauaauuaaagaagaaguccucgcauacguaguccaacucccccucuacggcgucaucgacacccccugcuggaaacuccacaccuccccacucugcacaaccaacaccaaagaaggcucaaacauaugccuaacgcgcaccgaucgcgguugguacugcgacaacgccgguuccgucagcuucuucccccaagcagagacaugcaaaguccaaucaaaccgcgucuucugcgacaccaugaacucacuaacccuuccaagcgaagucaaccucugcaacguugacaucuucaaccccaaauacgacuguaaaaucaugaccuccaagaccgacguauccucuuccgucaucacaucccuaggcgcuaucguauccugcuaugguaaaaccaaaugcaccgccuccaacaaaaaccgcggcaucaucaagacauuuuccaacggcugcgacuacgugagcaacaaaggcgucgacaccgucuccguaggcaacacccucuacuauguaaacaaacaagagggcaaaucacucuacgucaaaggggaacccaucaucaacuucuacgacccgcucguauuccccagcgaugaguucgacgccuccaucucccaggucaacgaaaagauaaaccaaucacucgcauucauucguaaauccgacgaacuccuacacaacgugaaugcaggcaaaucgaccacuaacaucaugaucaccaccaucaucaucgucaucauagucauccuccugucccuuaucgccgucggucuuuuauuauacugcaaagcccgcagcacccccgucacccucucuaaggaccaacucagcggcaucaauaacaucgcauucucuaacuaaggacuaguguccaccugucccuccugggcugcuggauugucucguuuuccugccaaauaaacaggaucagcgcuuuacagaucuaaaaaaaaaaaaaaaaaaaaaaaaaaaaaaaaaaaaaaaaaaaaaaaaaaaaaaaaaaaaaaaaugcaucccccccccccccccccccccccccccccccaaaggcucuuuucagagccaccagaauu

SEQ ID NO: 1243 - RNA, 2111 nt, Artificial Sequence
  mRNA product Design i-2 comprising derived and/or modified sequence from HRSV(A2)__F0_DSCav1 (opt1)
gggagaggcgcugccuacggagguggcagccaucuccuucucggcaucaagcuuaccauggagcugcucauccugaaggccaacgccaucaccaccauccugacggcggugaccuucugcuucgccagcggccagaacaucaccgaggaguucuaccaguccacgugcagcgccgucuccaagggguaccucagcgcccugcggaccggcugguacaccuccgugaucaccaucgagcugagcaacaucaaggagaacaagugcaacgggaccgacgccaaggugaagcucaucaagcaggagcuggacaaguacaagaacgcggucacggagcugcagcuccugaugcaguccaccccggcaaccaacaaccgcgcccggcgcgagcugccccgguucaugaacuacacccucaacaacgccaagaagacgaacgugacccugagcaagaagcgcaagcggcgcuuccugggcuuccuccugggggugggcuccgccaucgcgagcggcgucgccgugugcaaggugcugcaccucgagggggaggucaacaagaucaagagcgcccugcuguccaccaacaaggccguggugagccucuccaacggcgucagcgugcugaccuucaaggugcuggaccucaagaacuacaucgacaagcagcugcugcccauccugaacaagcagagcugcuccaucagcaacaucgagacggugaucgaguuccagcagaagaacaaccggcuccuggagaucacccgcgaguucagcgugaacgccggggucaccacccccguguccacguacaugcugaccaacagcgagcuccugucccugaucaacgacaugccgaucaccaacgaccagaagaagcucaugagcaacaacgugcagaucguccggcagcaguccuacagcaucaugugcaucaucaaggaggaggugcuggcguacgugguccagcugccccucuacggcgugaucgacacccccugcuggaagcugcacacgagcccccugugcaccaccaacaccaaggagggguccaacaucugccucacgcgcaccgaccggggcugguacugcgacaacgccggcagcgucuccuucuucccgcaggccgagaccugcaaggugcagagcaaccgcguguucugcgacaccaugaacucccugacgcugcccagcgagguaaaccucugcaacgucgacaucuucaaccccaaguacgacugcaagaucaugaccuccaagaccgacgugagcuccagcgugaucaccucccugggggccaucgucagcugcuacggcaagacgaagugcaccgccagcaacaagaaccgggggaucaucaagaccuucuccaacggcugcgacuacgugagcaacaagggcguggacaccguguccgucgggaacacccuguacuacgugaacaagcaggagggcaagagccucuacgugaagggggagcccaucaucaacuucuacgacccgcuggucuuccccuccgacgaguucgacgcgagcaucucccaggugaacgagaagaucaaccagagccuggccuucauccgcaaguccgacgagcugcuccacaacgugaacgccggcaagagcacgaccaacaucaugaucaccaccaucaucaucgucaucaucgugauccugcugucccucaucgccguggggcugcugcucuacugcaaggcccggagcacgcccgucacccuguccaaggaccagcugagcggcaucaacaacaucgcguucuccaacugaggacuagugcaucacauuuaaaagcaucucagccuaccaugagaauaagagaaagaaaaugaagaucaauagcuuauucaucucuuuuucuuuuucguugguguaaagccaacacccugucuaaaaaacauaaauuucuuuaaucauuuugccucuuuucucugugcuucaauuaauaaaaaauggaaagaaccuagaucuaaaaaaaaaaaaaaaaaaaaaaaaaaaaaaaaaaaaaaaaaaaaaaaaaaaaaaaaaaaaaaaaugcaucccccccccccccccccccccccccccccccaaaggcucuuuucagagccaccagaauu

SEQ ID NO: 1244 - RNA, 2111 nt, Artificial Sequence
  mRNA product Design i-2 comprising derived and/or modified sequence from HRSV(A2)__F0_DSCav1 (opt1)
gggagaggcgcugccuacggagguggcagccaucuccuucucggcaucaagcuuaccauggagcugcucauccugaaggccaacgccaucaccaccauccugacggcggugaccuucugcuucgccagcggccagaacaucaccgaggaguucuaccaguccacgugcagcgccgucuccaagggguaccucagcgcccugcgcaccggcugguacaccuccgugaucaccaucgagcugagcaacaucaaggagaacaagugcaacgggaccgacgccaaggugaagcucaucaagcaggagcuggacaaguacaagaacgcggucacggagcugcagcuccugaugcaguccacccccgccaccaacaaccgggcccgccgggagcugccgcgcuucaugaacuacacccucaacaacgccaagaagacgaacgugacccugagcaagaagcggaagcgccgguuccugggcuuccuccugggggugggcuccgcgaucgccagcggcgucgccgugugcaaggugcugcaccucgagggggaggucaacaagaucaaguccgcccugcugagcaccaacaaggccguggugucccucagcaacggcgucuccgugcugaccuucaaggugcuggaccucaagaacuacaucgacaagcagcugcugcccauccucaacaagcagagcugcuccaucagcaacaucgagacggucaucgaguuccagcagaagaacaaccgccugcuggagaucacccgggaguucuccgugaacgcgggggugaccacccccgucagcacguacaugcucaccaacagcgagcugcugucccucaucaacgacaugcccaucaccaacgaccagaagaagcugaugagcaacaacgugcagaucgugcgccagcaguccuacagcaucaugugcaucaucaaggaggagguccuggccuacguggugcagcucccgcuguacggcgucaucgacacccccugcuggaagcugcacacgagcccccucugcaccaccaacaccaaggaggggagcaacaucugccugacgcggaccgaccgcggcugguacugcgacaacgccggcuccgugagcuucuucccccaggccgagaccugcaagguccaguccaaccggguguucugcgacaccaugaacagccugacgcucccguccgaggugaaccugugcaacgucgacaucuucaaccccaaguacgacugcaagaucaugaccagcaagaccgacguguccagcuccgugaucaccagccugggggccaucgucuccugcuacggcaagacgaagugcaccgcgagcaacaagaaccgcgggaucaucaagaccuucuccaacggcugcgacuacgugagcaacaagggcguggacaccgucagcguggggaacacccucuacuacgugaacaagcaggagggcaagucccuguacgucaagggggagcccaucaucaacuucuacgacccccugguguucccgagcgacgaguucgacgccuccaucagccaggugaacgagaagaucaaccagucccucgccuucauccggaaguccgacgagcugcugcacaacgucaacgccggcaaguccacgaccaacaucaugaucaccaccaucaucaucgugaucaucgugauccugcucagccugaucgccgucgggcugcuccuguacugcaaggcgcgcuccacgcccgugacccugagcaaggaccagcucuccggcaucaacaacaucgccuucagcaacugaggacuagugcaucacauuuaaaagcaucucagccuaccaugagaauaagagaaagaaaaugaagaucaauagcuuauucaucucuuuuucuuuuucguugguguaaagccaacacccugucuaaaaaacauaaauuucuuuaaucauuuugccucuuuucucugugcuucaauuaauaaaaaauggaaagaaccuagaucuaaaaaaaaaaaaaaaaaaaaaaaaaaaaaaaaaaaaaaaaaaaaaaaaaaaaaaaaaaaaaaaaugcaucccccccccccccccccccccccccccccccaaaggcucuuuucagagccaccagaauu

SEQ ID NO: 1245 - RNA, 2111 nt, Artificial Sequence
  mRNA product Design i-2 comprising derived and/or modified sequence from HRSV(A2)__F0_DSCav1 (opt2)
gggagaggcgcugccuacggagguggcagccaucuccuucucggcaucaagcuuaccauggagcuccucauccucaaggccaacgccaucaccaccauccucaccgccgucaccuucugcuucgccuccggccagaacaucaccgaggaguucuaccaguccaccugcuccgccgucuccaagggcuaccucuccgcccuccgcaccggcugguacaccuccgucaucaccaucgagcucuccaacaucaaggagaacaagugcaacggcaccgacgccaaggucaagcucaucaagcaggagcucgacaaguacaagaacgccgucaccgagcuccagcuccucaugcaguccacccccgccaccaacaaccgcgcccgccgcgagcucccccgcuucaugaacuacacccucaacaacgccaagaagaccaacgucacccucuccaagaagcgcaagcgccgcuuccucggcuuccuccucggcgucggcuccgccaucgccuccggcgucgccgucugcaagguccuccaccucgagggcgaggucaacaagaucaaguccgcccuccucuccaccaacaaggccgucgucucccucuccaacggcgucuccguccucaccuucaagguccucgaccucaagaacuacaucgacaagcagcuccuccccauccucaacaagcaguccugcuccaucuccaacaucgagaccgucaucgaguuccagcagaagaacaaccgccuccucgagaucacccgcgaguucuccgucaacgccggcgucaccacccccgucuccaccuacaugcucaccaacuccgagcuccucucccucaucaacgacaugcccaucaccaacgaccagaagaagcucauguccaacaacguccagaucguccgccagcaguccuacuccaucaugugcaucaucaaggaggagguccucgccuacgucguccagcucccccucuacggcgucaucgacacccccugcuggaagcuccacaccuccccccucugcaccaccaacaccaaggagggcuccaacaucugccucacccgcaccgaccgcggcugguacugcgacaacgccggcuccgucuccuucuucccccaggccgagaccugcaagguccaguccaaccgcgucuucugcgacaccaugaacucccucacccuccccuccgaggucaaccucugcaacgucgacaucuucaaccccaaguacgacugcaagaucaugaccuccaagaccgacgucuccuccuccgucaucaccucccucggcgccaucgucuccugcuacggcaagaccaagugcaccgccuccaacaagaaccgcggcaucaucaagaccuucuccaacggcugcgacuacgucuccaacaagggcgucgacaccgucuccgucggcaacacccucuacuacgucaacaagcaggagggcaagucccucuacgucaagggcgagcccaucaucaacuucuacgacccccucgucuuccccuccgacgaguucgacgccuccaucucccaggucaacgagaagaucaaccagucccucgccuucauccgcaaguccgacgagcuccuccacaacgucaacgccggcaaguccaccaccaacaucaugaucaccaccaucaucaucgucaucaucgucauccuccucucccucaucgccgucggccuccuccucuacugcaaggcccgcuccacccccgucacccucuccaaggaccagcucuccggcaucaacaacaucgccuucuccaacugaggacuagugcaucacauuuaaaagcaucucagccuaccaugagaauaagagaaagaaaaugaagaucaauagcuuauucaucucuuuuucuuuuucguugguguaaagccaacacccugucuaaaaaacauaaauuucuuuaaucauuuugccucuuuucucugugcuucaauuaauaaaaaauggaaagaaccuagaucuaaaaaaaaaaaaaaaaaaaaaaaaaaaaaaaaaaaaaaaaaaaaaaaaaaaaaaaaaaaaaaaaugcaucccccccccccccccccccccccccccccccaaaggcucuuuucagagccaccagaauu

SEQ ID NO: 1246 - RNA, 2111 nt, Artificial Sequence
  mRNA product Design i-2 comprising derived and/or modified sequence from HRSV(A2)__F0_DSCav1 (opt3)
gggagaggcgcugccuacggagguggcagccaucuccuucucggcaucaagcuuaccauggagcugcucauccuuaaggccaacgcuauuaccacaauacugacugcagugacguucugcuuugccagcggccagaauaucaccgaagaguucuaccaauccacauguucugcggucucaaaaggguauuugagugcuuuaagaacuggaugguacaccagcguuauuacaaucgaacuguccaacauuaaggagaauaaaugcaacgguaccgacgccaaggugaaacuaaucaagcaggaacucgauaaguauaaaaaugcaguaacugagcugcagcuucugaugcagucuacacccgccaccaacaauagggcucggcgcgaguugccucgauuuaugaacuacacgcucaauaacgcaaagaaaacuaaugugacccugucgaagaaacguaagagaagguuccugggcuuucucuuaggggucggaucagccauagcuagcggcguggccguuuguaaggugcugcaccuugaaggugaggucaacaaaaucaagagugcguugcuguccacaaauaaagcagugguaucucuaagcaacgggguuuccgugcucacuuucaagguccuggaccuuaaaaauuauauugauaagcaacuguugccaauccucaacaaacagucaugcaguauuagcaacaucgaaaccgugauagaguuucagcagaagaauaaccggcuguuagagauuacacgcgaguucucugugaaugccggagucaccacgccgguuuccacuuacaugcugacaaacucagaacuccuuagccugaucaaugacaugcccauuaccaacgaucaaaagaaauugaugaguaauaacgugcagaucguaagacagcagucuuauuccaucauguguauuauaaaggaagaggugcuagcuuacgucgugcaacugccucucuacggcguuaucgacacuccaugcuggaaacugcauacaagcccccuuuguaccacgaauaccaaggaaggcucgaacauuugccugacaaggacugaucgggggugguauugugacaaugccggaucuguguccuuuuucccucaggcagagaccugcaaaguccagucaaaccgcguguuuugugauacaaugaauaguuugacucucccaagcgagguaaaccugugcaauguugacaucuucaaccccaaguacgauugcaagauaaugaccuccaaaacagacgugucuagcucagucauuaccaguuuaggugcuaucguguccuguuauggcaagacuaaaugcacggccagcaacaagaaucgagggaucauuaaaacauuuucuaacggaugugauuacgucucaaauaagggcguggacaccguuaguguggguaacacucuguauuacguaaauaagcaagaagggaaaagccuauaugucaagggagagccuaucauuaacuucuacgacccacucguguucccguccgaugaauuugacgcgucuauaucgcagguuaaugagaaaaucaaccagagccuggccuucauuagaaaguccgaugaacuuuugcacaaugugaacgcaggcaaaucaaccacaaauaucaugaucaccacuauuauaaucgucauuaucgugauucugcucagucugaucgcuguaggccuucuguuguacugcaaggccaggucuacacccgugacgcucagcaaggaccagcuguccgggauaaacaauaucgcuuuuucaaacugaggacuagugcaucacauuuaaaagcaucucagccuaccaugagaauaagagaaagaaaaugaagaucaauagcuuauucaucucuuuuucuuuuucguugguguaaagccaacacccugucuaaaaaacauaaauuucuuuaaucauuuugccucuuuucucugugcuucaauuaauaaaaaauggaaagaaccuagaucuaaaaaaaaaaaaaaaaaaaaaaaaaaaaaaaaaaaaaaaaaaaaaaaaaaaaaaaaaaaaaaaaugcaucccccccccccccccccccccccccccccccaaaggcucuuuucagagccaccagaauu

SEQ ID NO: 1247 - RNA, 2111 nt, Artificial Sequence
  mRNA product Design i-2 comprising derived and/or modified sequence from HRSV(A2)__F0_DSCav1 (opt4)
gggagaggcgcugccuacggagguggcagccaucuccuucucggcaucaagcuuaccauggagcugcugauccugaaggccaacgccaucaccaccauccugaccgccgugaccuucugcuucgccagcggccagaacaucaccgaggaguucuaccagagcaccugcagcgccgugagcaagggcuaccugagcgcccugagaaccggcugguacaccagcgugaucaccaucgagcugagcaacaucaaggagaacaagugcaacggcaccgacgccaaggugaagcugaucaagcaggagcuggacaaguacaagaacgccgugaccgagcugcagcugcugaugcagagcacccccgccaccaacaacagagccagaagagagcugcccagauucaugaacuacacccugaacaacgccaagaagaccaacgugacccugagcaagaagagaaagagaagauuccugggcuuccugcugggcgugggcagcgccaucgccagcggcguggccgugugcaaggugcugcaccuggagggcgaggugaacaagaucaagagcgcccugcugagcaccaacaaggccguggugagccugagcaacggcgugagcgugcugaccuucaaggugcuggaccugaagaacuacaucgacaagcagcugcugcccauccugaacaagcagagcugcagcaucagcaacaucgagaccgugaucgaguuccagcagaagaacaacagacugcuggagaucaccagagaguucagcgugaacgccggcgugaccacccccgugagcaccuacaugcugaccaacagcgagcugcugagccugaucaacgacaugcccaucaccaacgaccagaagaagcugaugagcaacaacgugcagaucgugagacagcagagcuacagcaucaugugcaucaucaaggaggaggugcuggccuacguggugcagcugccccuguacggcgugaucgacacccccugcuggaagcugcacaccagcccccugugcaccaccaacaccaaggagggcagcaacaucugccugaccagaaccgacagaggcugguacugcgacaacgccggcagcgugagcuucuucccccaggccgagaccugcaaggugcagagcaacagaguguucugcgacaccaugaacagccugacccugcccagcgaggugaaccugugcaacguggacaucuucaaccccaaguacgacugcaagaucaugaccagcaagaccgacgugagcagcagcgugaucaccagccugggcgccaucgugagcugcuacggcaagaccaagugcaccgccagcaacaagaacagaggcaucaucaagaccuucagcaacggcugcgacuacgugagcaacaagggcguggacaccgugagcgugggcaacacccuguacuacgugaacaagcaggagggcaagagccuguacgugaagggcgagcccaucaucaacuucuacgacccccugguguuccccagcgacgaguucgacgccagcaucagccaggugaacgagaagaucaaccagagccuggccuucaucagaaagagcgacgagcugcugcacaacgugaacgccggcaagagcaccaccaacaucaugaucaccaccaucaucaucgugaucaucgugauccugcugagccugaucgccgugggccugcugcuguacugcaaggccagaagcacccccgugacccugagcaaggaccagcugagcggcaucaacaacaucgccuucagcaacugaggacuagugcaucacauuuaaaagcaucucagccuaccaugagaauaagagaaagaaaaugaagaucaauagcuuauucaucucuuuuucuuuuucguugguguaaagccaacacccugucuaaaaaacauaaauuucuuuaaucauuuugccucuuuucucugugcuucaauuaauaaaaaauggaaagaaccuagaucuaaaaaaaaaaaaaaaaaaaaaaaaaaaaaaaaaaaaaaaaaaaaaaaaaaaaaaaaaaaaaaaaugcaucccccccccccccccccccccccccccccccaaaggcucuuuucagagccaccagaauu

SEQ ID NO: 1248 - RNA, 2111 nt, Artificial Sequence
  mRNA product Design i-2 comprising derived and/or modified sequence from HRSV(A2)__F0_DSCav1 (opt5)
gggagaggcgcugccuacggagguggcagccaucuccuucucggcaucaagcuuaccauggagcugcucauccugaaggccaacgcuauuaccacaauccuuacggccgugaccuucugcuuugcgagcggccagaauauuacagaagaguucuaccaauccaccuguucugcugucagcaaaggguaucuguccgcccucagaacaggaugguacaccucuguuaucacaauugaacugagcaacaucaaggagaauaaaugcaacggcaccgacgccaaggugaaacuuaucaagcaggaacuggauaaguauaaaaaugcugugacggagcuccagcugcugaugcaguccacccccgccacaaacaaucgggcucgcagagagcucccucgguuuaugaacuacacccugaauaacgccaagaaaacaaaugucacccuuucuaagaaacgcaagagacgguuccugggguuucuccugggagugggcagcgcgauugccuccgggguugcuguguguaagguccuucaccuggaaggagaggugaacaaaaucaagagcgcccuccugucuacgaauaaagcuguugugucccugagcaacggcgucucugugcucacauucaaggugcuggaccuuaaaaauuauauugauaagcaacugcucccgauccugaacaaacaguccugcagcauuucuaacaucgaaaccgucauugaguuucagcagaagaauaaccgccuucuggagaucacaagagaauuuuccguuaaugccggcgugaccacccccgugagcacauacaugcucacgaacuccgagcugcugucucucaucaaugacaugccuauuaccaacgaucaaaagaaacugaugagcaauaacguccagaucgugcggcagcaguccuauagcauuauguguaucauuaaggaagagguucuugcguacgugguccaacugccccucuacggggugaucgacacaccuugcuggaaacugcauaccucuccccuuuguacaaccaauacgaaggaaggauccaacaucugccugacacgcaccgauagaggcugguauugugacaaugccgggagcguuucuuucuucccucaggcugagaccugcaaagugcagagcaaccgggucuuuugugauacaaugaacucccucacccugccgucugaggugaaucugugcaaugucgacauuuucaaccccaaguacgauugcaagaucaugacaagcaaaacggacguguccagcucuguuauuaccucccucggagccaucgugagcuguuauggcaagacaaaaugcaccgcuucuaacaagaaucgcgggauuaucaaaacauuuuccaacggaugugauuacgucagcaauaagggcguggacaccguuuccgugggcaacacgcuguauuacgucaauaagcaagaagggaaaucucuuuaugugaagggagagccuaucauuaacuucuacgacccccugguguucccuagcgaugaauuugacgccuccaucucucagguuaaugagaaaauuaaccagagccucgccuucaucagaaaguccgaugaacugcugcacaaugucaacgcuggcaaaagcaccacaaauauuaugaucaccacaauuaucaucgugauuaucgugauucuucucucucugaucgcggucgggcugcuccuguacugcaaggcccgguccacccccgugacgcuuagcaaggaccagcugucuggaauuaacaauaucgcuuuuuccaacugaggacuagugcaucacauuuaaaagcaucucagccuaccaugagaauaagagaaagaaaaugaagaucaauagcuuauucaucucuuuuucuuuuucguugguguaaagccaacacccugucuaaaaaacauaaauuucuuuaaucauuuugccucuuuucucugugcuucaauuaauaaaaaauggaaagaaccuagaucuaaaaaaaaaaaaaaaaaaaaaaaaaaaaaaaaaaaaaaaaaaaaaaaaaaaaaaaaaaaaaaaaugcaucccccccccccccccccccccccccccccccaaaggcucuuuucagagccaccagaauu

SEQ ID NO: 1249 - RNA, 2111 nt, Artificial Sequence
  mRNA product Design i-2 comprising derived and/or modified sequence from HRSV(A2)__F0_DSCav1 (opt6)
gggagaggcgcugccuacggagguggcagccaucuccuucucggcaucaagcuuaccauggaauuauuaauccucaaagcgaacgcuauuacuaccauucuaacagcagucacauucugcuucgccucaggccaaaacauuacagaagaauuuuaccaaucaacaugcucugccguaucaaaaggcuaccuauccgcccuacgaacaggcugguacacaagcguaauaacaaucgaacuaucaaacauaaaagaaaacaaaugcaacgguacagacgccaaaguuaaacuaauaaaacaagaacucgauaaauacaaaaacgcaguaacagaauuacaacuacuaaugcaaucaacaccugcaacaaacaauagagccaggagagaauuaccucgauucaugaauuacacacucaauaacgcaaaaaaaaccaacguuacacuaucaaaaaaaagaaaacgacgauucuuaggauuccuacucggagucggaucagcaauagcaucuggcguugcaguaugcaaaguauuacacuuagaaggugaagucaauaaaauaaaaagcgcgcuacuaaguacaaacaaagcagucgucucccuaucaaacggagucucaguccuaacauucaaaguacucgaccuaaaaaauuacauagauaaacaacuacuuccaauauuaaacaaacaauccuguagcaucagcaauauagaaacaguaauagaauuucaacaaaaaaacaaccgauuauuagaaaucacucgagaauuuuccguaaacgccgggguaacaacuccagucucaaccuacaugcuaaccaauucagaacuauugagcuuaauaaacgacaugccaauaaccaacgaccaaaaaaaacuaaugucuaacaauguucaaaucgucagacaacaaaguuacaguauaauguguauaaucaaagaagaaguccuagcauacguaguccaacucccacuauauggaguuaucgacacaccauguuggaaauuacacaccucaccauuaugcacaaccaauacaaaagaaggaucaaacauaugccuuacacggacagaccgcggaugguauugugacaacgcuggcucagucuccuuuuucccacaagcagaaacaugcaaaguacaaucaaacagagucuuuugcgauaccaugaacucacuuacauuaccaagcgaaguaaaucuuuguaacgucgacaucuucaauccuaaauaugacugcaaaaucaugaccucaaaaacagacguuagcucuucaguaaucacuagcuuaggagcaaucguaucaugcuacggcaaaacaaaauguacagcaucaaauaaaaacagaggaaucauaaaaacauuuucaaacggaugcgauuauguaagcaacaaaggaguagauacuguaagcguaggaaacacauuguacuauguaaacaaacaagaaggaaaaucacucuauguaaaaggagaaccuauaaucaauuucuacgauccauuaguguucccaucagaugaauuugacgccucaauaucacaaguuaaugaaaaaauaaaucaaucgcuagcauucauacguaaaucagaugaauuacuacauaacguaaacgcaggcaaauccacaacaaauaucaugaucacaacaauuauaauaguaauaauaguaauacuacuaucacuaauagccguaggacuccuacuauacugcaaagcaagaucuacuccaguaacccucucaaaagaucaacuaagcggaauuaauaacaucgcauucagcaacuaaggacuagugcaucacauuuaaaagcaucucagccuaccaugagaauaagagaaagaaaaugaagaucaauagcuuauucaucucuuuuucuuuuucguugguguaaagccaacacccugucuaaaaaacauaaauuucuuuaaucauuuugccucuuuucucugugcuucaauuaauaaaaaauggaaagaaccuagaucuaaaaaaaaaaaaaaaaaaaaaaaaaaaaaaaaaaaaaaaaaaaaaaaaaaaaaaaaaaaaaaaaugcaucccccccccccccccccccccccccccccccaaaggcucuuuucagagccaccagaauu

SEQ ID NO: 1250 - RNA, 2111 nt, Artificial Sequence
  mRNA product Design i-2 comprising derived and/or modified sequence from HRSV(A2)__F0_DSCav1 (opt11)
gggagaggcgcugccuacggagguggcagccaucuccuucucggcaucaagcuuaccauggaacuacuuauccucaaagccaacgccaucaccaccauccucacagcaguaaccuuuugcuucgccucaggccaaaauaucacagaagaauuuuaccagaguaccugcuccgccguauccaaaggauaccucagcgcgcuccgcaccggcugguacacuucaguaaucacaaucgaacuauccaacaucaaagaaaacaaaugcaacggcaccgacgcgaaagucaaacucaucaaacaagaacuagacaaauacaaaaaugccguaacagaacuacaacuguuaaugcagagcacacccgccaccaacaaccgcgcccgccgggaacucccccgauucaugaacuacacacucaacaacgccaaaaagacgaacgucacccucagcaagaaacgaaaacgcagauuccucgguuuccuacuaggcguaggcucagcaauagccuccggaguagccgucugcaaaguccugcacuuagaaggcgaagucaacaaaaucaaauccgcccuacucuccacgaacaaagccgucgucucccuguccaacggugucuccguuuuaaccuucaaaguucuggaccucaaaaacuacauagacaaacagcuucuccccauccucaacaaacaauccuguagcaucuccaacaucgaaaccgucauagaauuucaacagaaaaacaacagacugcucgaaaucacccgcgaguucuccgucaacgccggcgucacgacucccgucuccaccuauaugcucacgaacucggaacuccuuucccuaaucaacgacaugccgaucaccaacgaccaaaagaaacucaugucaaacaacguacaaauuguccgccaacaaucauacuccaucaugugcauaauuaaagaagaaguccucgcauacguaguccaacucccccucuacggcgucaucgacacccccugcuggaaacuccacaccuccccacucugcacaaccaacaccaaagaaggcucaaacauaugccuaacgcgcaccgaucgcgguugguacugcgacaacgccgguuccgucagcuucuucccccaagcagagacaugcaaaguccaaucaaaccgcgucuucugcgacaccaugaacucacuaacccuuccaagcgaagucaaccucugcaacguugacaucuucaaccccaaauacgacuguaaaaucaugaccuccaagaccgacguauccucuuccgucaucacaucccuaggcgcuaucguauccugcuaugguaaaaccaaaugcaccgccuccaacaaaaaccgcggcaucaucaagacauuuuccaacggcugcgacuacgugagcaacaaaggcgucgacaccgucuccguaggcaacacccucuacuauguaaacaaacaagagggcaaaucacucuacgucaaaggggaacccaucaucaacuucuacgacccgcucguauuccccagcgaugaguucgacgccuccaucucccaggucaacgaaaagauaaaccaaucacucgcauucauucguaaauccgacgaacuccuacacaacgugaaugcaggcaaaucgaccacuaacaucaugaucaccaccaucaucaucgucaucauagucauccuccugucccuuaucgccgucggucuuuuauuauacugcaaagcccgcagcacccccgucacccucucuaaggaccaacucagcggcaucaauaacaucgcauucucuaacuaaggacuagugcaucacauuuaaaagcaucucagccuaccaugagaauaagagaaagaaaaugaagaucaauagcuuauucaucucuuuuucuuuuucguugguguaaagccaacacccugucuaaaaaacauaaauuucuuuaaucauuuugccucuuuucucugugcuucaauuaauaaaaaauggaaagaaccuagaucuaaaaaaaaaaaaaaaaaaaaaaaaaaaaaaaaaaaaaaaaaaaaaaaaaaaaaaaaaaaaaaaaugcaucccccccccccccccccccccccccccccccaaaggcucuuuucagagccaccagaauu

SEQ ID NO: 1251 - RNA, 2107 nt, Artificial Sequence
  mRNA product Design i-2 comprising derived and/or modified sequence from HRSV(A2)__F0_DSCav1 (opt1)
ggggcgcugccuacggagguggcagccaucuccuucucggcaucaagcuuaccauggagcugcucauccugaaggccaacgccaucaccaccauccugacggcggugaccuucugcuucgccagcggccagaacaucaccgaggaguucuaccaguccacgugcagcgccgucuccaagggguaccucagcgcccugcggaccggcugguacaccuccgugaucaccaucgagcugagcaacaucaaggagaacaagugcaacgggaccgacgccaaggugaagcucaucaagcaggagcuggacaaguacaagaacgcggucacggagcugcagcuccugaugcaguccaccccggcaaccaacaaccgcgcccggcgcgagcugccccgguucaugaacuacacccucaacaacgccaagaagacgaacgugacccugagcaagaagcgcaagcggcgcuuccugggcuuccuccugggggugggcuccgccaucgcgagcggcgucgccgugugcaaggugcugcaccucgagggggaggucaacaagaucaagagcgcccugcuguccaccaacaaggccguggugagccucuccaacggcgucagcgugcugaccuucaaggugcuggaccucaagaacuacaucgacaagcagcugcugcccauccugaacaagcagagcugcuccaucagcaacaucgagacggugaucgaguuccagcagaagaacaaccggcuccuggagaucacccgcgaguucagcgugaacgccggggucaccacccccguguccacguacaugcugaccaacagcgagcuccugucccugaucaacgacaugccgaucaccaacgaccagaagaagcucaugagcaacaacgugcagaucguccggcagcaguccuacagcaucaugugcaucaucaaggaggaggugcuggcguacgugguccagcugccccucuacggcgugaucgacacccccugcuggaagcugcacacgagcccccugugcaccaccaacaccaaggagggguccaacaucugccucacgcgcaccgaccggggcugguacugcgacaacgccggcagcgucuccuucuucccgcaggccgagaccugcaaggugcagagcaaccgcguguucugcgacaccaugaacucccugacgcugcccagcgagguaaaccucugcaacgucgacaucuucaaccccaaguacgacugcaagaucaugaccuccaagaccgacgugagcuccagcgugaucaccucccugggggccaucgucagcugcuacggcaagacgaagugcaccgccagcaacaagaaccgggggaucaucaagaccuucuccaacggcugcgacuacgugagcaacaagggcguggacaccguguccgucgggaacacccuguacuacgugaacaagcaggagggcaagagccucuacgugaagggggagcccaucaucaacuucuacgacccgcuggucuuccccuccgacgaguucgacgcgagcaucucccaggugaacgagaagaucaaccagagccuggccuucauccgcaaguccgacgagcugcuccacaacgugaacgccggcaagagcacgaccaacaucaugaucaccaccaucaucaucgucaucaucgugauccugcugucccucaucgccguggggcugcugcucuacugcaaggcccggagcacgcccgucacccuguccaaggaccagcugagcggcaucaacaacaucgcguucuccaacugaggacuagugcaucacauuuaaaagcaucucagccuaccaugagaauaagagaaagaaaaugaagaucaauagcuuauucaucucuuuuucuuuuucguugguguaaagccaacacccugucuaaaaaacauaaauuucuuuaaucauuuugccucuuuucucugugcuucaauuaauaaaaaauggaaagaaccuagaucuaaaaaaaaaaaaaaaaaaaaaaaaaaaaaaaaaaaaaaaaaaaaaaaaaaaaaaaaaaaaaaaaugcaucccccccccccccccccccccccccccccccaaaggcucuuuucagagccaccagaauu

SEQ ID NO: 1252 - RNA, 2107 nt, Artificial Sequence
  mRNA product Design i-2 comprising derived and/or modified sequence from HRSV(A2)__F0_DSCav1 (opt1)
ggggcgcugccuacggagguggcagccaucuccuucucggcaucaagcuuaccauggagcugcucauccugaaggccaacgccaucaccaccauccugacggcggugaccuucugcuucgccagcggccagaacaucaccgaggaguucuaccaguccacgugcagcgccgucuccaagggguaccucagcgcccugcgcaccggcugguacaccuccgugaucaccaucgagcugagcaacaucaaggagaacaagugcaacgggaccgacgccaaggugaagcucaucaagcaggagcuggacaaguacaagaacgcggucacggagcugcagcuccugaugcaguccacccccgccaccaacaaccgggcccgccgggagcugccgcgcuucaugaacuacacccucaacaacgccaagaagacgaacgugacccugagcaagaagcggaagcgccgguuccugggcuuccuccugggggugggcuccgcgaucgccagcggcgucgccgugugcaaggugcugcaccucgagggggaggucaacaagaucaaguccgcccugcugagcaccaacaaggccguggugucccucagcaacggcgucuccgugcugaccuucaaggugcuggaccucaagaacuacaucgacaagcagcugcugcccauccucaacaagcagagcugcuccaucagcaacaucgagacggucaucgaguuccagcagaagaacaaccgccugcuggagaucacccgggaguucuccgugaacgcgggggugaccacccccgucagcacguacaugcucaccaacagcgagcugcugucccucaucaacgacaugcccaucaccaacgaccagaagaagcugaugagcaacaacgugcagaucgugcgccagcaguccuacagcaucaugugcaucaucaaggaggagguccuggccuacguggugcagcucccgcuguacggcgucaucgacacccccugcuggaagcugcacacgagcccccucugcaccaccaacaccaaggaggggagcaacaucugccugacgcggaccgaccgcggcugguacugcgacaacgccggcuccgugagcuucuucccccaggccgagaccugcaagguccaguccaaccggguguucugcgacaccaugaacagccugacgcucccguccgaggugaaccugugcaacgucgacaucuucaaccccaaguacgacugcaagaucaugaccagcaagaccgacguguccagcuccgugaucaccagccugggggccaucgucuccugcuacggcaagacgaagugcaccgcgagcaacaagaaccgcgggaucaucaagaccuucuccaacggcugcgacuacgugagcaacaagggcguggacaccgucagcguggggaacacccucuacuacgugaacaagcaggagggcaagucccuguacgucaagggggagcccaucaucaacuucuacgacccccugguguucccgagcgacgaguucgacgccuccaucagccaggugaacgagaagaucaaccagucccucgccuucauccggaaguccgacgagcugcugcacaacgucaacgccggcaaguccacgaccaacaucaugaucaccaccaucaucaucgugaucaucgugauccugcucagccugaucgccgucgggcugcuccuguacugcaaggcgcgcuccacgcccgugacccugagcaaggaccagcucuccggcaucaacaacaucgccuucagcaacugaggacuagugcaucacauuuaaaagcaucucagccuaccaugagaauaagagaaagaaaaugaagaucaauagcuuauucaucucuuuuucuuuuucguugguguaaagccaacacccugucuaaaaaacauaaauuucuuuaaucauuuugccucuuuucucugugcuucaauuaauaaaaaauggaaagaaccuagaucuaaaaaaaaaaaaaaaaaaaaaaaaaaaaaaaaaaaaaaaaaaaaaaaaaaaaaaaaaaaaaaaaugcaucccccccccccccccccccccccccccccccaaaggcucuuuucagagccaccagaauu

SEQ ID NO: 1253 - RNA, 2107 nt, Artificial Sequence
  mRNA product Design i-2 comprising derived and/or modified sequence from HRSV(A2)__F0_DSCav1 (opt2)
ggggcgcugccuacggagguggcagccaucuccuucucggcaucaagcuuaccauggagcuccucauccucaaggccaacgccaucaccaccauccucaccgccgucaccuucugcuucgccuccggccagaacaucaccgaggaguucuaccaguccaccugcuccgccgucuccaagggcuaccucuccgcccuccgcaccggcugguacaccuccgucaucaccaucgagcucuccaacaucaaggagaacaagugcaacggcaccgacgccaaggucaagcucaucaagcaggagcucgacaaguacaagaacgccgucaccgagcuccagcuccucaugcaguccacccccgccaccaacaaccgcgcccgccgcgagcucccccgcuucaugaacuacacccucaacaacgccaagaagaccaacgucacccucuccaagaagcgcaagcgccgcuuccucggcuuccuccucggcgucggcuccgccaucgccuccggcgucgccgucugcaagguccuccaccucgagggcgaggucaacaagaucaaguccgcccuccucuccaccaacaaggccgucgucucccucuccaacggcgucuccguccucaccuucaagguccucgaccucaagaacuacaucgacaagcagcuccuccccauccucaacaagcaguccugcuccaucuccaacaucgagaccgucaucgaguuccagcagaagaacaaccgccuccucgagaucacccgcgaguucuccgucaacgccggcgucaccacccccgucuccaccuacaugcucaccaacuccgagcuccucucccucaucaacgacaugcccaucaccaacgaccagaagaagcucauguccaacaacguccagaucguccgccagcaguccuacuccaucaugugcaucaucaaggaggagguccucgccuacgucguccagcucccccucuacggcgucaucgacacccccugcuggaagcuccacaccuccccccucugcaccaccaacaccaaggagggcuccaacaucugccucacccgcaccgaccgcggcugguacugcgacaacgccggcuccgucuccuucuucccccaggccgagaccugcaagguccaguccaaccgcgucuucugcgacaccaugaacucccucacccuccccuccgaggucaaccucugcaacgucgacaucuucaaccccaaguacgacugcaagaucaugaccuccaagaccgacgucuccuccuccgucaucaccucccucggcgccaucgucuccugcuacggcaagaccaagugcaccgccuccaacaagaaccgcggcaucaucaagaccuucuccaacggcugcgacuacgucuccaacaagggcgucgacaccgucuccgucggcaacacccucuacuacgucaacaagcaggagggcaagucccucuacgucaagggcgagcccaucaucaacuucuacgacccccucgucuuccccuccgacgaguucgacgccuccaucucccaggucaacgagaagaucaaccagucccucgccuucauccgcaaguccgacgagcuccuccacaacgucaacgccggcaaguccaccaccaacaucaugaucaccaccaucaucaucgucaucaucgucauccuccucucccucaucgccgucggccuccuccucuacugcaaggcccgcuccacccccgucacccucuccaaggaccagcucuccggcaucaacaacaucgccuucuccaacugaggacuagugcaucacauuuaaaagcaucucagccuaccaugagaauaagagaaagaaaaugaagaucaauagcuuauucaucucuuuuucuuuuucguugguguaaagccaacacccugucuaaaaaacauaaauuucuuuaaucauuuugccucuuuucucugugcuucaauuaauaaaaaauggaaagaaccuagaucuaaaaaaaaaaaaaaaaaaaaaaaaaaaaaaaaaaaaaaaaaaaaaaaaaaaaaaaaaaaaaaaaugcaucccccccccccccccccccccccccccccccaaaggcucuuuucagagccaccagaauu

SEQ ID NO: 1254 - RNA, 2107 nt, Artificial Sequence
  mRNA product Design i-2 comprising derived and/or modified sequence from HRSV(A2)__F0_DSCav1 (opt3)
ggggcgcugccuacggagguggcagccaucuccuucucggcaucaagcuuaccauggagcugcucauccuuaaggccaacgcuauuaccacaauacugacugcagugacguucugcuuugccagcggccagaauaucaccgaagaguucuaccaauccacauguucugcggucucaaaaggguauuugagugcuuuaagaacuggaugguacaccagcguuauuacaaucgaacuguccaacauuaaggagaauaaaugcaacgguaccgacgccaaggugaaacuaaucaagcaggaacucgauaaguauaaaaaugcaguaacugagcugcagcuucugaugcagucuacacccgccaccaacaauagggcucggcgcgaguugccucgauuuaugaacuacacgcucaauaacgcaaagaaaacuaaugugacccugucgaagaaacguaagagaagguuccugggcuuucucuuaggggucggaucagccauagcuagcggcguggccguuuguaaggugcugcaccuugaaggugaggucaacaaaaucaagagugcguugcuguccacaaauaaagcagugguaucucuaagcaacgggguuuccgugcucacuuucaagguccuggaccuuaaaaauuauauugauaagcaacuguugccaauccucaacaaacagucaugcaguauuagcaacaucgaaaccgugauagaguuucagcagaagaauaaccggcuguuagagauuacacgcgaguucucugugaaugccggagucaccacgccgguuuccacuuacaugcugacaaacucagaacuccuuagccugaucaaugacaugcccauuaccaacgaucaaaagaaauugaugaguaauaacgugcagaucguaagacagcagucuuauuccaucauguguauuauaaaggaagaggugcuagcuuacgucgugcaacugccucucuacggcguuaucgacacuccaugcuggaaacugcauacaagcccccuuuguaccacgaauaccaaggaaggcucgaacauuugccugacaaggacugaucgggggugguauugugacaaugccggaucuguguccuuuuucccucaggcagagaccugcaaaguccagucaaaccgcguguuuugugauacaaugaauaguuugacucucccaagcgagguaaaccugugcaauguugacaucuucaaccccaaguacgauugcaagauaaugaccuccaaaacagacgugucuagcucagucauuaccaguuuaggugcuaucguguccuguuauggcaagacuaaaugcacggccagcaacaagaaucgagggaucauuaaaacauuuucuaacggaugugauuacgucucaaauaagggcguggacaccguuaguguggguaacacucuguauuacguaaauaagcaagaagggaaaagccuauaugucaagggagagccuaucauuaacuucuacgacccacucguguucccguccgaugaauuugacgcgucuauaucgcagguuaaugagaaaaucaaccagagccuggccuucauuagaaaguccgaugaacuuuugcacaaugugaacgcaggcaaaucaaccacaaauaucaugaucaccacuauuauaaucgucauuaucgugauucugcucagucugaucgcuguaggccuucuguuguacugcaaggccaggucuacacccgugacgcucagcaaggaccagcuguccgggauaaacaauaucgcuuuuucaaacugaggacuagugcaucacauuuaaaagcaucucagccuaccaugagaauaagagaaagaaaaugaagaucaauagcuuauucaucucuuuuucuuuuucguugguguaaagccaacacccugucuaaaaaacauaaauuucuuuaaucauuuugccucuuuucucugugcuucaauuaauaaaaaauggaaagaaccuagaucuaaaaaaaaaaaaaaaaaaaaaaaaaaaaaaaaaaaaaaaaaaaaaaaaaaaaaaaaaaaaaaaaugcaucccccccccccccccccccccccccccccccaaaggcucuuuucagagccaccagaauu

SEQ ID NO: 1255 - RNA, 2107 nt, Artificial Sequence
  mRNA product Design i-2 comprising derived and/or modified sequence from HRSV(A2)__F0_DSCav1 (opt4)
ggggcgcugccuacggagguggcagccaucuccuucucggcaucaagcuuaccauggagcugcugauccugaaggccaacgccaucaccaccauccugaccgccgugaccuucugcuucgccagcggccagaacaucaccgaggaguucuaccagagcaccugcagcgccgugagcaagggcuaccugagcgcccugagaaccggcugguacaccagcgugaucaccaucgagcugagcaacaucaaggagaacaagugcaacggcaccgacgccaaggugaagcugaucaagcaggagcuggacaaguacaagaacgccgugaccgagcugcagcugcugaugcagagcacccccgccaccaacaacagagccagaagagagcugcccagauucaugaacuacacccugaacaacgccaagaagaccaacgugacccugagcaagaagagaaagagaagauuccugggcuuccugcugggcgugggcagcgccaucgccagcggcguggccgugugcaaggugcugcaccuggagggcgaggugaacaagaucaagagcgcccugcugagcaccaacaaggccguggugagccugagcaacggcgugagcgugcugaccuucaaggugcuggaccugaagaacuacaucgacaagcagcugcugcccauccugaacaagcagagcugcagcaucagcaacaucgagaccgugaucgaguuccagcagaagaacaacagacugcuggagaucaccagagaguucagcgugaacgccggcgugaccacccccgugagcaccuacaugcugaccaacagcgagcugcugagccugaucaacgacaugcccaucaccaacgaccagaagaagcugaugagcaacaacgugcagaucgugagacagcagagcuacagcaucaugugcaucaucaaggaggaggugcuggccuacguggugcagcugccccuguacggcgugaucgacacccccugcuggaagcugcacaccagcccccugugcaccaccaacaccaaggagggcagcaacaucugccugaccagaaccgacagaggcugguacugcgacaacgccggcagcgugagcuucuucccccaggccgagaccugcaaggugcagagcaacagaguguucugcgacaccaugaacagccugacccugcccagcgaggugaaccugugcaacguggacaucuucaaccccaaguacgacugcaagaucaugaccagcaagaccgacgugagcagcagcgugaucaccagccugggcgccaucgugagcugcuacggcaagaccaagugcaccgccagcaacaagaacagaggcaucaucaagaccuucagcaacggcugcgacuacgugagcaacaagggcguggacaccgugagcgugggcaacacccuguacuacgugaacaagcaggagggcaagagccuguacgugaagggcgagcccaucaucaacuucuacgacccccugguguuccccagcgacgaguucgacgccagcaucagccaggugaacgagaagaucaaccagagccuggccuucaucagaaagagcgacgagcugcugcacaacgugaacgccggcaagagcaccaccaacaucaugaucaccaccaucaucaucgugaucaucgugauccugcugagccugaucgccgugggccugcugcuguacugcaaggccagaagcacccccgugacccugagcaaggaccagcugagcggcaucaacaacaucgccuucagcaacugaggacuagugcaucacauuuaaaagcaucucagccuaccaugagaauaagagaaagaaaaugaagaucaauagcuuauucaucucuuuuucuuuuucguugguguaaagccaacacccugucuaaaaaacauaaauuucuuuaaucauuuugccucuuuucucugugcuucaauuaauaaaaaauggaaagaaccuagaucuaaaaaaaaaaaaaaaaaaaaaaaaaaaaaaaaaaaaaaaaaaaaaaaaaaaaaaaaaaaaaaaaugcaucccccccccccccccccccccccccccccccaaaggcucuuuucagagccaccagaauu

SEQ ID NO: 1256 - RNA, 2107 nt, Artificial Sequence
  mRNA product Design i-2 comprising derived and/or modified sequence from HRSV(A2)__F0_DSCav1 (opt5)
ggggcgcugccuacggagguggcagccaucuccuucucggcaucaagcuuaccauggagcugcucauccugaaggccaacgcuauuaccacaauccuuacggccgugaccuucugcuuugcgagcggccagaauauuacagaagaguucuaccaauccaccuguucugcugucagcaaaggguaucuguccgcccucagaacaggaugguacaccucuguuaucacaauugaacugagcaacaucaaggagaauaaaugcaacggcaccgacgccaaggugaaacuuaucaagcaggaacuggauaaguauaaaaaugcugugacggagcuccagcugcugaugcaguccacccccgccacaaacaaucgggcucgcagagagcucccucgguuuaugaacuacacccugaauaacgccaagaaaacaaaugucacccuuucuaagaaacgcaagagacgguuccugggguuucuccugggagugggcagcgcgauugccuccgggguugcuguguguaagguccuucaccuggaaggagaggugaacaaaaucaagagcgcccuccugucuacgaauaaagcuguugugucccugagcaacggcgucucugugcucacauucaaggugcuggaccuuaaaaauuauauugauaagcaacugcucccgauccugaacaaacaguccugcagcauuucuaacaucgaaaccgucauugaguuucagcagaagaauaaccgccuucuggagaucacaagagaauuuuccguuaaugccggcgugaccacccccgugagcacauacaugcucacgaacuccgagcugcugucucucaucaaugacaugccuauuaccaacgaucaaaagaaacugaugagcaauaacguccagaucgugcggcagcaguccuauagcauuauguguaucauuaaggaagagguucuugcguacgugguccaacugccccucuacggggugaucgacacaccuugcuggaaacugcauaccucuccccuuuguacaaccaauacgaaggaaggauccaacaucugccugacacgcaccgauagaggcugguauugugacaaugccgggagcguuucuuucuucccucaggcugagaccugcaaagugcagagcaaccgggucuuuugugauacaaugaacucccucacccugccgucugaggugaaucugugcaaugucgacauuuucaaccccaaguacgauugcaagaucaugacaagcaaaacggacguguccagcucuguuauuaccucccucggagccaucgugagcuguuauggcaagacaaaaugcaccgcuucuaacaagaaucgcgggauuaucaaaacauuuuccaacggaugugauuacgucagcaauaagggcguggacaccguuuccgugggcaacacgcuguauuacgucaauaagcaagaagggaaaucucuuuaugugaagggagagccuaucauuaacuucuacgacccccugguguucccuagcgaugaauuugacgccuccaucucucagguuaaugagaaaauuaaccagagccucgccuucaucagaaaguccgaugaacugcugcacaaugucaacgcuggcaaaagcaccacaaauauuaugaucaccacaauuaucaucgugauuaucgugauucuucucucucugaucgcggucgggcugcuccuguacugcaaggcccgguccacccccgugacgcuuagcaaggaccagcugucuggaauuaacaauaucgcuuuuuccaacugaggacuagugcaucacauuuaaaagcaucucagccuaccaugagaauaagagaaagaaaaugaagaucaauagcuuauucaucucuuuuucuuuuucguugguguaaagccaacacccugucuaaaaaacauaaauuucuuuaaucauuuugccucuuuucucugugcuucaauuaauaaaaaauggaaagaaccuagaucuaaaaaaaaaaaaaaaaaaaaaaaaaaaaaaaaaaaaaaaaaaaaaaaaaaaaaaaaaaaaaaaaugcaucccccccccccccccccccccccccccccccaaaggcucuuuucagagccaccagaauu

SEQ ID NO: 1257 - RNA, 2107 nt, Artificial Sequence
  mRNA product Design i-2 comprising derived and/or modified sequence from HRSV(A2)__F0_DSCav1 (opt6)
ggggcgcugccuacggagguggcagccaucuccuucucggcaucaagcuuaccauggaauuauuaauccucaaagcgaacgcuauuacuaccauucuaacagcagucacauucugcuucgccucaggccaaaacauuacagaagaauuuuaccaaucaacaugcucugccguaucaaaaggcuaccuauccgcccuacgaacaggcugguacacaagcguaauaacaaucgaacuaucaaacauaaaagaaaacaaaugcaacgguacagacgccaaaguuaaacuaauaaaacaagaacucgauaaauacaaaaacgcaguaacagaauuacaacuacuaaugcaaucaacaccugcaacaaacaauagagccaggagagaauuaccucgauucaugaauuacacacucaauaacgcaaaaaaaaccaacguuacacuaucaaaaaaaagaaaacgacgauucuuaggauuccuacucggagucggaucagcaauagcaucuggcguugcaguaugcaaaguauuacacuuagaaggugaagucaauaaaauaaaaagcgcgcuacuaaguacaaacaaagcagucgucucccuaucaaacggagucucaguccuaacauucaaaguacucgaccuaaaaaauuacauagauaaacaacuacuuccaauauuaaacaaacaauccuguagcaucagcaauauagaaacaguaauagaauuucaacaaaaaaacaaccgauuauuagaaaucacucgagaauuuuccguaaacgccgggguaacaacuccagucucaaccuacaugcuaaccaauucagaacuauugagcuuaauaaacgacaugccaauaaccaacgaccaaaaaaaacuaaugucuaacaauguucaaaucgucagacaacaaaguuacaguauaauguguauaaucaaagaagaaguccuagcauacguaguccaacucccacuauauggaguuaucgacacaccauguuggaaauuacacaccucaccauuaugcacaaccaauacaaaagaaggaucaaacauaugccuuacacggacagaccgcggaugguauugugacaacgcuggcucagucuccuuuuucccacaagcagaaacaugcaaaguacaaucaaacagagucuuuugcgauaccaugaacucacuuacauuaccaagcgaaguaaaucuuuguaacgucgacaucuucaauccuaaauaugacugcaaaaucaugaccucaaaaacagacguuagcucuucaguaaucacuagcuuaggagcaaucguaucaugcuacggcaaaacaaaauguacagcaucaaauaaaaacagaggaaucauaaaaacauuuucaaacggaugcgauuauguaagcaacaaaggaguagauacuguaagcguaggaaacacauuguacuauguaaacaaacaagaaggaaaaucacucuauguaaaaggagaaccuauaaucaauuucuacgauccauuaguguucccaucagaugaauuugacgccucaauaucacaaguuaaugaaaaaauaaaucaaucgcuagcauucauacguaaaucagaugaauuacuacauaacguaaacgcaggcaaauccacaacaaauaucaugaucacaacaauuauaauaguaauaauaguaauacuacuaucacuaauagccguaggacuccuacuauacugcaaagcaagaucuacuccaguaacccucucaaaagaucaacuaagcggaauuaauaacaucgcauucagcaacuaaggacuagugcaucacauuuaaaagcaucucagccuaccaugagaauaagagaaagaaaaugaagaucaauagcuuauucaucucuuuuucuuuuucguugguguaaagccaacacccugucuaaaaaacauaaauuucuuuaaucauuuugccucuuuucucugugcuucaauuaauaaaaaauggaaagaaccuagaucuaaaaaaaaaaaaaaaaaaaaaaaaaaaaaaaaaaaaaaaaaaaaaaaaaaaaaaaaaaaaaaaaugcaucccccccccccccccccccccccccccccccaaaggcucuuuucagagccaccagaauu

SEQ ID NO: 1258 - RNA, 2107 nt, Artificial Sequence
  mRNA product Design i-2 comprising derived and/or modified sequence from HRSV(A2)__F0_DSCav1 (opt11)
ggggcgcugccuacggagguggcagccaucuccuucucggcaucaagcuuaccauggaacuacuuauccucaaagccaacgccaucaccaccauccucacagcaguaaccuuuugcuucgccucaggccaaaauaucacagaagaauuuuaccagaguaccugcuccgccguauccaaaggauaccucagcgcgcuccgcaccggcugguacacuucaguaaucacaaucgaacuauccaacaucaaagaaaacaaaugcaacggcaccgacgcgaaagucaaacucaucaaacaagaacuagacaaauacaaaaaugccguaacagaacuacaacuguuaaugcagagcacacccgccaccaacaaccgcgcccgccgggaacucccccgauucaugaacuacacacucaacaacgccaaaaagacgaacgucacccucagcaagaaacgaaaacgcagauuccucgguuuccuacuaggcguaggcucagcaauagccuccggaguagccgucugcaaaguccugcacuuagaaggcgaagucaacaaaaucaaauccgcccuacucuccacgaacaaagccgucgucucccuguccaacggugucuccguuuuaaccuucaaaguucuggaccucaaaaacuacauagacaaacagcuucuccccauccucaacaaacaauccuguagcaucuccaacaucgaaaccgucauagaauuucaacagaaaaacaacagacugcucgaaaucacccgcgaguucuccgucaacgccggcgucacgacucccgucuccaccuauaugcucacgaacucggaacuccuuucccuaaucaacgacaugccgaucaccaacgaccaaaagaaacucaugucaaacaacguacaaauuguccgccaacaaucauacuccaucaugugcauaauuaaagaagaaguccucgcauacguaguccaacucccccucuacggcgucaucgacacccccugcuggaaacuccacaccuccccacucugcacaaccaacaccaaagaaggcucaaacauaugccuaacgcgcaccgaucgcgguugguacugcgacaacgccgguuccgucagcuucuucccccaagcagagacaugcaaaguccaaucaaaccgcgucuucugcgacaccaugaacucacuaacccuuccaagcgaagucaaccucugcaacguugacaucuucaaccccaaauacgacuguaaaaucaugaccuccaagaccgacguauccucuuccgucaucacaucccuaggcgcuaucguauccugcuaugguaaaaccaaaugcaccgccuccaacaaaaaccgcggcaucaucaagacauuuuccaacggcugcgacuacgugagcaacaaaggcgucgacaccgucuccguaggcaacacccucuacuauguaaacaaacaagagggcaaaucacucuacgucaaaggggaacccaucaucaacuucuacgacccgcucguauuccccagcgaugaguucgacgccuccaucucccaggucaacgaaaagauaaaccaaucacucgcauucauucguaaauccgacgaacuccuacacaacgugaaugcaggcaaaucgaccacuaacaucaugaucaccaccaucaucaucgucaucauagucauccuccugucccuuaucgccgucggucuuuuauuauacugcaaagcccgcagcacccccgucacccucucuaaggaccaacucagcggcaucaauaacaucgcauucucuaacuaaggacuagugcaucacauuuaaaagcaucucagccuaccaugagaauaagagaaagaaaaugaagaucaauagcuuauucaucucuuuuucuuuuucguugguguaaagccaacacccugucuaaaaaacauaaauuucuuuaaucauuuugccucuuuucucugugcuucaauuaauaaaaaauggaaagaaccuagaucuaaaaaaaaaaaaaaaaaaaaaaaaaaaaaaaaaaaaaaaaaaaaaaaaaaaaaaaaaaaaaaaaugcaucccccccccccccccccccccccccccccccaaaggcucuuuucagagccaccagaauu

SEQ ID NO: 1259 - RNA, 1942 nt, Artificial Sequence
  mRNA product Design i-3 comprising derived and/or modified sequence from HRSV(A2)__F0_DSCav1 (opt1) R6808
gggagaaagcuuaccauggagcugcucauccugaaggccaacgccaucaccaccauccugacggcggugaccuucugcuucgccagcggccagaacaucaccgaggaguucuaccaguccacgugcagcgccgucuccaagggguaccucagcgcccugcggaccggcugguacaccuccgugaucaccaucgagcugagcaacaucaaggagaacaagugcaacgggaccgacgccaaggugaagcucaucaagcaggagcuggacaaguacaagaacgcggucacggagcugcagcuccugaugcaguccaccccggcaaccaacaaccgcgcccggcgcgagcugccccgguucaugaacuacacccucaacaacgccaagaagacgaacgugacccugagcaagaagcgcaagcggcgcuuccugggcuuccuccugggggugggcuccgccaucgcgagcggcgucgccgugugcaaggugcugcaccucgagggggaggucaacaagaucaagagcgcccugcuguccaccaacaaggccguggugagccucuccaacggcgucagcgugcugaccuucaaggugcuggaccucaagaacuacaucgacaagcagcugcugcccauccugaacaagcagagcugcuccaucagcaacaucgagacggugaucgaguuccagcagaagaacaaccggcuccuggagaucacccgcgaguucagcgugaacgccggggucaccacccccguguccacguacaugcugaccaacagcgagcuccugucccugaucaacgacaugccgaucaccaacgaccagaagaagcucaugagcaacaacgugcagaucguccggcagcaguccuacagcaucaugugcaucaucaaggaggaggugcuggcguacgugguccagcugccccucuacggcgugaucgacacccccugcuggaagcugcacacgagcccccugugcaccaccaacaccaaggagggguccaacaucugccucacgcgcaccgaccggggcugguacugcgacaacgccggcagcgucuccuucuucccgcaggccgagaccugcaaggugcagagcaaccgcguguucugcgacaccaugaacucccugacgcugcccagcgagguaaaccucugcaacgucgacaucuucaaccccaaguacgacugcaagaucaugaccuccaagaccgacgugagcuccagcgugaucaccucccugggggccaucgucagcugcuacggcaagacgaagugcaccgccagcaacaagaaccgggggaucaucaagaccuucuccaacggcugcgacuacgugagcaacaagggcguggacaccguguccgucgggaacacccuguacuacgugaacaagcaggagggcaagagccucuacgugaagggggagcccaucaucaacuucuacgacccgcuggucuuccccuccgacgaguucgacgcgagcaucucccaggugaacgagaagaucaaccagagccuggccuucauccgcaaguccgacgagcugcuccacaacgugaacgccggcaagagcacgaccaacaucaugaucaccaccaucaucaucgucaucaucgugauccugcugucccucaucgccguggggcugcugcucuacugcaaggcccggagcacgcccgucacccuguccaaggaccagcugagcggcaucaacaacaucgcguucuccaacugaggacuaguuauaagacugacuagcccgaugggccucccaacgggcccuccuccccuccuugcaccgagauuaauaaaaaaaaaaaaaaaaaaaaaaaaaaaaaaaaaaaaaaaaaaaaaaaaaaaaaaaaaaaaaaaaugcaucccccccccccccccccccccccccccccccaaaggcucuuuucagagccaccagaauu

SEQ ID NO: 1260 - RNA, 1942 nt, Artificial Sequence
  mRNA product Design i-3 comprising derived and/or modified sequence from HRSV(A2)__F0_DSCav1 (opt1)
gggagaaagcuuaccauggagcugcucauccugaaggccaacgccaucaccaccauccugacggcggugaccuucugcuucgccagcggccagaacaucaccgaggaguucuaccaguccacgugcagcgccgucuccaagggguaccucagcgcccugcgcaccggcugguacaccuccgugaucaccaucgagcugagcaacaucaaggagaacaagugcaacgggaccgacgccaaggugaagcucaucaagcaggagcuggacaaguacaagaacgcggucacggagcugcagcuccugaugcaguccacccccgccaccaacaaccgggcccgccgggagcugccgcgcuucaugaacuacacccucaacaacgccaagaagacgaacgugacccugagcaagaagcggaagcgccgguuccugggcuuccuccugggggugggcuccgcgaucgccagcggcgucgccgugugcaaggugcugcaccucgagggggaggucaacaagaucaaguccgcccugcugagcaccaacaaggccguggugucccucagcaacggcgucuccgugcugaccuucaaggugcuggaccucaagaacuacaucgacaagcagcugcugcccauccucaacaagcagagcugcuccaucagcaacaucgagacggucaucgaguuccagcagaagaacaaccgccugcuggagaucacccgggaguucuccgugaacgcgggggugaccacccccgucagcacguacaugcucaccaacagcgagcugcugucccucaucaacgacaugcccaucaccaacgaccagaagaagcugaugagcaacaacgugcagaucgugcgccagcaguccuacagcaucaugugcaucaucaaggaggagguccuggccuacguggugcagcucccgcuguacggcgucaucgacacccccugcuggaagcugcacacgagcccccucugcaccaccaacaccaaggaggggagcaacaucugccugacgcggaccgaccgcggcugguacugcgacaacgccggcuccgugagcuucuucccccaggccgagaccugcaagguccaguccaaccggguguucugcgacaccaugaacagccugacgcucccguccgaggugaaccugugcaacgucgacaucuucaaccccaaguacgacugcaagaucaugaccagcaagaccgacguguccagcuccgugaucaccagccugggggccaucgucuccugcuacggcaagacgaagugcaccgcgagcaacaagaaccgcgggaucaucaagaccuucuccaacggcugcgacuacgugagcaacaagggcguggacaccgucagcguggggaacacccucuacuacgugaacaagcaggagggcaagucccuguacgucaagggggagcccaucaucaacuucuacgacccccugguguucccgagcgacgaguucgacgccuccaucagccaggugaacgagaagaucaaccagucccucgccuucauccggaaguccgacgagcugcugcacaacgucaacgccggcaaguccacgaccaacaucaugaucaccaccaucaucaucgugaucaucgugauccugcucagccugaucgccgucgggcugcuccuguacugcaaggcgcgcuccacgcccgugacccugagcaaggaccagcucuccggcaucaacaacaucgccuucagcaacugaggacuaguuauaagacugacuagcccgaugggccucccaacgggcccuccuccccuccuugcaccgagauuaauaaaaaaaaaaaaaaaaaaaaaaaaaaaaaaaaaaaaaaaaaaaaaaaaaaaaaaaaaaaaaaaaugcaucccccccccccccccccccccccccccccccaaaggcucuuuucagagccaccagaauu

SEQ ID NO: 1261 - RNA, 1942 nt, Artificial Sequence
  mRNA product Design i-3 comprising derived and/or modified sequence from HRSV(A2)__F0_DSCav1 (opt2)
gggagaaagcuuaccauggagcuccucauccucaaggccaacgccaucaccaccauccucaccgccgucaccuucugcuucgccuccggccagaacaucaccgaggaguucuaccaguccaccugcuccgccgucuccaagggcuaccucuccgcccuccgcaccggcugguacaccuccgucaucaccaucgagcucuccaacaucaaggagaacaagugcaacggcaccgacgccaaggucaagcucaucaagcaggagcucgacaaguacaagaacgccgucaccgagcuccagcuccucaugcaguccacccccgccaccaacaaccgcgcccgccgcgagcucccccgcuucaugaacuacacccucaacaacgccaagaagaccaacgucacccucuccaagaagcgcaagcgccgcuuccucggcuuccuccucggcgucggcuccgccaucgccuccggcgucgccgucugcaagguccuccaccucgagggcgaggucaacaagaucaaguccgcccuccucuccaccaacaaggccgucgucucccucuccaacggcgucuccguccucaccuucaagguccucgaccucaagaacuacaucgacaagcagcuccuccccauccucaacaagcaguccugcuccaucuccaacaucgagaccgucaucgaguuccagcagaagaacaaccgccuccucgagaucacccgcgaguucuccgucaacgccggcgucaccacccccgucuccaccuacaugcucaccaacuccgagcuccucucccucaucaacgacaugcccaucaccaacgaccagaagaagcucauguccaacaacguccagaucguccgccagcaguccuacuccaucaugugcaucaucaaggaggagguccucgccuacgucguccagcucccccucuacggcgucaucgacacccccugcuggaagcuccacaccuccccccucugcaccaccaacaccaaggagggcuccaacaucugccucacccgcaccgaccgcggcugguacugcgacaacgccggcuccgucuccuucuucccccaggccgagaccugcaagguccaguccaaccgcgucuucugcgacaccaugaacucccucacccuccccuccgaggucaaccucugcaacgucgacaucuucaaccccaaguacgacugcaagaucaugaccuccaagaccgacgucuccuccuccgucaucaccucccucggcgccaucgucuccugcuacggcaagaccaagugcaccgccuccaacaagaaccgcggcaucaucaagaccuucuccaacggcugcgacuacgucuccaacaagggcgucgacaccgucuccgucggcaacacccucuacuacgucaacaagcaggagggcaagucccucuacgucaagggcgagcccaucaucaacuucuacgacccccucgucuuccccuccgacgaguucgacgccuccaucucccaggucaacgagaagaucaaccagucccucgccuucauccgcaaguccgacgagcuccuccacaacgucaacgccggcaaguccaccaccaacaucaugaucaccaccaucaucaucgucaucaucgucauccuccucucccucaucgccgucggccuccuccucuacugcaaggcccgcuccacccccgucacccucuccaaggaccagcucuccggcaucaacaacaucgccuucuccaacugaggacuaguuauaagacugacuagcccgaugggccucccaacgggcccuccuccccuccuugcaccgagauuaauaaaaaaaaaaaaaaaaaaaaaaaaaaaaaaaaaaaaaaaaaaaaaaaaaaaaaaaaaaaaaaaaugcaucccccccccccccccccccccccccccccccaaaggcucuuuucagagccaccagaauu

SEQ ID NO: 1262 - RNA, 1942 nt, Artificial Sequence
  mRNA product Design i-3 comprising derived and/or modified sequence from HRSV(A2)__F0_DSCav1 (opt3)
gggagaaagcuuaccauggagcugcucauccuuaaggccaacgcuauuaccacaauacugacugcagugacguucugcuuugccagcggccagaauaucaccgaagaguucuaccaauccacauguucugcggucucaaaaggguauuugagugcuuuaagaacuggaugguacaccagcguuauuacaaucgaacuguccaacauuaaggagaauaaaugcaacgguaccgacgccaaggugaaacuaaucaagcaggaacucgauaaguauaaaaaugcaguaacugagcugcagcuucugaugcagucuacacccgccaccaacaauagggcucggcgcgaguugccucgauuuaugaacuacacgcucaauaacgcaaagaaaacuaaugugacccugucgaagaaacguaagagaagguuccugggcuuucucuuaggggucggaucagccauagcuagcggcguggccguuuguaaggugcugcaccuugaaggugaggucaacaaaaucaagagugcguugcuguccacaaauaaagcagugguaucucuaagcaacgggguuuccgugcucacuuucaagguccuggaccuuaaaaauuauauugauaagcaacuguugccaauccucaacaaacagucaugcaguauuagcaacaucgaaaccgugauagaguuucagcagaagaauaaccggcuguuagagauuacacgcgaguucucugugaaugccggagucaccacgccgguuuccacuuacaugcugacaaacucagaacuccuuagccugaucaaugacaugcccauuaccaacgaucaaaagaaauugaugaguaauaacgugcagaucguaagacagcagucuuauuccaucauguguauuauaaaggaagaggugcuagcuuacgucgugcaacugccucucuacggcguuaucgacacuccaugcuggaaacugcauacaagcccccuuuguaccacgaauaccaaggaaggcucgaacauuugccugacaaggacugaucgggggugguauugugacaaugccggaucuguguccuuuuucccucaggcagagaccugcaaaguccagucaaaccgcguguuuugugauacaaugaauaguuugacucucccaagcgagguaaaccugugcaauguugacaucuucaaccccaaguacgauugcaagauaaugaccuccaaaacagacgugucuagcucagucauuaccaguuuaggugcuaucguguccuguuauggcaagacuaaaugcacggccagcaacaagaaucgagggaucauuaaaacauuuucuaacggaugugauuacgucucaaauaagggcguggacaccguuaguguggguaacacucuguauuacguaaauaagcaagaagggaaaagccuauaugucaagggagagccuaucauuaacuucuacgacccacucguguucccguccgaugaauuugacgcgucuauaucgcagguuaaugagaaaaucaaccagagccuggccuucauuagaaaguccgaugaacuuuugcacaaugugaacgcaggcaaaucaaccacaaauaucaugaucaccacuauuauaaucgucauuaucgugauucugcucagucugaucgcuguaggccuucuguuguacugcaaggccaggucuacacccgugacgcucagcaaggaccagcuguccgggauaaacaauaucgcuuuuucaaacugaggacuaguuauaagacugacuagcccgaugggccucccaacgggcccuccuccccuccuugcaccgagauuaauaaaaaaaaaaaaaaaaaaaaaaaaaaaaaaaaaaaaaaaaaaaaaaaaaaaaaaaaaaaaaaaaugcaucccccccccccccccccccccccccccccccaaaggcucuuuucagagccaccagaauu

SEQ ID NO: 1263 - RNA, 1942 nt, Artificial Sequence
  mRNA product Design i-3 comprising derived and/or modified sequence from HRSV(A2)__F0_DSCav1 (opt4)
gggagaaagcuuaccauggagcugcugauccugaaggccaacgccaucaccaccauccugaccgccgugaccuucugcuucgccagcggccagaacaucaccgaggaguucuaccagagcaccugcagcgccgugagcaagggcuaccugagcgcccugagaaccggcugguacaccagcgugaucaccaucgagcugagcaacaucaaggagaacaagugcaacggcaccgacgccaaggugaagcugaucaagcaggagcuggacaaguacaagaacgccgugaccgagcugcagcugcugaugcagagcacccccgccaccaacaacagagccagaagagagcugcccagauucaugaacuacacccugaacaacgccaagaagaccaacgugacccugagcaagaagagaaagagaagauuccugggcuuccugcugggcgugggcagcgccaucgccagcggcguggccgugugcaaggugcugcaccuggagggcgaggugaacaagaucaagagcgcccugcugagcaccaacaaggccguggugagccugagcaacggcgugagcgugcugaccuucaaggugcuggaccugaagaacuacaucgacaagcagcugcugcccauccugaacaagcagagcugcagcaucagcaacaucgagaccgugaucgaguuccagcagaagaacaacagacugcuggagaucaccagagaguucagcgugaacgccggcgugaccacccccgugagcaccuacaugcugaccaacagcgagcugcugagccugaucaacgacaugcccaucaccaacgaccagaagaagcugaugagcaacaacgugcagaucgugagacagcagagcuacagcaucaugugcaucaucaaggaggaggugcuggccuacguggugcagcugccccuguacggcgugaucgacacccccugcuggaagcugcacaccagcccccugugcaccaccaacaccaaggagggcagcaacaucugccugaccagaaccgacagaggcugguacugcgacaacgccggcagcgugagcuucuucccccaggccgagaccugcaaggugcagagcaacagaguguucugcgacaccaugaacagccugacccugcccagcgaggugaaccugugcaacguggacaucuucaaccccaaguacgacugcaagaucaugaccagcaagaccgacgugagcagcagcgugaucaccagccugggcgccaucgugagcugcuacggcaagaccaagugcaccgccagcaacaagaacagaggcaucaucaagaccuucagcaacggcugcgacuacgugagcaacaagggcguggacaccgugagcgugggcaacacccuguacuacgugaacaagcaggagggcaagagccuguacgugaagggcgagcccaucaucaacuucuacgacccccugguguuccccagcgacgaguucgacgccagcaucagccaggugaacgagaagaucaaccagagccuggccuucaucagaaagagcgacgagcugcugcacaacgugaacgccggcaagagcaccaccaacaucaugaucaccaccaucaucaucgugaucaucgugauccugcugagccugaucgccgugggccugcugcuguacugcaaggccagaagcacccccgugacccugagcaaggaccagcugagcggcaucaacaacaucgccuucagcaacugaggacuaguuauaagacugacuagcccgaugggccucccaacgggcccuccuccccuccuugcaccgagauuaauaaaaaaaaaaaaaaaaaaaaaaaaaaaaaaaaaaaaaaaaaaaaaaaaaaaaaaaaaaaaaaaaugcaucccccccccccccccccccccccccccccccaaaggcucuuuucagagccaccagaauu

SEQ ID NO: 1264 - RNA, 1942 nt, Artificial Sequence
  mRNA product Design i-3 comprising derived and/or modified sequence from HRSV(A2)__F0_DSCav1 (opt5)
gggagaaagcuuaccauggagcugcucauccugaaggccaacgcuauuaccacaauccuuacggccgugaccuucugcuuugcgagcggccagaauauuacagaagaguucuaccaauccaccuguucugcugucagcaaaggguaucuguccgcccucagaacaggaugguacaccucuguuaucacaauugaacugagcaacaucaaggagaauaaaugcaacggcaccgacgccaaggugaaacuuaucaagcaggaacuggauaaguauaaaaaugcugugacggagcuccagcugcugaugcaguccacccccgccacaaacaaucgggcucgcagagagcucccucgguuuaugaacuacacccugaauaacgccaagaaaacaaaugucacccuuucuaagaaacgcaagagacgguuccugggguuucuccugggagugggcagcgcgauugccuccgggguugcuguguguaagguccuucaccuggaaggagaggugaacaaaaucaagagcgcccuccugucuacgaauaaagcuguugugucccugagcaacggcgucucugugcucacauucaaggugcuggaccuuaaaaauuauauugauaagcaacugcucccgauccugaacaaacaguccugcagcauuucuaacaucgaaaccgucauugaguuucagcagaagaauaaccgccuucuggagaucacaagagaauuuuccguuaaugccggcgugaccacccccgugagcacauacaugcucacgaacuccgagcugcugucucucaucaaugacaugccuauuaccaacgaucaaaagaaacugaugagcaauaacguccagaucgugcggcagcaguccuauagcauuauguguaucauuaaggaagagguucuugcguacgugguccaacugccccucuacggggugaucgacacaccuugcuggaaacugcauaccucuccccuuuguacaaccaauacgaaggaaggauccaacaucugccugacacgcaccgauagaggcugguauugugacaaugccgggagcguuucuuucuucccucaggcugagaccugcaaagugcagagcaaccgggucuuuugugauacaaugaacucccucacccugccgucugaggugaaucugugcaaugucgacauuuucaaccccaaguacgauugcaagaucaugacaagcaaaacggacguguccagcucuguuauuaccucccucggagccaucgugagcuguuauggcaagacaaaaugcaccgcuucuaacaagaaucgcgggauuaucaaaacauuuuccaacggaugugauuacgucagcaauaagggcguggacaccguuuccgugggcaacacgcuguauuacgucaauaagcaagaagggaaaucucuuuaugugaagggagagccuaucauuaacuucuacgacccccugguguucccuagcgaugaauuugacgccuccaucucucagguuaaugagaaaauuaaccagagccucgccuucaucagaaaguccgaugaacugcugcacaaugucaacgcuggcaaaagcaccacaaauauuaugaucaccacaauuaucaucgugauuaucgugauucuucucucucugaucgcggucgggcugcuccuguacugcaaggcccgguccacccccgugacgcuuagcaaggaccagcugucuggaauuaacaauaucgcuuuuuccaacugaggacuaguuauaagacugacuagcccgaugggccucccaacgggcccuccuccccuccuugcaccgagauuaauaaaaaaaaaaaaaaaaaaaaaaaaaaaaaaaaaaaaaaaaaaaaaaaaaaaaaaaaaaaaaaaaugcaucccccccccccccccccccccccccccccccaaaggcucuuuucagagccaccagaauu

SEQ ID NO: 1265 - RNA, 1942 nt, Artificial Sequence
  mRNA product Design i-3 comprising derived and/or modified sequence from HRSV(A2)__F0_DSCav1 (opt6)
gggagaaagcuuaccauggaauuauuaauccucaaagcgaacgcuauuacuaccauucuaacagcagucacauucugcuucgccucaggccaaaacauuacagaagaauuuuaccaaucaacaugcucugccguaucaaaaggcuaccuauccgcccuacgaacaggcugguacacaagcguaauaacaaucgaacuaucaaacauaaaagaaaacaaaugcaacgguacagacgccaaaguuaaacuaauaaaacaagaacucgauaaauacaaaaacgcaguaacagaauuacaacuacuaaugcaaucaacaccugcaacaaacaauagagccaggagagaauuaccucgauucaugaauuacacacucaauaacgcaaaaaaaaccaacguuacacuaucaaaaaaaagaaaacgacgauucuuaggauuccuacucggagucggaucagcaauagcaucuggcguugcaguaugcaaaguauuacacuuagaaggugaagucaauaaaauaaaaagcgcgcuacuaaguacaaacaaagcagucgucucccuaucaaacggagucucaguccuaacauucaaaguacucgaccuaaaaaauuacauagauaaacaacuacuuccaauauuaaacaaacaauccuguagcaucagcaauauagaaacaguaauagaauuucaacaaaaaaacaaccgauuauuagaaaucacucgagaauuuuccguaaacgccgggguaacaacuccagucucaaccuacaugcuaaccaauucagaacuauugagcuuaauaaacgacaugccaauaaccaacgaccaaaaaaaacuaaugucuaacaauguucaaaucgucagacaacaaaguuacaguauaauguguauaaucaaagaagaaguccuagcauacguaguccaacucccacuauauggaguuaucgacacaccauguuggaaauuacacaccucaccauuaugcacaaccaauacaaaagaaggaucaaacauaugccuuacacggacagaccgcggaugguauugugacaacgcuggcucagucuccuuuuucccacaagcagaaacaugcaaaguacaaucaaacagagucuuuugcgauaccaugaacucacuuacauuaccaagcgaaguaaaucuuuguaacgucgacaucuucaauccuaaauaugacugcaaaaucaugaccucaaaaacagacguuagcucuucaguaaucacuagcuuaggagcaaucguaucaugcuacggcaaaacaaaauguacagcaucaaauaaaaacagaggaaucauaaaaacauuuucaaacggaugcgauuauguaagcaacaaaggaguagauacuguaagcguaggaaacacauuguacuauguaaacaaacaagaaggaaaaucacucuauguaaaaggagaaccuauaaucaauuucuacgauccauuaguguucccaucagaugaauuugacgccucaauaucacaaguuaaugaaaaaauaaaucaaucgcuagcauucauacguaaaucagaugaauuacuacauaacguaaacgcaggcaaauccacaacaaauaucaugaucacaacaauuauaauaguaauaauaguaauacuacuaucacuaauagccguaggacuccuacuauacugcaaagcaagaucuacuccaguaacccucucaaaagaucaacuaagcggaauuaauaacaucgcauucagcaacuaaggacuaguuauaagacugacuagcccgaugggccucccaacgggcccuccuccccuccuugcaccgagauuaauaaaaaaaaaaaaaaaaaaaaaaaaaaaaaaaaaaaaaaaaaaaaaaaaaaaaaaaaaaaaaaaaugcaucccccccccccccccccccccccccccccccaaaggcucuuuucagagccaccagaauu

SEQ ID NO: 1266 - RNA, 1942 nt, Artificial Sequence
  mRNA product Design i-3 comprising derived and/or modified sequence from HRSV(A2)__F0_DSCav1 (opt11)
gggagaaagcuuaccauggaacuacuuauccucaaagccaacgccaucaccaccauccucacagcaguaaccuuuugcuucgccucaggccaaaauaucacagaagaauuuuaccagaguaccugcuccgccguauccaaaggauaccucagcgcgcuccgcaccggcugguacacuucaguaaucacaaucgaacuauccaacaucaaagaaaacaaaugcaacggcaccgacgcgaaagucaaacucaucaaacaagaacuagacaaauacaaaaaugccguaacagaacuacaacuguuaaugcagagcacacccgccaccaacaaccgcgcccgccgggaacucccccgauucaugaacuacacacucaacaacgccaaaaagacgaacgucacccucagcaagaaacgaaaacgcagauuccucgguuuccuacuaggcguaggcucagcaauagccuccggaguagccgucugcaaaguccugcacuuagaaggcgaagucaacaaaaucaaauccgcccuacucuccacgaacaaagccgucgucucccuguccaacggugucuccguuuuaaccuucaaaguucuggaccucaaaaacuacauagacaaacagcuucuccccauccucaacaaacaauccuguagcaucuccaacaucgaaaccgucauagaauuucaacagaaaaacaacagacugcucgaaaucacccgcgaguucuccgucaacgccggcgucacgacucccgucuccaccuauaugcucacgaacucggaacuccuuucccuaaucaacgacaugccgaucaccaacgaccaaaagaaacucaugucaaacaacguacaaauuguccgccaacaaucauacuccaucaugugcauaauuaaagaagaaguccucgcauacguaguccaacucccccucuacggcgucaucgacacccccugcuggaaacuccacaccuccccacucugcacaaccaacaccaaagaaggcucaaacauaugccuaacgcgcaccgaucgcgguugguacugcgacaacgccgguuccgucagcuucuucccccaagcagagacaugcaaaguccaaucaaaccgcgucuucugcgacaccaugaacucacuaacccuuccaagcgaagucaaccucugcaacguugacaucuucaaccccaaauacgacuguaaaaucaugaccuccaagaccgacguauccucuuccgucaucacaucccuaggcgcuaucguauccugcuaugguaaaaccaaaugcaccgccuccaacaaaaaccgcggcaucaucaagacauuuuccaacggcugcgacuacgugagcaacaaaggcgucgacaccgucuccguaggcaacacccucuacuauguaaacaaacaagagggcaaaucacucuacgucaaaggggaacccaucaucaacuucuacgacccgcucguauuccccagcgaugaguucgacgccuccaucucccaggucaacgaaaagauaaaccaaucacucgcauucauucguaaauccgacgaacuccuacacaacgugaaugcaggcaaaucgaccacuaacaucaugaucaccaccaucaucaucgucaucauagucauccuccugucccuuaucgccgucggucuuuuauuauacugcaaagcccgcagcacccccgucacccucucuaaggaccaacucagcggcaucaauaacaucgcauucucuaacuaaggacuaguuauaagacugacuagcccgaugggccucccaacgggcccuccuccccuccuugcaccgagauuaauaaaaaaaaaaaaaaaaaaaaaaaaaaaaaaaaaaaaaaaaaaaaaaaaaaaaaaaaaaaaaaaaugcaucccccccccccccccccccccccccccccccaaaggcucuuuucagagccaccagaauu

SEQ ID NO: 1267 - protein, 553 aa, Artificial Sequence
  derived and/or modified protein sequence (artificial) from HRSV(A2)__F-del_DSCav1
MELLILKANAITTILTAVTFCFASGQNITEEFYQSTCSAVSKGYLSALRTGWYTSVITIELSNIKENKCNGTDAKVKLIKQELDKYKNAVTELQLLMQSTPATNNRARRELPRFMNYTLNNAKKTNVTLSKKRKRRFLGFLLGVGSAIASGVAVCKVLHLEGEVNKIKSALLSTNKAVVSLSNGVSVLTFKVLDLKNYIDKQLLPILNKQSCSISNIETVIEFQQKNNRLLEITREFSVNAGVTTPVSTYMLTNSELLSLINDMPITNDQKKLMSNNVQIVRQQSYSIMCIIKEEVLAYVVQLPLYGVIDTPCWKLHTSPLCTTNTKEGSNICLTRTDRGWYCDNAGSVSFFPQAETCKVQSNRVFCDTMNSLTLPSEVNLCNVDIFNPKYDCKIMTSKTDVSSSVITSLGAIVSCYGKTKCTASNKNRGIIKTFSNGCDYVSNKGVDTVSVGNTLYYVNKQEGKSLYVKGEPIINFYDPLVFPSDEFDASISQVNEKINQSLAFIRKSDELLHNVNAGKSTTNIMITTIIIVIIVILLSLIAVGLLLYCKAR

SEQ ID NO: 1268 - RNA, 1662 nt, Artificial Sequence
  derived and/or modified CDS sequence (opt1) from HRSV(A2)__F-del_DSCav1
auggagcugcucauccugaaggccaacgccaucaccaccauccugacggcggugaccuucugcuucgccagcggccagaacaucaccgaggaguucuaccaguccacgugcagcgccgucuccaagggguaccucagcgcccugcggaccggcugguacaccuccgugaucaccaucgagcugagcaacaucaaggagaacaagugcaacgggaccgacgccaaggugaagcucaucaagcaggagcuggacaaguacaagaacgcggucacggagcugcagcuccugaugcaguccaccccggcaaccaacaaccgcgcccggcgcgagcugccccgguucaugaacuacacccucaacaacgccaagaagacgaacgugacccugagcaagaagcgcaagcggcgcuuccugggcuuccuccugggggugggcuccgccaucgcgagcggcgucgccgugugcaaggugcugcaccucgagggggaggucaacaagaucaagagcgcccugcuguccaccaacaaggccguggugagccucuccaacggcgucagcgugcugaccuucaaggugcuggaccucaagaacuacaucgacaagcagcugcugcccauccugaacaagcagagcugcuccaucagcaacaucgagacggugaucgaguuccagcagaagaacaaccggcuccuggagaucacccgcgaguucagcgugaacgccggggucaccacccccguguccacguacaugcugaccaacagcgagcuccugucccugaucaacgacaugccgaucaccaacgaccagaagaagcucaugagcaacaacgugcagaucguccggcagcaguccuacagcaucaugugcaucaucaaggaggaggugcuggcguacgugguccagcugccccucuacggcgugaucgacacccccugcuggaagcugcacacgagcccccugugcaccaccaacaccaaggagggguccaacaucugccucacgcgcaccgaccggggcugguacugcgacaacgccggcagcgucuccuucuucccgcaggccgagaccugcaaggugcagagcaaccgcguguucugcgacaccaugaacucccugacgcugcccagcgagguaaaccucugcaacgucgacaucuucaaccccaaguacgacugcaagaucaugaccuccaagaccgacgugagcuccagcgugaucaccucccugggggccaucgucagcugcuacggcaagacgaagugcaccgccagcaacaagaaccgggggaucaucaagaccuucuccaacggcugcgacuacgugagcaacaagggcguggacaccguguccgucgggaacacccuguacuacgugaacaagcaggagggcaagagccucuacgugaagggggagcccaucaucaacuucuacgacccgcuggucuuccccuccgacgaguucgacgcgagcaucucccaggugaacgagaagaucaaccagagccuggccuucauccgcaaguccgacgagcugcuccacaacgugaacgccggcaagagcacgaccaacaucaugaucaccaccaucaucaucgucaucaucgugauccugcugucccucaucgccguggggcugcugcucuacugcaaggcccgguga

SEQ ID NO: 1269 - RNA, 1662 nt, Artificial Sequence
  derived and/or modified CDS sequence (opt1) from HRSV(A2)__F-del_DSCav1
auggagcugcucauccugaaggccaacgccaucaccaccauccugacggcggugaccuucugcuucgccagcggccagaacaucaccgaggaguucuaccaguccacgugcagcgccgucuccaagggguaccucagcgcccugcgcaccggcugguacaccuccgugaucaccaucgagcugagcaacaucaaggagaacaagugcaacgggaccgacgccaaggugaagcucaucaagcaggagcuggacaaguacaagaacgcggucacggagcugcagcuccugaugcaguccacccccgccaccaacaaccgggcccgccgggagcugccgcgcuucaugaacuacacccucaacaacgccaagaagacgaacgugacccugagcaagaagcggaagcgccgguuccugggcuuccuccugggggugggcuccgcgaucgccagcggcgucgccgugugcaaggugcugcaccucgagggggaggucaacaagaucaaguccgcccugcugagcaccaacaaggccguggugucccucagcaacggcgucuccgugcugaccuucaaggugcuggaccucaagaacuacaucgacaagcagcugcugcccauccucaacaagcagagcugcuccaucagcaacaucgagacggucaucgaguuccagcagaagaacaaccgccugcuggagaucacccgggaguucuccgugaacgcgggggugaccacccccgucagcacguacaugcucaccaacagcgagcugcugucccucaucaacgacaugcccaucaccaacgaccagaagaagcugaugagcaacaacgugcagaucgugcgccagcaguccuacagcaucaugugcaucaucaaggaggagguccuggccuacguggugcagcucccgcuguacggcgucaucgacacccccugcuggaagcugcacacgagcccccucugcaccaccaacaccaaggaggggagcaacaucugccugacgcggaccgaccgcggcugguacugcgacaacgccggcuccgugagcuucuucccccaggccgagaccugcaagguccaguccaaccggguguucugcgacaccaugaacagccugacgcucccguccgaggugaaccugugcaacgucgacaucuucaaccccaaguacgacugcaagaucaugaccagcaagaccgacguguccagcuccgugaucaccagccugggggccaucgucuccugcuacggcaagacgaagugcaccgcgagcaacaagaaccgcgggaucaucaagaccuucuccaacggcugcgacuacgugagcaacaagggcguggacaccgucagcguggggaacacccucuacuacgugaacaagcaggagggcaagucccuguacgucaagggggagcccaucaucaacuucuacgacccccugguguucccgagcgacgaguucgacgccuccaucagccaggugaacgagaagaucaaccagucccucgccuucauccggaaguccgacgagcugcugcacaacgucaacgccggcaaguccacgaccaacaucaugaucaccaccaucaucaucgugaucaucgugauccugcucagccugaucgccgucgggcugcuccuguacugcaaggcgcgcuga

SEQ ID NO: 1270 - RNA, 1662 nt, Artificial Sequence
  derived and/or modified CDS sequence (opt2) from HRSV(A2)__F-del_DSCav1
auggagcuccucauccucaaggccaacgccaucaccaccauccucaccgccgucaccuucugcuucgccuccggccagaacaucaccgaggaguucuaccaguccaccugcuccgccgucuccaagggcuaccucuccgcccuccgcaccggcugguacaccuccgucaucaccaucgagcucuccaacaucaaggagaacaagugcaacggcaccgacgccaaggucaagcucaucaagcaggagcucgacaaguacaagaacgccgucaccgagcuccagcuccucaugcaguccacccccgccaccaacaaccgcgcccgccgcgagcucccccgcuucaugaacuacacccucaacaacgccaagaagaccaacgucacccucuccaagaagcgcaagcgccgcuuccucggcuuccuccucggcgucggcuccgccaucgccuccggcgucgccgucugcaagguccuccaccucgagggcgaggucaacaagaucaaguccgcccuccucuccaccaacaaggccgucgucucccucuccaacggcgucuccguccucaccuucaagguccucgaccucaagaacuacaucgacaagcagcuccuccccauccucaacaagcaguccugcuccaucuccaacaucgagaccgucaucgaguuccagcagaagaacaaccgccuccucgagaucacccgcgaguucuccgucaacgccggcgucaccacccccgucuccaccuacaugcucaccaacuccgagcuccucucccucaucaacgacaugcccaucaccaacgaccagaagaagcucauguccaacaacguccagaucguccgccagcaguccuacuccaucaugugcaucaucaaggaggagguccucgccuacgucguccagcucccccucuacggcgucaucgacacccccugcuggaagcuccacaccuccccccucugcaccaccaacaccaaggagggcuccaacaucugccucacccgcaccgaccgcggcugguacugcgacaacgccggcuccgucuccuucuucccccaggccgagaccugcaagguccaguccaaccgcgucuucugcgacaccaugaacucccucacccuccccuccgaggucaaccucugcaacgucgacaucuucaaccccaaguacgacugcaagaucaugaccuccaagaccgacgucuccuccuccgucaucaccucccucggcgccaucgucuccugcuacggcaagaccaagugcaccgccuccaacaagaaccgcggcaucaucaagaccuucuccaacggcugcgacuacgucuccaacaagggcgucgacaccgucuccgucggcaacacccucuacuacgucaacaagcaggagggcaagucccucuacgucaagggcgagcccaucaucaacuucuacgacccccucgucuuccccuccgacgaguucgacgccuccaucucccaggucaacgagaagaucaaccagucccucgccuucauccgcaaguccgacgagcuccuccacaacgucaacgccggcaaguccaccaccaacaucaugaucaccaccaucaucaucgucaucaucgucauccuccucucccucaucgccgucggccuccuccucuacugcaaggcccgcuga

SEQ ID NO: 1271 - RNA, 1662 nt, Artificial Sequence
  derived and/or modified CDS sequence (opt3) from HRSV(A2)__F-del_DSCav1
auggagcugcucauccuuaaggccaacgcuauuaccacaauacugacugcagugacguucugcuuugccagcggccagaauaucaccgaagaguucuaccaauccacauguucugcggucucaaaaggguauuugagugcuuuaagaacuggaugguacaccagcguuauuacaaucgaacuguccaacauuaaggagaauaaaugcaacgguaccgacgccaaggugaaacuaaucaagcaggaacucgauaaguauaaaaaugcaguaacugagcugcagcuucugaugcagucuacacccgccaccaacaauagggcucggcgcgaguugccucgauuuaugaacuacacgcucaauaacgcaaagaaaacuaaugugacccugucgaagaaacguaagagaagguuccugggcuuucucuuaggggucggaucagccauagcuagcggcguggccguuuguaaggugcugcaccuugaaggugaggucaacaaaaucaagagugcguugcuguccacaaauaaagcagugguaucucuaagcaacgggguuuccgugcucacuuucaagguccuggaccuuaaaaauuauauugauaagcaacuguugccaauccucaacaaacagucaugcaguauuagcaacaucgaaaccgugauagaguuucagcagaagaauaaccggcuguuagagauuacacgcgaguucucugugaaugccggagucaccacgccgguuuccacuuacaugcugacaaacucagaacuccuuagccugaucaaugacaugcccauuaccaacgaucaaaagaaauugaugaguaauaacgugcagaucguaagacagcagucuuauuccaucauguguauuauaaaggaagaggugcuagcuuacgucgugcaacugccucucuacggcguuaucgacacuccaugcuggaaacugcauacaagcccccuuuguaccacgaauaccaaggaaggcucgaacauuugccugacaaggacugaucgggggugguauugugacaaugccggaucuguguccuuuuucccucaggcagagaccugcaaaguccagucaaaccgcguguuuugugauacaaugaauaguuugacucucccaagcgagguaaaccugugcaauguugacaucuucaaccccaaguacgauugcaagauaaugaccuccaaaacagacgugucuagcucagucauuaccaguuuaggugcuaucguguccuguuauggcaagacuaaaugcacggccagcaacaagaaucgagggaucauuaaaacauuuucuaacggaugugauuacgucucaaauaagggcguggacaccguuaguguggguaacacucuguauuacguaaauaagcaagaagggaaaagccuauaugucaagggagagccuaucauuaacuucuacgacccacucguguucccguccgaugaauuugacgcgucuauaucgcagguuaaugagaaaaucaaccagagccuggccuucauuagaaaguccgaugaacuuuugcacaaugugaacgcaggcaaaucaaccacaaauaucaugaucaccacuauuauaaucgucauuaucgugauucugcucagucugaucgcuguaggccuucuguuguacugcaaggccagguga

SEQ ID NO: 1272 - RNA, 1662 nt, Artificial Sequence
  derived and/or modified CDS sequence (opt4) from HRSV(A2)__F-del_DSCav1
auggagcugcugauccugaaggccaacgccaucaccaccauccugaccgccgugaccuucugcuucgccagcggccagaacaucaccgaggaguucuaccagagcaccugcagcgccgugagcaagggcuaccugagcgcccugagaaccggcugguacaccagcgugaucaccaucgagcugagcaacaucaaggagaacaagugcaacggcaccgacgccaaggugaagcugaucaagcaggagcuggacaaguacaagaacgccgugaccgagcugcagcugcugaugcagagcacccccgccaccaacaacagagccagaagagagcugcccagauucaugaacuacacccugaacaacgccaagaagaccaacgugacccugagcaagaagagaaagagaagauuccugggcuuccugcugggcgugggcagcgccaucgccagcggcguggccgugugcaaggugcugcaccuggagggcgaggugaacaagaucaagagcgcccugcugagcaccaacaaggccguggugagccugagcaacggcgugagcgugcugaccuucaaggugcuggaccugaagaacuacaucgacaagcagcugcugcccauccugaacaagcagagcugcagcaucagcaacaucgagaccgugaucgaguuccagcagaagaacaacagacugcuggagaucaccagagaguucagcgugaacgccggcgugaccacccccgugagcaccuacaugcugaccaacagcgagcugcugagccugaucaacgacaugcccaucaccaacgaccagaagaagcugaugagcaacaacgugcagaucgugagacagcagagcuacagcaucaugugcaucaucaaggaggaggugcuggccuacguggugcagcugccccuguacggcgugaucgacacccccugcuggaagcugcacaccagcccccugugcaccaccaacaccaaggagggcagcaacaucugccugaccagaaccgacagaggcugguacugcgacaacgccggcagcgugagcuucuucccccaggccgagaccugcaaggugcagagcaacagaguguucugcgacaccaugaacagccugacccugcccagcgaggugaaccugugcaacguggacaucuucaaccccaaguacgacugcaagaucaugaccagcaagaccgacgugagcagcagcgugaucaccagccugggcgccaucgugagcugcuacggcaagaccaagugcaccgccagcaacaagaacagaggcaucaucaagaccuucagcaacggcugcgacuacgugagcaacaagggcguggacaccgugagcgugggcaacacccuguacuacgugaacaagcaggagggcaagagccuguacgugaagggcgagcccaucaucaacuucuacgacccccugguguuccccagcgacgaguucgacgccagcaucagccaggugaacgagaagaucaaccagagccuggccuucaucagaaagagcgacgagcugcugcacaacgugaacgccggcaagagcaccaccaacaucaugaucaccaccaucaucaucgugaucaucgugauccugcugagccugaucgccgugggccugcugcuguacugcaaggccagauga

SEQ ID NO: 1273 - RNA, 1662 nt, Artificial Sequence
  derived and/or modified CDS sequence (opt5) from HRSV(A2)__F-del_DSCav1
auggagcugcucauccugaaggccaacgcuauuaccacaauccuuacggccgugaccuucugcuuugcgagcggccagaauauuacagaagaguucuaccaauccaccuguucugcugucagcaaaggguaucuguccgcccucagaacaggaugguacaccucuguuaucacaauugaacugagcaacaucaaggagaauaaaugcaacggcaccgacgccaaggugaaacuuaucaagcaggaacuggauaaguauaaaaaugcugugacggagcuccagcugcugaugcaguccacccccgccacaaacaaucgggcucgcagagagcucccucgguuuaugaacuacacccugaauaacgccaagaaaacaaaugucacccuuucuaagaaacgcaagagacgguuccugggguuucuccugggagugggcagcgcgauugccuccgggguugcuguguguaagguccuucaccuggaaggagaggugaacaaaaucaagagcgcccuccugucuacgaauaaagcuguugugucccugagcaacggcgucucugugcucacauucaaggugcuggaccuuaaaaauuauauugauaagcaacugcucccgauccugaacaaacaguccugcagcauuucuaacaucgaaaccgucauugaguuucagcagaagaauaaccgccuucuggagaucacaagagaauuuuccguuaaugccggcgugaccacccccgugagcacauacaugcucacgaacuccgagcugcugucucucaucaaugacaugccuauuaccaacgaucaaaagaaacugaugagcaauaacguccagaucgugcggcagcaguccuauagcauuauguguaucauuaaggaagagguucuugcguacgugguccaacugccccucuacggggugaucgacacaccuugcuggaaacugcauaccucuccccuuuguacaaccaauacgaaggaaggauccaacaucugccugacacgcaccgauagaggcugguauugugacaaugccgggagcguuucuuucuucccucaggcugagaccugcaaagugcagagcaaccgggucuuuugugauacaaugaacucccucacccugccgucugaggugaaucugugcaaugucgacauuuucaaccccaaguacgauugcaagaucaugacaagcaaaacggacguguccagcucuguuauuaccucccucggagccaucgugagcuguuauggcaagacaaaaugcaccgcuucuaacaagaaucgcgggauuaucaaaacauuuuccaacggaugugauuacgucagcaauaagggcguggacaccguuuccgugggcaacacgcuguauuacgucaauaagcaagaagggaaaucucuuuaugugaagggagagccuaucauuaacuucuacgacccccugguguucccuagcgaugaauuugacgccuccaucucucagguuaaugagaaaauuaaccagagccucgccuucaucagaaaguccgaugaacugcugcacaaugucaacgcuggcaaaagcaccacaaauauuaugaucaccacaauuaucaucgugauuaucgugauucuucucucucugaucgcggucgggcugcuccuguacugcaaggcccgguga

SEQ ID NO: 1274 - RNA, 1662 nt, Artificial Sequence
  derived and/or modified CDS sequence (opt6) from HRSV(A2)__F-del_DSCav1
auggaacuauuaauauuaaaagcaaaugcuauuaccacaauacuuacugcuguaaccuucugcuuugccucuggccaaaacauaacagaagaauuuuaucaaucaacuugcuccgcuguaagcaaaggcuaccuaucagcauuacgcaccggcugguacacaucaguaauaacaauagaacuauccaacauaaaagaaaauaaaugcaacggaacagacgcaaaaguaaaauuaauaaaacaagaacucgacaaauacaaaaacgcaguaacagaauuacaacuacuaaugcaaaguacuccagccaccaacaacagagcaagaagagaauuaccacgauuuaugaacuacacacuaaacaaugcaaaaaaaacaaacguaacacuaucaaaaaaacguaaacgcagauucuuaggcuuccuccuagguguaggcucagcaaucgccucaggaguggcaguuuguaaaguacuacaccuagaaggagaaguaaacaaaaucaaaucugcccuuuuaucgacaaacaaagcaguaguaucguuauccaauggagucucaguauugacauucaaaguauuagaccuaaaaaauuauauagauaaacaacucuuaccuaucuuaaauaaacaaagcugcucaauaaguaacauagaaaccguaauagaauuucaacaaaaaaacaauagacuccuugagaucacucgagaauuuucaguaaacgcagguguaacaacaccaguaagcacauacaugcuaacaaauagugaacuauuaucucuaauuaacgauaugcccauaaccaacgaucaaaaaaaacucaugaguaacaacguacaaauaguaagacaacaauccuauagcauaaugugcauuauaaaagaagaaguacuagcauauguaguccaacuaccacuauacggcguaauagacacaccaugcuggaaacuacacaccucaccccuaugcacaacaaauacaaaagaaggaucaaacauaugcuuaaccaggacagacagaggcugguacugcgauaacgcaggaucuguuucauucuucccccaagcagaaacaugcaaaguacaaucaaacagaguauuuugugauaccaugaacucacucacauuaccauccgaagucaaccucugcaacguagacauauucaaccccaaauacgacugcaaaauaaugaccucaaaaacagauguaucaucaucaguaaucacaucacuaggagcuaucguaucuuguuauggaaaaacaaaaugcacagcauccaacaaaaacagaggaauuaucaaaacauucucaaauggaugugacuauguaucaaacaaaggaguagacaccguaagcguaggcaauacacuauauuacguaaauaaacaagaaggaaaaucacuauacguaaaaggugaaccaauaauaaacuucuaugacccccuaguauucccaucagaugaauuugacgcaagcauaucacaagucaacgaaaaaauaaaccaaucacuggcauucauucgcaaaucagaugaacuucuccacaacguaaacgcugguaaaagcacuacaaacauaaugauaacaacaaucaucauugucauaauaguuauucuauuaucacuaaucgcaguaggauuacuacuauacuguaaagcgagguaa

SEQ ID NO: 1275 - RNA, 1662 nt, Artificial Sequence
  derived and/or modified CDS sequence (opt11) from HRSV(A2)__F-del_DSCav1
auggagcugcucauccugaaggccaacgccaucaccacaauccugacggcggugaccuucugcuucgccagcggccagaacaucaccgaggaguucuaccaguccacgugcagcgccgucuccaagggguaccucagcgcccugcgaaccggcugguacaccuccgugaucaccaucgagcugucaaacaucaaggagaacaagugcaacgggaccgaugccaagguuaagcucaucaagcaggagcuggacaaguacaagaacgcggucacggagcugcagcuccugaugcaguccacuccggcaaccaacaaccgcgccaggcgcgagcugccccgguucaugaacuacacccucaacaacgccaagaagacgaaugugacccugagcaagaagcgcaagcggcgcuuccugggcuuccuccuaggggugggcuccgccaucgcgagcggcgucgccgugugcaagguguugcaccucgagggggaggucaacaagaucaagagcgcccugcuguccaccaacaaggccgugguaagccucuccaacggcgucagcguucugaccuucaaggugcuggaccucaagaacuauaucgacaagcagcugcugcccauccugaacaagcagagcugcuccaucucaaacaucgaaacggugauugaguuccagcagaagaacaaccggcuccuggaaaucacccgcgaguucagcgugaacgccggggucaccacccccguguccacguacaugcugaccaacagcgagcuccuaucccugaucaacgacaugccgaucaccaacgaccagaagaagcucaugagcaacaacgugcagaucguccggcagcaguccuacagcaucaugugcaucaucaaggaagaggugcuggcguacgugguccagcugccccucuacggcgugaucgacacccccugcuggaagcugcacacgagcccccugugcacaaccaacaccaaggagggguccaacaucugccucacgcgcaccgaccggggcugguacugcgacaacgccggcagcgucuccuucuucccgcaggccgagaccugcaaggugcagagcaaccgcguguucugcgacaccaugaacucccugacgcugcccucugagguaaaccucugcaacgucgacaucuucaaccccaaguacgacugcaagaucaugaccuccaagacagacgugagcuccagcgugaucacaucccugggggccaucgucagcugcuacggcaagacuaaguguacugccagcaacaagaaccgggggaucaucaagaccuucuccaacggcugcgacuacgugagcaacaagggcguggacaccguguccgucgggaacacccuguacuacguuaauaagcaggagggcaagagccucuacgugaaaggggagcccaucauuaacuucuacgacccacugguuuuccccuccgacgaguucgacgcgagcaucucccaggugaacgagaagaucaaccagagccuggccuucauccgcaaguccgacgagcugcuccacaacgugaacgccggcaagagcacgaccaacaucaugaucaccaccaucaucaucgugaucaucgugauucugcugucccucaucgccguggggcugcugcuuuacugcaaggcccgguga

SEQ ID NO: 1276 - RNA, 1938 nt, Artificial Sequence
  mRNA product Design a-1 comprising derived and/or modified sequence from HRSV(A2)__F-del_DSCav1 (opt1)
gggagagucccgcagucggcguccagcggcucugcuuguucgugugugugucguugcaggccuuauucaagcuuaccauggagcugcucauccugaaggccaacgccaucaccaccauccugacggcggugaccuucugcuucgccagcggccagaacaucaccgaggaguucuaccaguccacgugcagcgccgucuccaagggguaccucagcgcccugcggaccggcugguacaccuccgugaucaccaucgagcugagcaacaucaaggagaacaagugcaacgggaccgacgccaaggugaagcucaucaagcaggagcuggacaaguacaagaacgcggucacggagcugcagcuccugaugcaguccaccccggcaaccaacaaccgcgcccggcgcgagcugccccgguucaugaacuacacccucaacaacgccaagaagacgaacgugacccugagcaagaagcgcaagcggcgcuuccugggcuuccuccugggggugggcuccgccaucgcgagcggcgucgccgugugcaaggugcugcaccucgagggggaggucaacaagaucaagagcgcccugcuguccaccaacaaggccguggugagccucuccaacggcgucagcgugcugaccuucaaggugcuggaccucaagaacuacaucgacaagcagcugcugcccauccugaacaagcagagcugcuccaucagcaacaucgagacggugaucgaguuccagcagaagaacaaccggcuccuggagaucacccgcgaguucagcgugaacgccggggucaccacccccguguccacguacaugcugaccaacagcgagcuccugucccugaucaacgacaugccgaucaccaacgaccagaagaagcucaugagcaacaacgugcagaucguccggcagcaguccuacagcaucaugugcaucaucaaggaggaggugcuggcguacgugguccagcugccccucuacggcgugaucgacacccccugcuggaagcugcacacgagcccccugugcaccaccaacaccaaggagggguccaacaucugccucacgcgcaccgaccggggcugguacugcgacaacgccggcagcgucuccuucuucccgcaggccgagaccugcaaggugcagagcaaccgcguguucugcgacaccaugaacucccugacgcugcccagcgagguaaaccucugcaacgucgacaucuucaaccccaaguacgacugcaagaucaugaccuccaagaccgacgugagcuccagcgugaucaccucccugggggccaucgucagcugcuacggcaagacgaagugcaccgccagcaacaagaaccgggggaucaucaagaccuucuccaacggcugcgacuacgugagcaacaagggcguggacaccguguccgucgggaacacccuguacuacgugaacaagcaggagggcaagagccucuacgugaagggggagcccaucaucaacuucuacgacccgcuggucuuccccuccgacgaguucgacgcgagcaucucccaggugaacgagaagaucaaccagagccuggccuucauccgcaaguccgacgagcugcuccacaacgugaacgccggcaagagcacgaccaacaucaugaucaccaccaucaucaucgucaucaucgugauccugcugucccucaucgccguggggcugcugcucuacugcaaggcccggugaggacuagucccuguucccagagcccacuuuuuuuucuuuuuuugaaauaaaauagccugucuuucagaucuaaaaaaaaaaaaaaaaaaaaaaaaaaaaaaaaaaaaaaaaaaaaaaaaaaaaaaaaaaaaaaaaugcaucccccccccccccccccccccccccccccccaaaggcucuuuucagagccaccagaauu

SEQ ID NO: 1277 - RNA, 1938 nt, Artificial Sequence
  mRNA product Design a-1 comprising derived and/or modified sequence from HRSV(A2)__F-del_DSCav1 (opt1)
gggagagucccgcagucggcguccagcggcucugcuuguucgugugugugucguugcaggccuuauucaagcuuaccauggagcugcucauccugaaggccaacgccaucaccaccauccugacggcggugaccuucugcuucgccagcggccagaacaucaccgaggaguucuaccaguccacgugcagcgccgucuccaagggguaccucagcgcccugcgcaccggcugguacaccuccgugaucaccaucgagcugagcaacaucaaggagaacaagugcaacgggaccgacgccaaggugaagcucaucaagcaggagcuggacaaguacaagaacgcggucacggagcugcagcuccugaugcaguccacccccgccaccaacaaccgggcccgccgggagcugccgcgcuucaugaacuacacccucaacaacgccaagaagacgaacgugacccugagcaagaagcggaagcgccgguuccugggcuuccuccugggggugggcuccgcgaucgccagcggcgucgccgugugcaaggugcugcaccucgagggggaggucaacaagaucaaguccgcccugcugagcaccaacaaggccguggugucccucagcaacggcgucuccgugcugaccuucaaggugcuggaccucaagaacuacaucgacaagcagcugcugcccauccucaacaagcagagcugcuccaucagcaacaucgagacggucaucgaguuccagcagaagaacaaccgccugcuggagaucacccgggaguucuccgugaacgcgggggugaccacccccgucagcacguacaugcucaccaacagcgagcugcugucccucaucaacgacaugcccaucaccaacgaccagaagaagcugaugagcaacaacgugcagaucgugcgccagcaguccuacagcaucaugugcaucaucaaggaggagguccuggccuacguggugcagcucccgcuguacggcgucaucgacacccccugcuggaagcugcacacgagcccccucugcaccaccaacaccaaggaggggagcaacaucugccugacgcggaccgaccgcggcugguacugcgacaacgccggcuccgugagcuucuucccccaggccgagaccugcaagguccaguccaaccggguguucugcgacaccaugaacagccugacgcucccguccgaggugaaccugugcaacgucgacaucuucaaccccaaguacgacugcaagaucaugaccagcaagaccgacguguccagcuccgugaucaccagccugggggccaucgucuccugcuacggcaagacgaagugcaccgcgagcaacaagaaccgcgggaucaucaagaccuucuccaacggcugcgacuacgugagcaacaagggcguggacaccgucagcguggggaacacccucuacuacgugaacaagcaggagggcaagucccuguacgucaagggggagcccaucaucaacuucuacgacccccugguguucccgagcgacgaguucgacgccuccaucagccaggugaacgagaagaucaaccagucccucgccuucauccggaaguccgacgagcugcugcacaacgucaacgccggcaaguccacgaccaacaucaugaucaccaccaucaucaucgugaucaucgugauccugcucagccugaucgccgucgggcugcuccuguacugcaaggcgcgcugaggacuagucccuguucccagagcccacuuuuuuuucuuuuuuugaaauaaaauagccugucuuucagaucuaaaaaaaaaaaaaaaaaaaaaaaaaaaaaaaaaaaaaaaaaaaaaaaaaaaaaaaaaaaaaaaaugcaucccccccccccccccccccccccccccccccaaaggcucuuuucagagccaccagaauu

SEQ ID NO: 1278 - RNA, 1938 nt, Artificial Sequence
  mRNA product Design a-1 comprising derived and/or modified sequence from HRSV(A2)__F-del_DSCav1 (opt2)
gggagagucccgcagucggcguccagcggcucugcuuguucgugugugugucguugcaggccuuauucaagcuuaccauggagcuccucauccucaaggccaacgccaucaccaccauccucaccgccgucaccuucugcuucgccuccggccagaacaucaccgaggaguucuaccaguccaccugcuccgccgucuccaagggcuaccucuccgcccuccgcaccggcugguacaccuccgucaucaccaucgagcucuccaacaucaaggagaacaagugcaacggcaccgacgccaaggucaagcucaucaagcaggagcucgacaaguacaagaacgccgucaccgagcuccagcuccucaugcaguccacccccgccaccaacaaccgcgcccgccgcgagcucccccgcuucaugaacuacacccucaacaacgccaagaagaccaacgucacccucuccaagaagcgcaagcgccgcuuccucggcuuccuccucggcgucggcuccgccaucgccuccggcgucgccgucugcaagguccuccaccucgagggcgaggucaacaagaucaaguccgcccuccucuccaccaacaaggccgucgucucccucuccaacggcgucuccguccucaccuucaagguccucgaccucaagaacuacaucgacaagcagcuccuccccauccucaacaagcaguccugcuccaucuccaacaucgagaccgucaucgaguuccagcagaagaacaaccgccuccucgagaucacccgcgaguucuccgucaacgccggcgucaccacccccgucuccaccuacaugcucaccaacuccgagcuccucucccucaucaacgacaugcccaucaccaacgaccagaagaagcucauguccaacaacguccagaucguccgccagcaguccuacuccaucaugugcaucaucaaggaggagguccucgccuacgucguccagcucccccucuacggcgucaucgacacccccugcuggaagcuccacaccuccccccucugcaccaccaacaccaaggagggcuccaacaucugccucacccgcaccgaccgcggcugguacugcgacaacgccggcuccgucuccuucuucccccaggccgagaccugcaagguccaguccaaccgcgucuucugcgacaccaugaacucccucacccuccccuccgaggucaaccucugcaacgucgacaucuucaaccccaaguacgacugcaagaucaugaccuccaagaccgacgucuccuccuccgucaucaccucccucggcgccaucgucuccugcuacggcaagaccaagugcaccgccuccaacaagaaccgcggcaucaucaagaccuucuccaacggcugcgacuacgucuccaacaagggcgucgacaccgucuccgucggcaacacccucuacuacgucaacaagcaggagggcaagucccucuacgucaagggcgagcccaucaucaacuucuacgacccccucgucuuccccuccgacgaguucgacgccuccaucucccaggucaacgagaagaucaaccagucccucgccuucauccgcaaguccgacgagcuccuccacaacgucaacgccggcaaguccaccaccaacaucaugaucaccaccaucaucaucgucaucaucgucauccuccucucccucaucgccgucggccuccuccucuacugcaaggcccgcugaggacuagucccuguucccagagcccacuuuuuuuucuuuuuuugaaauaaaauagccugucuuucagaucuaaaaaaaaaaaaaaaaaaaaaaaaaaaaaaaaaaaaaaaaaaaaaaaaaaaaaaaaaaaaaaaaugcaucccccccccccccccccccccccccccccccaaaggcucuuuucagagccaccagaauu

SEQ ID NO: 1279 - RNA, 1938 nt, Artificial Sequence
  mRNA product Design a-1 comprising derived and/or modified sequence from HRSV(A2)__F-del_DSCav1 (opt3)
gggagagucccgcagucggcguccagcggcucugcuuguucgugugugugucguugcaggccuuauucaagcuuaccauggagcugcucauccuuaaggccaacgcuauuaccacaauacugacugcagugacguucugcuuugccagcggccagaauaucaccgaagaguucuaccaauccacauguucugcggucucaaaaggguauuugagugcuuuaagaacuggaugguacaccagcguuauuacaaucgaacuguccaacauuaaggagaauaaaugcaacgguaccgacgccaaggugaaacuaaucaagcaggaacucgauaaguauaaaaaugcaguaacugagcugcagcuucugaugcagucuacacccgccaccaacaauagggcucggcgcgaguugccucgauuuaugaacuacacgcucaauaacgcaaagaaaacuaaugugacccugucgaagaaacguaagagaagguuccugggcuuucucuuaggggucggaucagccauagcuagcggcguggccguuuguaaggugcugcaccuugaaggugaggucaacaaaaucaagagugcguugcuguccacaaauaaagcagugguaucucuaagcaacgggguuuccgugcucacuuucaagguccuggaccuuaaaaauuauauugauaagcaacuguugccaauccucaacaaacagucaugcaguauuagcaacaucgaaaccgugauagaguuucagcagaagaauaaccggcuguuagagauuacacgcgaguucucugugaaugccggagucaccacgccgguuuccacuuacaugcugacaaacucagaacuccuuagccugaucaaugacaugcccauuaccaacgaucaaaagaaauugaugaguaauaacgugcagaucguaagacagcagucuuauuccaucauguguauuauaaaggaagaggugcuagcuuacgucgugcaacugccucucuacggcguuaucgacacuccaugcuggaaacugcauacaagcccccuuuguaccacgaauaccaaggaaggcucgaacauuugccugacaaggacugaucgggggugguauugugacaaugccggaucuguguccuuuuucccucaggcagagaccugcaaaguccagucaaaccgcguguuuugugauacaaugaauaguuugacucucccaagcgagguaaaccugugcaauguugacaucuucaaccccaaguacgauugcaagauaaugaccuccaaaacagacgugucuagcucagucauuaccaguuuaggugcuaucguguccuguuauggcaagacuaaaugcacggccagcaacaagaaucgagggaucauuaaaacauuuucuaacggaugugauuacgucucaaauaagggcguggacaccguuaguguggguaacacucuguauuacguaaauaagcaagaagggaaaagccuauaugucaagggagagccuaucauuaacuucuacgacccacucguguucccguccgaugaauuugacgcgucuauaucgcagguuaaugagaaaaucaaccagagccuggccuucauuagaaaguccgaugaacuuuugcacaaugugaacgcaggcaaaucaaccacaaauaucaugaucaccacuauuauaaucgucauuaucgugauucugcucagucugaucgcuguaggccuucuguuguacugcaaggccaggugaggacuagucccuguucccagagcccacuuuuuuuucuuuuuuugaaauaaaauagccugucuuucagaucuaaaaaaaaaaaaaaaaaaaaaaaaaaaaaaaaaaaaaaaaaaaaaaaaaaaaaaaaaaaaaaaaugcaucccccccccccccccccccccccccccccccaaaggcucuuuucagagccaccagaauu

SEQ ID NO: 1280 - RNA, 1938 nt, Artificial Sequence
  mRNA product Design a-1 comprising derived and/or modified sequence from HRSV(A2)__F-del_DSCav1 (opt4)
gggagagucccgcagucggcguccagcggcucugcuuguucgugugugugucguugcaggccuuauucaagcuuaccauggagcugcugauccugaaggccaacgccaucaccaccauccugaccgccgugaccuucugcuucgccagcggccagaacaucaccgaggaguucuaccagagcaccugcagcgccgugagcaagggcuaccugagcgcccugagaaccggcugguacaccagcgugaucaccaucgagcugagcaacaucaaggagaacaagugcaacggcaccgacgccaaggugaagcugaucaagcaggagcuggacaaguacaagaacgccgugaccgagcugcagcugcugaugcagagcacccccgccaccaacaacagagccagaagagagcugcccagauucaugaacuacacccugaacaacgccaagaagaccaacgugacccugagcaagaagagaaagagaagauuccugggcuuccugcugggcgugggcagcgccaucgccagcggcguggccgugugcaaggugcugcaccuggagggcgaggugaacaagaucaagagcgcccugcugagcaccaacaaggccguggugagccugagcaacggcgugagcgugcugaccuucaaggugcuggaccugaagaacuacaucgacaagcagcugcugcccauccugaacaagcagagcugcagcaucagcaacaucgagaccgugaucgaguuccagcagaagaacaacagacugcuggagaucaccagagaguucagcgugaacgccggcgugaccacccccgugagcaccuacaugcugaccaacagcgagcugcugagccugaucaacgacaugcccaucaccaacgaccagaagaagcugaugagcaacaacgugcagaucgugagacagcagagcuacagcaucaugugcaucaucaaggaggaggugcuggccuacguggugcagcugccccuguacggcgugaucgacacccccugcuggaagcugcacaccagcccccugugcaccaccaacaccaaggagggcagcaacaucugccugaccagaaccgacagaggcugguacugcgacaacgccggcagcgugagcuucuucccccaggccgagaccugcaaggugcagagcaacagaguguucugcgacaccaugaacagccugacccugcccagcgaggugaaccugugcaacguggacaucuucaaccccaaguacgacugcaagaucaugaccagcaagaccgacgugagcagcagcgugaucaccagccugggcgccaucgugagcugcuacggcaagaccaagugcaccgccagcaacaagaacagaggcaucaucaagaccuucagcaacggcugcgacuacgugagcaacaagggcguggacaccgugagcgugggcaacacccuguacuacgugaacaagcaggagggcaagagccuguacgugaagggcgagcccaucaucaacuucuacgacccccugguguuccccagcgacgaguucgacgccagcaucagccaggugaacgagaagaucaaccagagccuggccuucaucagaaagagcgacgagcugcugcacaacgugaacgccggcaagagcaccaccaacaucaugaucaccaccaucaucaucgugaucaucgugauccugcugagccugaucgccgugggccugcugcuguacugcaaggccagaugaggacuagucccuguucccagagcccacuuuuuuuucuuuuuuugaaauaaaauagccugucuuucagaucuaaaaaaaaaaaaaaaaaaaaaaaaaaaaaaaaaaaaaaaaaaaaaaaaaaaaaaaaaaaaaaaaugcaucccccccccccccccccccccccccccccccaaaggcucuuuucagagccaccagaauu

SEQ ID NO: 1281 - RNA, 1938 nt, Artificial Sequence
  mRNA product Design a-1 comprising derived and/or modified sequence from HRSV(A2)__F-del_DSCav1 (opt5)
gggagagucccgcagucggcguccagcggcucugcuuguucgugugugugucguugcaggccuuauucaagcuuaccauggagcugcucauccugaaggccaacgcuauuaccacaauccuuacggccgugaccuucugcuuugcgagcggccagaauauuacagaagaguucuaccaauccaccuguucugcugucagcaaaggguaucuguccgcccucagaacaggaugguacaccucuguuaucacaauugaacugagcaacaucaaggagaauaaaugcaacggcaccgacgccaaggugaaacuuaucaagcaggaacuggauaaguauaaaaaugcugugacggagcuccagcugcugaugcaguccacccccgccacaaacaaucgggcucgcagagagcucccucgguuuaugaacuacacccugaauaacgccaagaaaacaaaugucacccuuucuaagaaacgcaagagacgguuccugggguuucuccugggagugggcagcgcgauugccuccgggguugcuguguguaagguccuucaccuggaaggagaggugaacaaaaucaagagcgcccuccugucuacgaauaaagcuguugugucccugagcaacggcgucucugugcucacauucaaggugcuggaccuuaaaaauuauauugauaagcaacugcucccgauccugaacaaacaguccugcagcauuucuaacaucgaaaccgucauugaguuucagcagaagaauaaccgccuucuggagaucacaagagaauuuuccguuaaugccggcgugaccacccccgugagcacauacaugcucacgaacuccgagcugcugucucucaucaaugacaugccuauuaccaacgaucaaaagaaacugaugagcaauaacguccagaucgugcggcagcaguccuauagcauuauguguaucauuaaggaagagguucuugcguacgugguccaacugccccucuacggggugaucgacacaccuugcuggaaacugcauaccucuccccuuuguacaaccaauacgaaggaaggauccaacaucugccugacacgcaccgauagaggcugguauugugacaaugccgggagcguuucuuucuucccucaggcugagaccugcaaagugcagagcaaccgggucuuuugugauacaaugaacucccucacccugccgucugaggugaaucugugcaaugucgacauuuucaaccccaaguacgauugcaagaucaugacaagcaaaacggacguguccagcucuguuauuaccucccucggagccaucgugagcuguuauggcaagacaaaaugcaccgcuucuaacaagaaucgcgggauuaucaaaacauuuuccaacggaugugauuacgucagcaauaagggcguggacaccguuuccgugggcaacacgcuguauuacgucaauaagcaagaagggaaaucucuuuaugugaagggagagccuaucauuaacuucuacgacccccugguguucccuagcgaugaauuugacgccuccaucucucagguuaaugagaaaauuaaccagagccucgccuucaucagaaaguccgaugaacugcugcacaaugucaacgcuggcaaaagcaccacaaauauuaugaucaccacaauuaucaucgugauuaucgugauucuucucucucugaucgcggucgggcugcuccuguacugcaaggcccggugaggacuagucccuguucccagagcccacuuuuuuuucuuuuuuugaaauaaaauagccugucuuucagaucuaaaaaaaaaaaaaaaaaaaaaaaaaaaaaaaaaaaaaaaaaaaaaaaaaaaaaaaaaaaaaaaaugcaucccccccccccccccccccccccccccccccaaaggcucuuuucagagccaccagaauu

SEQ ID NO: 1282 - RNA, 1938 nt, Artificial Sequence
  mRNA product Design a-1 comprising derived and/or modified sequence from HRSV(A2)__F-del_DSCav1 (opt6)
gggagagucccgcagucggcguccagcggcucugcuuguucgugugugugucguugcaggccuuauucaagcuuaccauggaacuauuaauauuaaaagcaaaugcuauuaccacaauacuuacugcuguaaccuucugcuuugccucuggccaaaacauaacagaagaauuuuaucaaucaacuugcuccgcuguaagcaaaggcuaccuaucagcauuacgcaccggcugguacacaucaguaauaacaauagaacuauccaacauaaaagaaaauaaaugcaacggaacagacgcaaaaguaaaauuaauaaaacaagaacucgacaaauacaaaaacgcaguaacagaauuacaacuacuaaugcaaaguacuccagccaccaacaacagagcaagaagagaauuaccacgauuuaugaacuacacacuaaacaaugcaaaaaaaacaaacguaacacuaucaaaaaaacguaaacgcagauucuuaggcuuccuccuagguguaggcucagcaaucgccucaggaguggcaguuuguaaaguacuacaccuagaaggagaaguaaacaaaaucaaaucugcccuuuuaucgacaaacaaagcaguaguaucguuauccaauggagucucaguauugacauucaaaguauuagaccuaaaaaauuauauagauaaacaacucuuaccuaucuuaaauaaacaaagcugcucaauaaguaacauagaaaccguaauagaauuucaacaaaaaaacaauagacuccuugagaucacucgagaauuuucaguaaacgcagguguaacaacaccaguaagcacauacaugcuaacaaauagugaacuauuaucucuaauuaacgauaugcccauaaccaacgaucaaaaaaaacucaugaguaacaacguacaaauaguaagacaacaauccuauagcauaaugugcauuauaaaagaagaaguacuagcauauguaguccaacuaccacuauacggcguaauagacacaccaugcuggaaacuacacaccucaccccuaugcacaacaaauacaaaagaaggaucaaacauaugcuuaaccaggacagacagaggcugguacugcgauaacgcaggaucuguuucauucuucccccaagcagaaacaugcaaaguacaaucaaacagaguauuuugugauaccaugaacucacucacauuaccauccgaagucaaccucugcaacguagacauauucaaccccaaauacgacugcaaaauaaugaccucaaaaacagauguaucaucaucaguaaucacaucacuaggagcuaucguaucuuguuauggaaaaacaaaaugcacagcauccaacaaaaacagaggaauuaucaaaacauucucaaauggaugugacuauguaucaaacaaaggaguagacaccguaagcguaggcaauacacuauauuacguaaauaaacaagaaggaaaaucacuauacguaaaaggugaaccaauaauaaacuucuaugacccccuaguauucccaucagaugaauuugacgcaagcauaucacaagucaacgaaaaaauaaaccaaucacuggcauucauucgcaaaucagaugaacuucuccacaacguaaacgcugguaaaagcacuacaaacauaaugauaacaacaaucaucauugucauaauaguuauucuauuaucacuaaucgcaguaggauuacuacuauacuguaaagcgagguaaggacuagucccuguucccagagcccacuuuuuuuucuuuuuuugaaauaaaauagccugucuuucagaucuaaaaaaaaaaaaaaaaaaaaaaaaaaaaaaaaaaaaaaaaaaaaaaaaaaaaaaaaaaaaaaaaugcaucccccccccccccccccccccccccccccccaaaggcucuuuucagagccaccagaauu

SEQ ID NO: 1283 - RNA, 1938 nt, Artificial Sequence
  mRNA product Design a-1 comprising derived and/or modified sequence from HRSV(A2)__F-del_DSCav1 (opt11)
gggagagucccgcagucggcguccagcggcucugcuuguucgugugugugucguugcaggccuuauucaagcuuaccauggagcugcucauccugaaggccaacgccaucaccacaauccugacggcggugaccuucugcuucgccagcggccagaacaucaccgaggaguucuaccaguccacgugcagcgccgucuccaagggguaccucagcgcccugcgaaccggcugguacaccuccgugaucaccaucgagcugucaaacaucaaggagaacaagugcaacgggaccgaugccaagguuaagcucaucaagcaggagcuggacaaguacaagaacgcggucacggagcugcagcuccugaugcaguccacuccggcaaccaacaaccgcgccaggcgcgagcugccccgguucaugaacuacacccucaacaacgccaagaagacgaaugugacccugagcaagaagcgcaagcggcgcuuccugggcuuccuccuaggggugggcuccgccaucgcgagcggcgucgccgugugcaagguguugcaccucgagggggaggucaacaagaucaagagcgcccugcuguccaccaacaaggccgugguaagccucuccaacggcgucagcguucugaccuucaaggugcuggaccucaagaacuauaucgacaagcagcugcugcccauccugaacaagcagagcugcuccaucucaaacaucgaaacggugauugaguuccagcagaagaacaaccggcuccuggaaaucacccgcgaguucagcgugaacgccggggucaccacccccguguccacguacaugcugaccaacagcgagcuccuaucccugaucaacgacaugccgaucaccaacgaccagaagaagcucaugagcaacaacgugcagaucguccggcagcaguccuacagcaucaugugcaucaucaaggaagaggugcuggcguacgugguccagcugccccucuacggcgugaucgacacccccugcuggaagcugcacacgagcccccugugcacaaccaacaccaaggagggguccaacaucugccucacgcgcaccgaccggggcugguacugcgacaacgccggcagcgucuccuucuucccgcaggccgagaccugcaaggugcagagcaaccgcguguucugcgacaccaugaacucccugacgcugcccucugagguaaaccucugcaacgucgacaucuucaaccccaaguacgacugcaagaucaugaccuccaagacagacgugagcuccagcgugaucacaucccugggggccaucgucagcugcuacggcaagacuaaguguacugccagcaacaagaaccgggggaucaucaagaccuucuccaacggcugcgacuacgugagcaacaagggcguggacaccguguccgucgggaacacccuguacuacguuaauaagcaggagggcaagagccucuacgugaaaggggagcccaucauuaacuucuacgacccacugguuuuccccuccgacgaguucgacgcgagcaucucccaggugaacgagaagaucaaccagagccuggccuucauccgcaaguccgacgagcugcuccacaacgugaacgccggcaagagcacgaccaacaucaugaucaccaccaucaucaucgugaucaucgugauucugcugucccucaucgccguggggcugcugcuuuacugcaaggcccggugaggacuagucccuguucccagagcccacuuuuuuuucuuuuuuugaaauaaaauagccugucuuucagaucuaaaaaaaaaaaaaaaaaaaaaaaaaaaaaaaaaaaaaaaaaaaaaaaaaaaaaaaaaaaaaaaaugcaucccccccccccccccccccccccccccccccaaaggcucuuuucagagccaccagaauu

SEQ ID NO: 1284 - RNA, 1957 nt, Artificial Sequence
  mRNA product Design a-2 comprising derived and/or modified sequence from HRSV(A2)__F-del_DSCav1 (opt1)
gggagaguccgcucagccagguugcagaagcggcuuagcguguguccuaaucuucucucugcguguagguaggccugugccgcaaacaagcuuaccauggagcugcucauccugaaggccaacgccaucaccaccauccugacggcggugaccuucugcuucgccagcggccagaacaucaccgaggaguucuaccaguccacgugcagcgccgucuccaagggguaccucagcgcccugcggaccggcugguacaccuccgugaucaccaucgagcugagcaacaucaaggagaacaagugcaacgggaccgacgccaaggugaagcucaucaagcaggagcuggacaaguacaagaacgcggucacggagcugcagcuccugaugcaguccaccccggcaaccaacaaccgcgcccggcgcgagcugccccgguucaugaacuacacccucaacaacgccaagaagacgaacgugacccugagcaagaagcgcaagcggcgcuuccugggcuuccuccugggggugggcuccgccaucgcgagcggcgucgccgugugcaaggugcugcaccucgagggggaggucaacaagaucaagagcgcccugcuguccaccaacaaggccguggugagccucuccaacggcgucagcgugcugaccuucaaggugcuggaccucaagaacuacaucgacaagcagcugcugcccauccugaacaagcagagcugcuccaucagcaacaucgagacggugaucgaguuccagcagaagaacaaccggcuccuggagaucacccgcgaguucagcgugaacgccggggucaccacccccguguccacguacaugcugaccaacagcgagcuccugucccugaucaacgacaugccgaucaccaacgaccagaagaagcucaugagcaacaacgugcagaucguccggcagcaguccuacagcaucaugugcaucaucaaggaggaggugcuggcguacgugguccagcugccccucuacggcgugaucgacacccccugcuggaagcugcacacgagcccccugugcaccaccaacaccaaggagggguccaacaucugccucacgcgcaccgaccggggcugguacugcgacaacgccggcagcgucuccuucuucccgcaggccgagaccugcaaggugcagagcaaccgcguguucugcgacaccaugaacucccugacgcugcccagcgagguaaaccucugcaacgucgacaucuucaaccccaaguacgacugcaagaucaugaccuccaagaccgacgugagcuccagcgugaucaccucccugggggccaucgucagcugcuacggcaagacgaagugcaccgccagcaacaagaaccgggggaucaucaagaccuucuccaacggcugcgacuacgugagcaacaagggcguggacaccguguccgucgggaacacccuguacuacgugaacaagcaggagggcaagagccucuacgugaagggggagcccaucaucaacuucuacgacccgcuggucuuccccuccgacgaguucgacgcgagcaucucccaggugaacgagaagaucaaccagagccuggccuucauccgcaaguccgacgagcugcuccacaacgugaacgccggcaagagcacgaccaacaucaugaucaccaccaucaucaucgucaucaucgugauccugcugucccucaucgccguggggcugcugcucuacugcaaggcccggugaggacuagucccuguucccagagcccacuuuuuuuucuuuuuuugaaauaaaauagccugucuuucagaucuaaaaaaaaaaaaaaaaaaaaaaaaaaaaaaaaaaaaaaaaaaaaaaaaaaaaaaaaaaaaaaaaugcaucccccccccccccccccccccccccccccccaaaggcucuuuucagagccaccagaauu

SEQ ID NO: 1285 - RNA, 1957 nt, Artificial Sequence
  mRNA product Design a-2 comprising derived and/or modified sequence from HRSV(A2)__F-del_DSCav1 (opt1)
gggagaguccgcucagccagguugcagaagcggcuuagcguguguccuaaucuucucucugcguguagguaggccugugccgcaaacaagcuuaccauggagcugcucauccugaaggccaacgccaucaccaccauccugacggcggugaccuucugcuucgccagcggccagaacaucaccgaggaguucuaccaguccacgugcagcgccgucuccaagggguaccucagcgcccugcgcaccggcugguacaccuccgugaucaccaucgagcugagcaacaucaaggagaacaagugcaacgggaccgacgccaaggugaagcucaucaagcaggagcuggacaaguacaagaacgcggucacggagcugcagcuccugaugcaguccacccccgccaccaacaaccgggcccgccgggagcugccgcgcuucaugaacuacacccucaacaacgccaagaagacgaacgugacccugagcaagaagcggaagcgccgguuccugggcuuccuccugggggugggcuccgcgaucgccagcggcgucgccgugugcaaggugcugcaccucgagggggaggucaacaagaucaaguccgcccugcugagcaccaacaaggccguggugucccucagcaacggcgucuccgugcugaccuucaaggugcuggaccucaagaacuacaucgacaagcagcugcugcccauccucaacaagcagagcugcuccaucagcaacaucgagacggucaucgaguuccagcagaagaacaaccgccugcuggagaucacccgggaguucuccgugaacgcgggggugaccacccccgucagcacguacaugcucaccaacagcgagcugcugucccucaucaacgacaugcccaucaccaacgaccagaagaagcugaugagcaacaacgugcagaucgugcgccagcaguccuacagcaucaugugcaucaucaaggaggagguccuggccuacguggugcagcucccgcuguacggcgucaucgacacccccugcuggaagcugcacacgagcccccucugcaccaccaacaccaaggaggggagcaacaucugccugacgcggaccgaccgcggcugguacugcgacaacgccggcuccgugagcuucuucccccaggccgagaccugcaagguccaguccaaccggguguucugcgacaccaugaacagccugacgcucccguccgaggugaaccugugcaacgucgacaucuucaaccccaaguacgacugcaagaucaugaccagcaagaccgacguguccagcuccgugaucaccagccugggggccaucgucuccugcuacggcaagacgaagugcaccgcgagcaacaagaaccgcgggaucaucaagaccuucuccaacggcugcgacuacgugagcaacaagggcguggacaccgucagcguggggaacacccucuacuacgugaacaagcaggagggcaagucccuguacgucaagggggagcccaucaucaacuucuacgacccccugguguucccgagcgacgaguucgacgccuccaucagccaggugaacgagaagaucaaccagucccucgccuucauccggaaguccgacgagcugcugcacaacgucaacgccggcaaguccacgaccaacaucaugaucaccaccaucaucaucgugaucaucgugauccugcucagccugaucgccgucgggcugcuccuguacugcaaggcgcgcugaggacuagucccuguucccagagcccacuuuuuuuucuuuuuuugaaauaaaauagccugucuuucagaucuaaaaaaaaaaaaaaaaaaaaaaaaaaaaaaaaaaaaaaaaaaaaaaaaaaaaaaaaaaaaaaaaugcaucccccccccccccccccccccccccccccccaaaggcucuuuucagagccaccagaauu

SEQ ID NO: 1286 - RNA, 1957 nt, Artificial Sequence
  mRNA product Design a-2 comprising derived and/or modified sequence from HRSV(A2)__F-del_DSCav1 (opt2)
gggagaguccgcucagccagguugcagaagcggcuuagcguguguccuaaucuucucucugcguguagguaggccugugccgcaaacaagcuuaccauggagcuccucauccucaaggccaacgccaucaccaccauccucaccgccgucaccuucugcuucgccuccggccagaacaucaccgaggaguucuaccaguccaccugcuccgccgucuccaagggcuaccucuccgcccuccgcaccggcugguacaccuccgucaucaccaucgagcucuccaacaucaaggagaacaagugcaacggcaccgacgccaaggucaagcucaucaagcaggagcucgacaaguacaagaacgccgucaccgagcuccagcuccucaugcaguccacccccgccaccaacaaccgcgcccgccgcgagcucccccgcuucaugaacuacacccucaacaacgccaagaagaccaacgucacccucuccaagaagcgcaagcgccgcuuccucggcuuccuccucggcgucggcuccgccaucgccuccggcgucgccgucugcaagguccuccaccucgagggcgaggucaacaagaucaaguccgcccuccucuccaccaacaaggccgucgucucccucuccaacggcgucuccguccucaccuucaagguccucgaccucaagaacuacaucgacaagcagcuccuccccauccucaacaagcaguccugcuccaucuccaacaucgagaccgucaucgaguuccagcagaagaacaaccgccuccucgagaucacccgcgaguucuccgucaacgccggcgucaccacccccgucuccaccuacaugcucaccaacuccgagcuccucucccucaucaacgacaugcccaucaccaacgaccagaagaagcucauguccaacaacguccagaucguccgccagcaguccuacuccaucaugugcaucaucaaggaggagguccucgccuacgucguccagcucccccucuacggcgucaucgacacccccugcuggaagcuccacaccuccccccucugcaccaccaacaccaaggagggcuccaacaucugccucacccgcaccgaccgcggcugguacugcgacaacgccggcuccgucuccuucuucccccaggccgagaccugcaagguccaguccaaccgcgucuucugcgacaccaugaacucccucacccuccccuccgaggucaaccucugcaacgucgacaucuucaaccccaaguacgacugcaagaucaugaccuccaagaccgacgucuccuccuccgucaucaccucccucggcgccaucgucuccugcuacggcaagaccaagugcaccgccuccaacaagaaccgcggcaucaucaagaccuucuccaacggcugcgacuacgucuccaacaagggcgucgacaccgucuccgucggcaacacccucuacuacgucaacaagcaggagggcaagucccucuacgucaagggcgagcccaucaucaacuucuacgacccccucgucuuccccuccgacgaguucgacgccuccaucucccaggucaacgagaagaucaaccagucccucgccuucauccgcaaguccgacgagcuccuccacaacgucaacgccggcaaguccaccaccaacaucaugaucaccaccaucaucaucgucaucaucgucauccuccucucccucaucgccgucggccuccuccucuacugcaaggcccgcugaggacuagucccuguucccagagcccacuuuuuuuucuuuuuuugaaauaaaauagccugucuuucagaucuaaaaaaaaaaaaaaaaaaaaaaaaaaaaaaaaaaaaaaaaaaaaaaaaaaaaaaaaaaaaaaaaugcaucccccccccccccccccccccccccccccccaaaggcucuuuucagagccaccagaauu

SEQ ID NO: 1287 - RNA, 1957 nt, Artificial Sequence
  mRNA product Design a-2 comprising derived and/or modified sequence from HRSV(A2)__F-del_DSCav1 (opt3)
gggagaguccgcucagccagguugcagaagcggcuuagcguguguccuaaucuucucucugcguguagguaggccugugccgcaaacaagcuuaccauggagcugcucauccuuaaggccaacgcuauuaccacaauacugacugcagugacguucugcuuugccagcggccagaauaucaccgaagaguucuaccaauccacauguucugcggucucaaaaggguauuugagugcuuuaagaacuggaugguacaccagcguuauuacaaucgaacuguccaacauuaaggagaauaaaugcaacgguaccgacgccaaggugaaacuaaucaagcaggaacucgauaaguauaaaaaugcaguaacugagcugcagcuucugaugcagucuacacccgccaccaacaauagggcucggcgcgaguugccucgauuuaugaacuacacgcucaauaacgcaaagaaaacuaaugugacccugucgaagaaacguaagagaagguuccugggcuuucucuuaggggucggaucagccauagcuagcggcguggccguuuguaaggugcugcaccuugaaggugaggucaacaaaaucaagagugcguugcuguccacaaauaaagcagugguaucucuaagcaacgggguuuccgugcucacuuucaagguccuggaccuuaaaaauuauauugauaagcaacuguugccaauccucaacaaacagucaugcaguauuagcaacaucgaaaccgugauagaguuucagcagaagaauaaccggcuguuagagauuacacgcgaguucucugugaaugccggagucaccacgccgguuuccacuuacaugcugacaaacucagaacuccuuagccugaucaaugacaugcccauuaccaacgaucaaaagaaauugaugaguaauaacgugcagaucguaagacagcagucuuauuccaucauguguauuauaaaggaagaggugcuagcuuacgucgugcaacugccucucuacggcguuaucgacacuccaugcuggaaacugcauacaagcccccuuuguaccacgaauaccaaggaaggcucgaacauuugccugacaaggacugaucgggggugguauugugacaaugccggaucuguguccuuuuucccucaggcagagaccugcaaaguccagucaaaccgcguguuuugugauacaaugaauaguuugacucucccaagcgagguaaaccugugcaauguugacaucuucaaccccaaguacgauugcaagauaaugaccuccaaaacagacgugucuagcucagucauuaccaguuuaggugcuaucguguccuguuauggcaagacuaaaugcacggccagcaacaagaaucgagggaucauuaaaacauuuucuaacggaugugauuacgucucaaauaagggcguggacaccguuaguguggguaacacucuguauuacguaaauaagcaagaagggaaaagccuauaugucaagggagagccuaucauuaacuucuacgacccacucguguucccguccgaugaauuugacgcgucuauaucgcagguuaaugagaaaaucaaccagagccuggccuucauuagaaaguccgaugaacuuuugcacaaugugaacgcaggcaaaucaaccacaaauaucaugaucaccacuauuauaaucgucauuaucgugauucugcucagucugaucgcuguaggccuucuguuguacugcaaggccaggugaggacuagucccuguucccagagcccacuuuuuuuucuuuuuuugaaauaaaauagccugucuuucagaucuaaaaaaaaaaaaaaaaaaaaaaaaaaaaaaaaaaaaaaaaaaaaaaaaaaaaaaaaaaaaaaaaugcaucccccccccccccccccccccccccccccccaaaggcucuuuucagagccaccagaauu

SEQ ID NO: 1288 - RNA, 1957 nt, Artificial Sequence
  mRNA product Design a-2 comprising derived and/or modified sequence from HRSV(A2)__F-del_DSCav1 (opt4)
gggagaguccgcucagccagguugcagaagcggcuuagcguguguccuaaucuucucucugcguguagguaggccugugccgcaaacaagcuuaccauggagcugcugauccugaaggccaacgccaucaccaccauccugaccgccgugaccuucugcuucgccagcggccagaacaucaccgaggaguucuaccagagcaccugcagcgccgugagcaagggcuaccugagcgcccugagaaccggcugguacaccagcgugaucaccaucgagcugagcaacaucaaggagaacaagugcaacggcaccgacgccaaggugaagcugaucaagcaggagcuggacaaguacaagaacgccgugaccgagcugcagcugcugaugcagagcacccccgccaccaacaacagagccagaagagagcugcccagauucaugaacuacacccugaacaacgccaagaagaccaacgugacccugagcaagaagagaaagagaagauuccugggcuuccugcugggcgugggcagcgccaucgccagcggcguggccgugugcaaggugcugcaccuggagggcgaggugaacaagaucaagagcgcccugcugagcaccaacaaggccguggugagccugagcaacggcgugagcgugcugaccuucaaggugcuggaccugaagaacuacaucgacaagcagcugcugcccauccugaacaagcagagcugcagcaucagcaacaucgagaccgugaucgaguuccagcagaagaacaacagacugcuggagaucaccagagaguucagcgugaacgccggcgugaccacccccgugagcaccuacaugcugaccaacagcgagcugcugagccugaucaacgacaugcccaucaccaacgaccagaagaagcugaugagcaacaacgugcagaucgugagacagcagagcuacagcaucaugugcaucaucaaggaggaggugcuggccuacguggugcagcugccccuguacggcgugaucgacacccccugcuggaagcugcacaccagcccccugugcaccaccaacaccaaggagggcagcaacaucugccugaccagaaccgacagaggcugguacugcgacaacgccggcagcgugagcuucuucccccaggccgagaccugcaaggugcagagcaacagaguguucugcgacaccaugaacagccugacccugcccagcgaggugaaccugugcaacguggacaucuucaaccccaaguacgacugcaagaucaugaccagcaagaccgacgugagcagcagcgugaucaccagccugggcgccaucgugagcugcuacggcaagaccaagugcaccgccagcaacaagaacagaggcaucaucaagaccuucagcaacggcugcgacuacgugagcaacaagggcguggacaccgugagcgugggcaacacccuguacuacgugaacaagcaggagggcaagagccuguacgugaagggcgagcccaucaucaacuucuacgacccccugguguuccccagcgacgaguucgacgccagcaucagccaggugaacgagaagaucaaccagagccuggccuucaucagaaagagcgacgagcugcugcacaacgugaacgccggcaagagcaccaccaacaucaugaucaccaccaucaucaucgugaucaucgugauccugcugagccugaucgccgugggccugcugcuguacugcaaggccagaugaggacuagucccuguucccagagcccacuuuuuuuucuuuuuuugaaauaaaauagccugucuuucagaucuaaaaaaaaaaaaaaaaaaaaaaaaaaaaaaaaaaaaaaaaaaaaaaaaaaaaaaaaaaaaaaaaugcaucccccccccccccccccccccccccccccccaaaggcucuuuucagagccaccagaauu

SEQ ID NO: 1289 - RNA, 1957 nt, Artificial Sequence
  mRNA product Design a-2 comprising derived and/or modified sequence from HRSV(A2)__F-del_DSCav1 (opt5)
gggagaguccgcucagccagguugcagaagcggcuuagcguguguccuaaucuucucucugcguguagguaggccugugccgcaaacaagcuuaccauggagcugcucauccugaaggccaacgcuauuaccacaauccuuacggccgugaccuucugcuuugcgagcggccagaauauuacagaagaguucuaccaauccaccuguucugcugucagcaaaggguaucuguccgcccucagaacaggaugguacaccucuguuaucacaauugaacugagcaacaucaaggagaauaaaugcaacggcaccgacgccaaggugaaacuuaucaagcaggaacuggauaaguauaaaaaugcugugacggagcuccagcugcugaugcaguccacccccgccacaaacaaucgggcucgcagagagcucccucgguuuaugaacuacacccugaauaacgccaagaaaacaaaugucacccuuucuaagaaacgcaagagacgguuccugggguuucuccugggagugggcagcgcgauugccuccgggguugcuguguguaagguccuucaccuggaaggagaggugaacaaaaucaagagcgcccuccugucuacgaauaaagcuguugugucccugagcaacggcgucucugugcucacauucaaggugcuggaccuuaaaaauuauauugauaagcaacugcucccgauccugaacaaacaguccugcagcauuucuaacaucgaaaccgucauugaguuucagcagaagaauaaccgccuucuggagaucacaagagaauuuuccguuaaugccggcgugaccacccccgugagcacauacaugcucacgaacuccgagcugcugucucucaucaaugacaugccuauuaccaacgaucaaaagaaacugaugagcaauaacguccagaucgugcggcagcaguccuauagcauuauguguaucauuaaggaagagguucuugcguacgugguccaacugccccucuacggggugaucgacacaccuugcuggaaacugcauaccucuccccuuuguacaaccaauacgaaggaaggauccaacaucugccugacacgcaccgauagaggcugguauugugacaaugccgggagcguuucuuucuucccucaggcugagaccugcaaagugcagagcaaccgggucuuuugugauacaaugaacucccucacccugccgucugaggugaaucugugcaaugucgacauuuucaaccccaaguacgauugcaagaucaugacaagcaaaacggacguguccagcucuguuauuaccucccucggagccaucgugagcuguuauggcaagacaaaaugcaccgcuucuaacaagaaucgcgggauuaucaaaacauuuuccaacggaugugauuacgucagcaauaagggcguggacaccguuuccgugggcaacacgcuguauuacgucaauaagcaagaagggaaaucucuuuaugugaagggagagccuaucauuaacuucuacgacccccugguguucccuagcgaugaauuugacgccuccaucucucagguuaaugagaaaauuaaccagagccucgccuucaucagaaaguccgaugaacugcugcacaaugucaacgcuggcaaaagcaccacaaauauuaugaucaccacaauuaucaucgugauuaucgugauucuucucucucugaucgcggucgggcugcuccuguacugcaaggcccggugaggacuagucccuguucccagagcccacuuuuuuuucuuuuuuugaaauaaaauagccugucuuucagaucuaaaaaaaaaaaaaaaaaaaaaaaaaaaaaaaaaaaaaaaaaaaaaaaaaaaaaaaaaaaaaaaaugcaucccccccccccccccccccccccccccccccaaaggcucuuuucagagccaccagaauu

SEQ ID NO: 1290 - RNA, 1957 nt, Artificial Sequence
  mRNA product Design a-2 comprising derived and/or modified sequence from HRSV(A2)__F-del_DSCav1 (opt6)
gggagaguccgcucagccagguugcagaagcggcuuagcguguguccuaaucuucucucugcguguagguaggccugugccgcaaacaagcuuaccauggaacuauuaauauuaaaagcaaaugcuauuaccacaauacuuacugcuguaaccuucugcuuugccucuggccaaaacauaacagaagaauuuuaucaaucaacuugcuccgcuguaagcaaaggcuaccuaucagcauuacgcaccggcugguacacaucaguaauaacaauagaacuauccaacauaaaagaaaauaaaugcaacggaacagacgcaaaaguaaaauuaauaaaacaagaacucgacaaauacaaaaacgcaguaacagaauuacaacuacuaaugcaaaguacuccagccaccaacaacagagcaagaagagaauuaccacgauuuaugaacuacacacuaaacaaugcaaaaaaaacaaacguaacacuaucaaaaaaacguaaacgcagauucuuaggcuuccuccuagguguaggcucagcaaucgccucaggaguggcaguuuguaaaguacuacaccuagaaggagaaguaaacaaaaucaaaucugcccuuuuaucgacaaacaaagcaguaguaucguuauccaauggagucucaguauugacauucaaaguauuagaccuaaaaaauuauauagauaaacaacucuuaccuaucuuaaauaaacaaagcugcucaauaaguaacauagaaaccguaauagaauuucaacaaaaaaacaauagacuccuugagaucacucgagaauuuucaguaaacgcagguguaacaacaccaguaagcacauacaugcuaacaaauagugaacuauuaucucuaauuaacgauaugcccauaaccaacgaucaaaaaaaacucaugaguaacaacguacaaauaguaagacaacaauccuauagcauaaugugcauuauaaaagaagaaguacuagcauauguaguccaacuaccacuauacggcguaauagacacaccaugcuggaaacuacacaccucaccccuaugcacaacaaauacaaaagaaggaucaaacauaugcuuaaccaggacagacagaggcugguacugcgauaacgcaggaucuguuucauucuucccccaagcagaaacaugcaaaguacaaucaaacagaguauuuugugauaccaugaacucacucacauuaccauccgaagucaaccucugcaacguagacauauucaaccccaaauacgacugcaaaauaaugaccucaaaaacagauguaucaucaucaguaaucacaucacuaggagcuaucguaucuuguuauggaaaaacaaaaugcacagcauccaacaaaaacagaggaauuaucaaaacauucucaaauggaugugacuauguaucaaacaaaggaguagacaccguaagcguaggcaauacacuauauuacguaaauaaacaagaaggaaaaucacuauacguaaaaggugaaccaauaauaaacuucuaugacccccuaguauucccaucagaugaauuugacgcaagcauaucacaagucaacgaaaaaauaaaccaaucacuggcauucauucgcaaaucagaugaacuucuccacaacguaaacgcugguaaaagcacuacaaacauaaugauaacaacaaucaucauugucauaauaguuauucuauuaucacuaaucgcaguaggauuacuacuauacuguaaagcgagguaaggacuagucccuguucccagagcccacuuuuuuuucuuuuuuugaaauaaaauagccugucuuucagaucuaaaaaaaaaaaaaaaaaaaaaaaaaaaaaaaaaaaaaaaaaaaaaaaaaaaaaaaaaaaaaaaaugcaucccccccccccccccccccccccccccccccaaaggcucuuuucagagccaccagaauu

SEQ ID NO: 1291 - RNA, 1957 nt, Artificial Sequence
  mRNA product Design a-2 comprising derived and/or modified sequence from HRSV(A2)__F-del_DSCav1 (opt11)
gggagaguccgcucagccagguugcagaagcggcuuagcguguguccuaaucuucucucugcguguagguaggccugugccgcaaacaagcuuaccauggagcugcucauccugaaggccaacgccaucaccacaauccugacggcggugaccuucugcuucgccagcggccagaacaucaccgaggaguucuaccaguccacgugcagcgccgucuccaagggguaccucagcgcccugcgaaccggcugguacaccuccgugaucaccaucgagcugucaaacaucaaggagaacaagugcaacgggaccgaugccaagguuaagcucaucaagcaggagcuggacaaguacaagaacgcggucacggagcugcagcuccugaugcaguccacuccggcaaccaacaaccgcgccaggcgcgagcugccccgguucaugaacuacacccucaacaacgccaagaagacgaaugugacccugagcaagaagcgcaagcggcgcuuccugggcuuccuccuaggggugggcuccgccaucgcgagcggcgucgccgugugcaagguguugcaccucgagggggaggucaacaagaucaagagcgcccugcuguccaccaacaaggccgugguaagccucuccaacggcgucagcguucugaccuucaaggugcuggaccucaagaacuauaucgacaagcagcugcugcccauccugaacaagcagagcugcuccaucucaaacaucgaaacggugauugaguuccagcagaagaacaaccggcuccuggaaaucacccgcgaguucagcgugaacgccggggucaccacccccguguccacguacaugcugaccaacagcgagcuccuaucccugaucaacgacaugccgaucaccaacgaccagaagaagcucaugagcaacaacgugcagaucguccggcagcaguccuacagcaucaugugcaucaucaaggaagaggugcuggcguacgugguccagcugccccucuacggcgugaucgacacccccugcuggaagcugcacacgagcccccugugcacaaccaacaccaaggagggguccaacaucugccucacgcgcaccgaccggggcugguacugcgacaacgccggcagcgucuccuucuucccgcaggccgagaccugcaaggugcagagcaaccgcguguucugcgacaccaugaacucccugacgcugcccucugagguaaaccucugcaacgucgacaucuucaaccccaaguacgacugcaagaucaugaccuccaagacagacgugagcuccagcgugaucacaucccugggggccaucgucagcugcuacggcaagacuaaguguacugccagcaacaagaaccgggggaucaucaagaccuucuccaacggcugcgacuacgugagcaacaagggcguggacaccguguccgucgggaacacccuguacuacguuaauaagcaggagggcaagagccucuacgugaaaggggagcccaucauuaacuucuacgacccacugguuuuccccuccgacgaguucgacgcgagcaucucccaggugaacgagaagaucaaccagagccuggccuucauccgcaaguccgacgagcugcuccacaacgugaacgccggcaagagcacgaccaacaucaugaucaccaccaucaucaucgugaucaucgugauucugcugucccucaucgccguggggcugcugcuuuacugcaaggcccggugaggacuagucccuguucccagagcccacuuuuuuuucuuuuuuugaaauaaaauagccugucuuucagaucuaaaaaaaaaaaaaaaaaaaaaaaaaaaaaaaaaaaaaaaaaaaaaaaaaaaaaaaaaaaaaaaaugcaucccccccccccccccccccccccccccccccaaaggcucuuuucagagccaccagaauu

SEQ ID NO: 1292 - RNA, 2035 nt, Artificial Sequence
  mRNA product Design a-3 comprising derived and/or modified sequence from HRSV(A2)__F-del_DSCav1 (opt1)
gggagagggcgcuuggcuugcaaggacccugagcugcggcauugaagcacacccaacccaacucgacugaagucagccucacugaaccggaucugagaaucuucucucucugggcuugccagggcucuccgaaccuagcuagcauccucuucaauuccaacuagaaagcuuaccauggagcugcucauccugaaggccaacgccaucaccaccauccugacggcggugaccuucugcuucgccagcggccagaacaucaccgaggaguucuaccaguccacgugcagcgccgucuccaagggguaccucagcgcccugcggaccggcugguacaccuccgugaucaccaucgagcugagcaacaucaaggagaacaagugcaacgggaccgacgccaaggugaagcucaucaagcaggagcuggacaaguacaagaacgcggucacggagcugcagcuccugaugcaguccaccccggcaaccaacaaccgcgcccggcgcgagcugccccgguucaugaacuacacccucaacaacgccaagaagacgaacgugacccugagcaagaagcgcaagcggcgcuuccugggcuuccuccugggggugggcuccgccaucgcgagcggcgucgccgugugcaaggugcugcaccucgagggggaggucaacaagaucaagagcgcccugcuguccaccaacaaggccguggugagccucuccaacggcgucagcgugcugaccuucaaggugcuggaccucaagaacuacaucgacaagcagcugcugcccauccugaacaagcagagcugcuccaucagcaacaucgagacggugaucgaguuccagcagaagaacaaccggcuccuggagaucacccgcgaguucagcgugaacgccggggucaccacccccguguccacguacaugcugaccaacagcgagcuccugucccugaucaacgacaugccgaucaccaacgaccagaagaagcucaugagcaacaacgugcagaucguccggcagcaguccuacagcaucaugugcaucaucaaggaggaggugcuggcguacgugguccagcugccccucuacggcgugaucgacacccccugcuggaagcugcacacgagcccccugugcaccaccaacaccaaggagggguccaacaucugccucacgcgcaccgaccggggcugguacugcgacaacgccggcagcgucuccuucuucccgcaggccgagaccugcaaggugcagagcaaccgcguguucugcgacaccaugaacucccugacgcugcccagcgagguaaaccucugcaacgucgacaucuucaaccccaaguacgacugcaagaucaugaccuccaagaccgacgugagcuccagcgugaucaccucccugggggccaucgucagcugcuacggcaagacgaagugcaccgccagcaacaagaaccgggggaucaucaagaccuucuccaacggcugcgacuacgugagcaacaagggcguggacaccguguccgucgggaacacccuguacuacgugaacaagcaggagggcaagagccucuacgugaagggggagcccaucaucaacuucuacgacccgcuggucuuccccuccgacgaguucgacgcgagcaucucccaggugaacgagaagaucaaccagagccuggccuucauccgcaaguccgacgagcugcuccacaacgugaacgccggcaagagcacgaccaacaucaugaucaccaccaucaucaucgucaucaucgugauccugcugucccucaucgccguggggcugcugcucuacugcaaggcccggugaggacuagucccuguucccagagcccacuuuuuuuucuuuuuuugaaauaaaauagccugucuuucagaucuaaaaaaaaaaaaaaaaaaaaaaaaaaaaaaaaaaaaaaaaaaaaaaaaaaaaaaaaaaaaaaaaugcaucccccccccccccccccccccccccccccccaaaggcucuuuucagagccaccagaauu

SEQ ID NO: 1293 - RNA, 2035 nt, Artificial Sequence
  mRNA product Design a-3 comprising derived and/or modified sequence from HRSV(A2)__F-del_DSCav1 (opt1)
gggagagggcgcuuggcuugcaaggacccugagcugcggcauugaagcacacccaacccaacucgacugaagucagccucacugaaccggaucugagaaucuucucucucugggcuugccagggcucuccgaaccuagcuagcauccucuucaauuccaacuagaaagcuuaccauggagcugcucauccugaaggccaacgccaucaccaccauccugacggcggugaccuucugcuucgccagcggccagaacaucaccgaggaguucuaccaguccacgugcagcgccgucuccaagggguaccucagcgcccugcgcaccggcugguacaccuccgugaucaccaucgagcugagcaacaucaaggagaacaagugcaacgggaccgacgccaaggugaagcucaucaagcaggagcuggacaaguacaagaacgcggucacggagcugcagcuccugaugcaguccacccccgccaccaacaaccgggcccgccgggagcugccgcgcuucaugaacuacacccucaacaacgccaagaagacgaacgugacccugagcaagaagcggaagcgccgguuccugggcuuccuccugggggugggcuccgcgaucgccagcggcgucgccgugugcaaggugcugcaccucgagggggaggucaacaagaucaaguccgcccugcugagcaccaacaaggccguggugucccucagcaacggcgucuccgugcugaccuucaaggugcuggaccucaagaacuacaucgacaagcagcugcugcccauccucaacaagcagagcugcuccaucagcaacaucgagacggucaucgaguuccagcagaagaacaaccgccugcuggagaucacccgggaguucuccgugaacgcgggggugaccacccccgucagcacguacaugcucaccaacagcgagcugcugucccucaucaacgacaugcccaucaccaacgaccagaagaagcugaugagcaacaacgugcagaucgugcgccagcaguccuacagcaucaugugcaucaucaaggaggagguccuggccuacguggugcagcucccgcuguacggcgucaucgacacccccugcuggaagcugcacacgagcccccucugcaccaccaacaccaaggaggggagcaacaucugccugacgcggaccgaccgcggcugguacugcgacaacgccggcuccgugagcuucuucccccaggccgagaccugcaagguccaguccaaccggguguucugcgacaccaugaacagccugacgcucccguccgaggugaaccugugcaacgucgacaucuucaaccccaaguacgacugcaagaucaugaccagcaagaccgacguguccagcuccgugaucaccagccugggggccaucgucuccugcuacggcaagacgaagugcaccgcgagcaacaagaaccgcgggaucaucaagaccuucuccaacggcugcgacuacgugagcaacaagggcguggacaccgucagcguggggaacacccucuacuacgugaacaagcaggagggcaagucccuguacgucaagggggagcccaucaucaacuucuacgacccccugguguucccgagcgacgaguucgacgccuccaucagccaggugaacgagaagaucaaccagucccucgccuucauccggaaguccgacgagcugcugcacaacgucaacgccggcaaguccacgaccaacaucaugaucaccaccaucaucaucgugaucaucgugauccugcucagccugaucgccgucgggcugcuccuguacugcaaggcgcgcugaggacuagucccuguucccagagcccacuuuuuuuucuuuuuuugaaauaaaauagccugucuuucagaucuaaaaaaaaaaaaaaaaaaaaaaaaaaaaaaaaaaaaaaaaaaaaaaaaaaaaaaaaaaaaaaaaugcaucccccccccccccccccccccccccccccccaaaggcucuuuucagagccaccagaauu

SEQ ID NO: 1294 - RNA, 2035 nt, Artificial Sequence
  mRNA product Design a-3 comprising derived and/or modified sequence from HRSV(A2)__F-del_DSCav1 (opt2)
gggagagggcgcuuggcuugcaaggacccugagcugcggcauugaagcacacccaacccaacucgacugaagucagccucacugaaccggaucugagaaucuucucucucugggcuugccagggcucuccgaaccuagcuagcauccucuucaauuccaacuagaaagcuuaccauggagcuccucauccucaaggccaacgccaucaccaccauccucaccgccgucaccuucugcuucgccuccggccagaacaucaccgaggaguucuaccaguccaccugcuccgccgucuccaagggcuaccucuccgcccuccgcaccggcugguacaccuccgucaucaccaucgagcucuccaacaucaaggagaacaagugcaacggcaccgacgccaaggucaagcucaucaagcaggagcucgacaaguacaagaacgccgucaccgagcuccagcuccucaugcaguccacccccgccaccaacaaccgcgcccgccgcgagcucccccgcuucaugaacuacacccucaacaacgccaagaagaccaacgucacccucuccaagaagcgcaagcgccgcuuccucggcuuccuccucggcgucggcuccgccaucgccuccggcgucgccgucugcaagguccuccaccucgagggcgaggucaacaagaucaaguccgcccuccucuccaccaacaaggccgucgucucccucuccaacggcgucuccguccucaccuucaagguccucgaccucaagaacuacaucgacaagcagcuccuccccauccucaacaagcaguccugcuccaucuccaacaucgagaccgucaucgaguuccagcagaagaacaaccgccuccucgagaucacccgcgaguucuccgucaacgccggcgucaccacccccgucuccaccuacaugcucaccaacuccgagcuccucucccucaucaacgacaugcccaucaccaacgaccagaagaagcucauguccaacaacguccagaucguccgccagcaguccuacuccaucaugugcaucaucaaggaggagguccucgccuacgucguccagcucccccucuacggcgucaucgacacccccugcuggaagcuccacaccuccccccucugcaccaccaacaccaaggagggcuccaacaucugccucacccgcaccgaccgcggcugguacugcgacaacgccggcuccgucuccuucuucccccaggccgagaccugcaagguccaguccaaccgcgucuucugcgacaccaugaacucccucacccuccccuccgaggucaaccucugcaacgucgacaucuucaaccccaaguacgacugcaagaucaugaccuccaagaccgacgucuccuccuccgucaucaccucccucggcgccaucgucuccugcuacggcaagaccaagugcaccgccuccaacaagaaccgcggcaucaucaagaccuucuccaacggcugcgacuacgucuccaacaagggcgucgacaccgucuccgucggcaacacccucuacuacgucaacaagcaggagggcaagucccucuacgucaagggcgagcccaucaucaacuucuacgacccccucgucuuccccuccgacgaguucgacgccuccaucucccaggucaacgagaagaucaaccagucccucgccuucauccgcaaguccgacgagcuccuccacaacgucaacgccggcaaguccaccaccaacaucaugaucaccaccaucaucaucgucaucaucgucauccuccucucccucaucgccgucggccuccuccucuacugcaaggcccgcugaggacuagucccuguucccagagcccacuuuuuuuucuuuuuuugaaauaaaauagccugucuuucagaucuaaaaaaaaaaaaaaaaaaaaaaaaaaaaaaaaaaaaaaaaaaaaaaaaaaaaaaaaaaaaaaaaugcaucccccccccccccccccccccccccccccccaaaggcucuuuucagagccaccagaauu

SEQ ID NO: 1295 - RNA, 2035 nt, Artificial Sequence
  mRNA product Design a-3 comprising derived and/or modified sequence from HRSV(A2)__F-del_DSCav1 (opt3)
gggagagggcgcuuggcuugcaaggacccugagcugcggcauugaagcacacccaacccaacucgacugaagucagccucacugaaccggaucugagaaucuucucucucugggcuugccagggcucuccgaaccuagcuagcauccucuucaauuccaacuagaaagcuuaccauggagcugcucauccuuaaggccaacgcuauuaccacaauacugacugcagugacguucugcuuugccagcggccagaauaucaccgaagaguucuaccaauccacauguucugcggucucaaaaggguauuugagugcuuuaagaacuggaugguacaccagcguuauuacaaucgaacuguccaacauuaaggagaauaaaugcaacgguaccgacgccaaggugaaacuaaucaagcaggaacucgauaaguauaaaaaugcaguaacugagcugcagcuucugaugcagucuacacccgccaccaacaauagggcucggcgcgaguugccucgauuuaugaacuacacgcucaauaacgcaaagaaaacuaaugugacccugucgaagaaacguaagagaagguuccugggcuuucucuuaggggucggaucagccauagcuagcggcguggccguuuguaaggugcugcaccuugaaggugaggucaacaaaaucaagagugcguugcuguccacaaauaaagcagugguaucucuaagcaacgggguuuccgugcucacuuucaagguccuggaccuuaaaaauuauauugauaagcaacuguugccaauccucaacaaacagucaugcaguauuagcaacaucgaaaccgugauagaguuucagcagaagaauaaccggcuguuagagauuacacgcgaguucucugugaaugccggagucaccacgccgguuuccacuuacaugcugacaaacucagaacuccuuagccugaucaaugacaugcccauuaccaacgaucaaaagaaauugaugaguaauaacgugcagaucguaagacagcagucuuauuccaucauguguauuauaaaggaagaggugcuagcuuacgucgugcaacugccucucuacggcguuaucgacacuccaugcuggaaacugcauacaagcccccuuuguaccacgaauaccaaggaaggcucgaacauuugccugacaaggacugaucgggggugguauugugacaaugccggaucuguguccuuuuucccucaggcagagaccugcaaaguccagucaaaccgcguguuuugugauacaaugaauaguuugacucucccaagcgagguaaaccugugcaauguugacaucuucaaccccaaguacgauugcaagauaaugaccuccaaaacagacgugucuagcucagucauuaccaguuuaggugcuaucguguccuguuauggcaagacuaaaugcacggccagcaacaagaaucgagggaucauuaaaacauuuucuaacggaugugauuacgucucaaauaagggcguggacaccguuaguguggguaacacucuguauuacguaaauaagcaagaagggaaaagccuauaugucaagggagagccuaucauuaacuucuacgacccacucguguucccguccgaugaauuugacgcgucuauaucgcagguuaaugagaaaaucaaccagagccuggccuucauuagaaaguccgaugaacuuuugcacaaugugaacgcaggcaaaucaaccacaaauaucaugaucaccacuauuauaaucgucauuaucgugauucugcucagucugaucgcuguaggccuucuguuguacugcaaggccaggugaggacuagucccuguucccagagcccacuuuuuuuucuuuuuuugaaauaaaauagccugucuuucagaucuaaaaaaaaaaaaaaaaaaaaaaaaaaaaaaaaaaaaaaaaaaaaaaaaaaaaaaaaaaaaaaaaugcaucccccccccccccccccccccccccccccccaaaggcucuuuucagagccaccagaauu

SEQ ID NO: 1296 - RNA, 2035 nt, Artificial Sequence
  mRNA product Design a-3 comprising derived and/or modified sequence from HRSV(A2)__F-del_DSCav1 (opt4)
gggagagggcgcuuggcuugcaaggacccugagcugcggcauugaagcacacccaacccaacucgacugaagucagccucacugaaccggaucugagaaucuucucucucugggcuugccagggcucuccgaaccuagcuagcauccucuucaauuccaacuagaaagcuuaccauggagcugcugauccugaaggccaacgccaucaccaccauccugaccgccgugaccuucugcuucgccagcggccagaacaucaccgaggaguucuaccagagcaccugcagcgccgugagcaagggcuaccugagcgcccugagaaccggcugguacaccagcgugaucaccaucgagcugagcaacaucaaggagaacaagugcaacggcaccgacgccaaggugaagcugaucaagcaggagcuggacaaguacaagaacgccgugaccgagcugcagcugcugaugcagagcacccccgccaccaacaacagagccagaagagagcugcccagauucaugaacuacacccugaacaacgccaagaagaccaacgugacccugagcaagaagagaaagagaagauuccugggcuuccugcugggcgugggcagcgccaucgccagcggcguggccgugugcaaggugcugcaccuggagggcgaggugaacaagaucaagagcgcccugcugagcaccaacaaggccguggugagccugagcaacggcgugagcgugcugaccuucaaggugcuggaccugaagaacuacaucgacaagcagcugcugcccauccugaacaagcagagcugcagcaucagcaacaucgagaccgugaucgaguuccagcagaagaacaacagacugcuggagaucaccagagaguucagcgugaacgccggcgugaccacccccgugagcaccuacaugcugaccaacagcgagcugcugagccugaucaacgacaugcccaucaccaacgaccagaagaagcugaugagcaacaacgugcagaucgugagacagcagagcuacagcaucaugugcaucaucaaggaggaggugcuggccuacguggugcagcugccccuguacggcgugaucgacacccccugcuggaagcugcacaccagcccccugugcaccaccaacaccaaggagggcagcaacaucugccugaccagaaccgacagaggcugguacugcgacaacgccggcagcgugagcuucuucccccaggccgagaccugcaaggugcagagcaacagaguguucugcgacaccaugaacagccugacccugcccagcgaggugaaccugugcaacguggacaucuucaaccccaaguacgacugcaagaucaugaccagcaagaccgacgugagcagcagcgugaucaccagccugggcgccaucgugagcugcuacggcaagaccaagugcaccgccagcaacaagaacagaggcaucaucaagaccuucagcaacggcugcgacuacgugagcaacaagggcguggacaccgugagcgugggcaacacccuguacuacgugaacaagcaggagggcaagagccuguacgugaagggcgagcccaucaucaacuucuacgacccccugguguuccccagcgacgaguucgacgccagcaucagccaggugaacgagaagaucaaccagagccuggccuucaucagaaagagcgacgagcugcugcacaacgugaacgccggcaagagcaccaccaacaucaugaucaccaccaucaucaucgugaucaucgugauccugcugagccugaucgccgugggccugcugcuguacugcaaggccagaugaggacuagucccuguucccagagcccacuuuuuuuucuuuuuuugaaauaaaauagccugucuuucagaucuaaaaaaaaaaaaaaaaaaaaaaaaaaaaaaaaaaaaaaaaaaaaaaaaaaaaaaaaaaaaaaaaugcaucccccccccccccccccccccccccccccccaaaggcucuuuucagagccaccagaauu

SEQ ID NO: 1297 - RNA, 2035 nt, Artificial Sequence
  mRNA product Design a-3 comprising derived and/or modified sequence from HRSV(A2)__F-del_DSCav1 (opt5)
gggagagggcgcuuggcuugcaaggacccugagcugcggcauugaagcacacccaacccaacucgacugaagucagccucacugaaccggaucugagaaucuucucucucugggcuugccagggcucuccgaaccuagcuagcauccucuucaauuccaacuagaaagcuuaccauggagcugcucauccugaaggccaacgcuauuaccacaauccuuacggccgugaccuucugcuuugcgagcggccagaauauuacagaagaguucuaccaauccaccuguucugcugucagcaaaggguaucuguccgcccucagaacaggaugguacaccucuguuaucacaauugaacugagcaacaucaaggagaauaaaugcaacggcaccgacgccaaggugaaacuuaucaagcaggaacuggauaaguauaaaaaugcugugacggagcuccagcugcugaugcaguccacccccgccacaaacaaucgggcucgcagagagcucccucgguuuaugaacuacacccugaauaacgccaagaaaacaaaugucacccuuucuaagaaacgcaagagacgguuccugggguuucuccugggagugggcagcgcgauugccuccgggguugcuguguguaagguccuucaccuggaaggagaggugaacaaaaucaagagcgcccuccugucuacgaauaaagcuguugugucccugagcaacggcgucucugugcucacauucaaggugcuggaccuuaaaaauuauauugauaagcaacugcucccgauccugaacaaacaguccugcagcauuucuaacaucgaaaccgucauugaguuucagcagaagaauaaccgccuucuggagaucacaagagaauuuuccguuaaugccggcgugaccacccccgugagcacauacaugcucacgaacuccgagcugcugucucucaucaaugacaugccuauuaccaacgaucaaaagaaacugaugagcaauaacguccagaucgugcggcagcaguccuauagcauuauguguaucauuaaggaagagguucuugcguacgugguccaacugccccucuacggggugaucgacacaccuugcuggaaacugcauaccucuccccuuuguacaaccaauacgaaggaaggauccaacaucugccugacacgcaccgauagaggcugguauugugacaaugccgggagcguuucuuucuucccucaggcugagaccugcaaagugcagagcaaccgggucuuuugugauacaaugaacucccucacccugccgucugaggugaaucugugcaaugucgacauuuucaaccccaaguacgauugcaagaucaugacaagcaaaacggacguguccagcucuguuauuaccucccucggagccaucgugagcuguuauggcaagacaaaaugcaccgcuucuaacaagaaucgcgggauuaucaaaacauuuuccaacggaugugauuacgucagcaauaagggcguggacaccguuuccgugggcaacacgcuguauuacgucaauaagcaagaagggaaaucucuuuaugugaagggagagccuaucauuaacuucuacgacccccugguguucccuagcgaugaauuugacgccuccaucucucagguuaaugagaaaauuaaccagagccucgccuucaucagaaaguccgaugaacugcugcacaaugucaacgcuggcaaaagcaccacaaauauuaugaucaccacaauuaucaucgugauuaucgugauucuucucucucugaucgcggucgggcugcuccuguacugcaaggcccggugaggacuagucccuguucccagagcccacuuuuuuuucuuuuuuugaaauaaaauagccugucuuucagaucuaaaaaaaaaaaaaaaaaaaaaaaaaaaaaaaaaaaaaaaaaaaaaaaaaaaaaaaaaaaaaaaaugcaucccccccccccccccccccccccccccccccaaaggcucuuuucagagccaccagaauu

SEQ ID NO: 1298 - RNA, 2035 nt, Artificial Sequence
  mRNA product Design a-3 comprising derived and/or modified sequence from HRSV(A2)__F-del_DSCav1 (opt6)
gggagagggcgcuuggcuugcaaggacccugagcugcggcauugaagcacacccaacccaacucgacugaagucagccucacugaaccggaucugagaaucuucucucucugggcuugccagggcucuccgaaccuagcuagcauccucuucaauuccaacuagaaagcuuaccauggaacuauuaauauuaaaagcaaaugcuauuaccacaauacuuacugcuguaaccuucugcuuugccucuggccaaaacauaacagaagaauuuuaucaaucaacuugcuccgcuguaagcaaaggcuaccuaucagcauuacgcaccggcugguacacaucaguaauaacaauagaacuauccaacauaaaagaaaauaaaugcaacggaacagacgcaaaaguaaaauuaauaaaacaagaacucgacaaauacaaaaacgcaguaacagaauuacaacuacuaaugcaaaguacuccagccaccaacaacagagcaagaagagaauuaccacgauuuaugaacuacacacuaaacaaugcaaaaaaaacaaacguaacacuaucaaaaaaacguaaacgcagauucuuaggcuuccuccuagguguaggcucagcaaucgccucaggaguggcaguuuguaaaguacuacaccuagaaggagaaguaaacaaaaucaaaucugcccuuuuaucgacaaacaaagcaguaguaucguuauccaauggagucucaguauugacauucaaaguauuagaccuaaaaaauuauauagauaaacaacucuuaccuaucuuaaauaaacaaagcugcucaauaaguaacauagaaaccguaauagaauuucaacaaaaaaacaauagacuccuugagaucacucgagaauuuucaguaaacgcagguguaacaacaccaguaagcacauacaugcuaacaaauagugaacuauuaucucuaauuaacgauaugcccauaaccaacgaucaaaaaaaacucaugaguaacaacguacaaauaguaagacaacaauccuauagcauaaugugcauuauaaaagaagaaguacuagcauauguaguccaacuaccacuauacggcguaauagacacaccaugcuggaaacuacacaccucaccccuaugcacaacaaauacaaaagaaggaucaaacauaugcuuaaccaggacagacagaggcugguacugcgauaacgcaggaucuguuucauucuucccccaagcagaaacaugcaaaguacaaucaaacagaguauuuugugauaccaugaacucacucacauuaccauccgaagucaaccucugcaacguagacauauucaaccccaaauacgacugcaaaauaaugaccucaaaaacagauguaucaucaucaguaaucacaucacuaggagcuaucguaucuuguuauggaaaaacaaaaugcacagcauccaacaaaaacagaggaauuaucaaaacauucucaaauggaugugacuauguaucaaacaaaggaguagacaccguaagcguaggcaauacacuauauuacguaaauaaacaagaaggaaaaucacuauacguaaaaggugaaccaauaauaaacuucuaugacccccuaguauucccaucagaugaauuugacgcaagcauaucacaagucaacgaaaaaauaaaccaaucacuggcauucauucgcaaaucagaugaacuucuccacaacguaaacgcugguaaaagcacuacaaacauaaugauaacaacaaucaucauugucauaauaguuauucuauuaucacuaaucgcaguaggauuacuacuauacuguaaagcgagguaaggacuagucccuguucccagagcccacuuuuuuuucuuuuuuugaaauaaaauagccugucuuucagaucuaaaaaaaaaaaaaaaaaaaaaaaaaaaaaaaaaaaaaaaaaaaaaaaaaaaaaaaaaaaaaaaaugcaucccccccccccccccccccccccccccccccaaaggcucuuuucagagccaccagaauu

SEQ ID NO: 1299 - RNA, 2035 nt, Artificial Sequence
  mRNA product Design a-3 comprising derived and/or modified sequence from HRSV(A2)__F-del_DSCav1 (opt11)
gggagagggcgcuuggcuugcaaggacccugagcugcggcauugaagcacacccaacccaacucgacugaagucagccucacugaaccggaucugagaaucuucucucucugggcuugccagggcucuccgaaccuagcuagcauccucuucaauuccaacuagaaagcuuaccauggagcugcucauccugaaggccaacgccaucaccacaauccugacggcggugaccuucugcuucgccagcggccagaacaucaccgaggaguucuaccaguccacgugcagcgccgucuccaagggguaccucagcgcccugcgaaccggcugguacaccuccgugaucaccaucgagcugucaaacaucaaggagaacaagugcaacgggaccgaugccaagguuaagcucaucaagcaggagcuggacaaguacaagaacgcggucacggagcugcagcuccugaugcaguccacuccggcaaccaacaaccgcgccaggcgcgagcugccccgguucaugaacuacacccucaacaacgccaagaagacgaaugugacccugagcaagaagcgcaagcggcgcuuccugggcuuccuccuaggggugggcuccgccaucgcgagcggcgucgccgugugcaagguguugcaccucgagggggaggucaacaagaucaagagcgcccugcuguccaccaacaaggccgugguaagccucuccaacggcgucagcguucugaccuucaaggugcuggaccucaagaacuauaucgacaagcagcugcugcccauccugaacaagcagagcugcuccaucucaaacaucgaaacggugauugaguuccagcagaagaacaaccggcuccuggaaaucacccgcgaguucagcgugaacgccggggucaccacccccguguccacguacaugcugaccaacagcgagcuccuaucccugaucaacgacaugccgaucaccaacgaccagaagaagcucaugagcaacaacgugcagaucguccggcagcaguccuacagcaucaugugcaucaucaaggaagaggugcuggcguacgugguccagcugccccucuacggcgugaucgacacccccugcuggaagcugcacacgagcccccugugcacaaccaacaccaaggagggguccaacaucugccucacgcgcaccgaccggggcugguacugcgacaacgccggcagcgucuccuucuucccgcaggccgagaccugcaaggugcagagcaaccgcguguucugcgacaccaugaacucccugacgcugcccucugagguaaaccucugcaacgucgacaucuucaaccccaaguacgacugcaagaucaugaccuccaagacagacgugagcuccagcgugaucacaucccugggggccaucgucagcugcuacggcaagacuaaguguacugccagcaacaagaaccgggggaucaucaagaccuucuccaacggcugcgacuacgugagcaacaagggcguggacaccguguccgucgggaacacccuguacuacguuaauaagcaggagggcaagagccucuacgugaaaggggagcccaucauuaacuucuacgacccacugguuuuccccuccgacgaguucgacgcgagcaucucccaggugaacgagaagaucaaccagagccuggccuucauccgcaaguccgacgagcugcuccacaacgugaacgccggcaagagcacgaccaacaucaugaucaccaccaucaucaucgugaucaucgugauucugcugucccucaucgccguggggcugcugcuuuacugcaaggcccggugaggacuagucccuguucccagagcccacuuuuuuuucuuuuuuugaaauaaaauagccugucuuucagaucuaaaaaaaaaaaaaaaaaaaaaaaaaaaaaaaaaaaaaaaaaaaaaaaaaaaaaaaaaaaaaaaaugcaucccccccccccccccccccccccccccccccaaaggcucuuuucagagccaccagaauu

SEQ ID NO: 1300 - RNA, 1984 nt, Artificial Sequence
  mRNA product Design a-4 comprising derived and/or modified sequence from HRSV(A2)__F-del_DSCav1 (opt1)
gggagacuccugucgggcggaaguaggaggaguagaguuuaaaaacaguacucuuuuuccgguucgggacguaguugaagcaacgacaagccggauaaccgcucuugagacaggaagcuuaccauggagcugcucauccugaaggccaacgccaucaccaccauccugacggcggugaccuucugcuucgccagcggccagaacaucaccgaggaguucuaccaguccacgugcagcgccgucuccaagggguaccucagcgcccugcggaccggcugguacaccuccgugaucaccaucgagcugagcaacaucaaggagaacaagugcaacgggaccgacgccaaggugaagcucaucaagcaggagcuggacaaguacaagaacgcggucacggagcugcagcuccugaugcaguccaccccggcaaccaacaaccgcgcccggcgcgagcugccccgguucaugaacuacacccucaacaacgccaagaagacgaacgugacccugagcaagaagcgcaagcggcgcuuccugggcuuccuccugggggugggcuccgccaucgcgagcggcgucgccgugugcaaggugcugcaccucgagggggaggucaacaagaucaagagcgcccugcuguccaccaacaaggccguggugagccucuccaacggcgucagcgugcugaccuucaaggugcuggaccucaagaacuacaucgacaagcagcugcugcccauccugaacaagcagagcugcuccaucagcaacaucgagacggugaucgaguuccagcagaagaacaaccggcuccuggagaucacccgcgaguucagcgugaacgccggggucaccacccccguguccacguacaugcugaccaacagcgagcuccugucccugaucaacgacaugccgaucaccaacgaccagaagaagcucaugagcaacaacgugcagaucguccggcagcaguccuacagcaucaugugcaucaucaaggaggaggugcuggcguacgugguccagcugccccucuacggcgugaucgacacccccugcuggaagcugcacacgagcccccugugcaccaccaacaccaaggagggguccaacaucugccucacgcgcaccgaccggggcugguacugcgacaacgccggcagcgucuccuucuucccgcaggccgagaccugcaaggugcagagcaaccgcguguucugcgacaccaugaacucccugacgcugcccagcgagguaaaccucugcaacgucgacaucuucaaccccaaguacgacugcaagaucaugaccuccaagaccgacgugagcuccagcgugaucaccucccugggggccaucgucagcugcuacggcaagacgaagugcaccgccagcaacaagaaccgggggaucaucaagaccuucuccaacggcugcgacuacgugagcaacaagggcguggacaccguguccgucgggaacacccuguacuacgugaacaagcaggagggcaagagccucuacgugaagggggagcccaucaucaacuucuacgacccgcuggucuuccccuccgacgaguucgacgcgagcaucucccaggugaacgagaagaucaaccagagccuggccuucauccgcaaguccgacgagcugcuccacaacgugaacgccggcaagagcacgaccaacaucaugaucaccaccaucaucaucgucaucaucgugauccugcugucccucaucgccguggggcugcugcucuacugcaaggcccggugaggacuagucccuguucccagagcccacuuuuuuuucuuuuuuugaaauaaaauagccugucuuucagaucuaaaaaaaaaaaaaaaaaaaaaaaaaaaaaaaaaaaaaaaaaaaaaaaaaaaaaaaaaaaaaaaaugcaucccccccccccccccccccccccccccccccaaaggcucuuuucagagccaccagaauu

SEQ ID NO: 1301 - RNA, 1984 nt, Artificial Sequence
  mRNA product Design a-4 comprising derived and/or modified sequence from HRSV(A2)__F-del_DSCav1 (opt1)
gggagacuccugucgggcggaaguaggaggaguagaguuuaaaaacaguacucuuuuuccgguucgggacguaguugaagcaacgacaagccggauaaccgcucuugagacaggaagcuuaccauggagcugcucauccugaaggccaacgccaucaccaccauccugacggcggugaccuucugcuucgccagcggccagaacaucaccgaggaguucuaccaguccacgugcagcgccgucuccaagggguaccucagcgcccugcgcaccggcugguacaccuccgugaucaccaucgagcugagcaacaucaaggagaacaagugcaacgggaccgacgccaaggugaagcucaucaagcaggagcuggacaaguacaagaacgcggucacggagcugcagcuccugaugcaguccacccccgccaccaacaaccgggcccgccgggagcugccgcgcuucaugaacuacacccucaacaacgccaagaagacgaacgugacccugagcaagaagcggaagcgccgguuccugggcuuccuccugggggugggcuccgcgaucgccagcggcgucgccgugugcaaggugcugcaccucgagggggaggucaacaagaucaaguccgcccugcugagcaccaacaaggccguggugucccucagcaacggcgucuccgugcugaccuucaaggugcuggaccucaagaacuacaucgacaagcagcugcugcccauccucaacaagcagagcugcuccaucagcaacaucgagacggucaucgaguuccagcagaagaacaaccgccugcuggagaucacccgggaguucuccgugaacgcgggggugaccacccccgucagcacguacaugcucaccaacagcgagcugcugucccucaucaacgacaugcccaucaccaacgaccagaagaagcugaugagcaacaacgugcagaucgugcgccagcaguccuacagcaucaugugcaucaucaaggaggagguccuggccuacguggugcagcucccgcuguacggcgucaucgacacccccugcuggaagcugcacacgagcccccucugcaccaccaacaccaaggaggggagcaacaucugccugacgcggaccgaccgcggcugguacugcgacaacgccggcuccgugagcuucuucccccaggccgagaccugcaagguccaguccaaccggguguucugcgacaccaugaacagccugacgcucccguccgaggugaaccugugcaacgucgacaucuucaaccccaaguacgacugcaagaucaugaccagcaagaccgacguguccagcuccgugaucaccagccugggggccaucgucuccugcuacggcaagacgaagugcaccgcgagcaacaagaaccgcgggaucaucaagaccuucuccaacggcugcgacuacgugagcaacaagggcguggacaccgucagcguggggaacacccucuacuacgugaacaagcaggagggcaagucccuguacgucaagggggagcccaucaucaacuucuacgacccccugguguucccgagcgacgaguucgacgccuccaucagccaggugaacgagaagaucaaccagucccucgccuucauccggaaguccgacgagcugcugcacaacgucaacgccggcaaguccacgaccaacaucaugaucaccaccaucaucaucgugaucaucgugauccugcucagccugaucgccgucgggcugcuccuguacugcaaggcgcgcugaggacuagucccuguucccagagcccacuuuuuuuucuuuuuuugaaauaaaauagccugucuuucagaucuaaaaaaaaaaaaaaaaaaaaaaaaaaaaaaaaaaaaaaaaaaaaaaaaaaaaaaaaaaaaaaaaugcaucccccccccccccccccccccccccccccccaaaggcucuuuucagagccaccagaauu

SEQ ID NO: 1302 - RNA, 1984 nt, Artificial Sequence
  mRNA product Design a-4 comprising derived and/or modified sequence from HRSV(A2)__F-del_DSCav1 (opt2)
gggagacuccugucgggcggaaguaggaggaguagaguuuaaaaacaguacucuuuuuccgguucgggacguaguugaagcaacgacaagccggauaaccgcucuugagacaggaagcuuaccauggagcuccucauccucaaggccaacgccaucaccaccauccucaccgccgucaccuucugcuucgccuccggccagaacaucaccgaggaguucuaccaguccaccugcuccgccgucuccaagggcuaccucuccgcccuccgcaccggcugguacaccuccgucaucaccaucgagcucuccaacaucaaggagaacaagugcaacggcaccgacgccaaggucaagcucaucaagcaggagcucgacaaguacaagaacgccgucaccgagcuccagcuccucaugcaguccacccccgccaccaacaaccgcgcccgccgcgagcucccccgcuucaugaacuacacccucaacaacgccaagaagaccaacgucacccucuccaagaagcgcaagcgccgcuuccucggcuuccuccucggcgucggcuccgccaucgccuccggcgucgccgucugcaagguccuccaccucgagggcgaggucaacaagaucaaguccgcccuccucuccaccaacaaggccgucgucucccucuccaacggcgucuccguccucaccuucaagguccucgaccucaagaacuacaucgacaagcagcuccuccccauccucaacaagcaguccugcuccaucuccaacaucgagaccgucaucgaguuccagcagaagaacaaccgccuccucgagaucacccgcgaguucuccgucaacgccggcgucaccacccccgucuccaccuacaugcucaccaacuccgagcuccucucccucaucaacgacaugcccaucaccaacgaccagaagaagcucauguccaacaacguccagaucguccgccagcaguccuacuccaucaugugcaucaucaaggaggagguccucgccuacgucguccagcucccccucuacggcgucaucgacacccccugcuggaagcuccacaccuccccccucugcaccaccaacaccaaggagggcuccaacaucugccucacccgcaccgaccgcggcugguacugcgacaacgccggcuccgucuccuucuucccccaggccgagaccugcaagguccaguccaaccgcgucuucugcgacaccaugaacucccucacccuccccuccgaggucaaccucugcaacgucgacaucuucaaccccaaguacgacugcaagaucaugaccuccaagaccgacgucuccuccuccgucaucaccucccucggcgccaucgucuccugcuacggcaagaccaagugcaccgccuccaacaagaaccgcggcaucaucaagaccuucuccaacggcugcgacuacgucuccaacaagggcgucgacaccgucuccgucggcaacacccucuacuacgucaacaagcaggagggcaagucccucuacgucaagggcgagcccaucaucaacuucuacgacccccucgucuuccccuccgacgaguucgacgccuccaucucccaggucaacgagaagaucaaccagucccucgccuucauccgcaaguccgacgagcuccuccacaacgucaacgccggcaaguccaccaccaacaucaugaucaccaccaucaucaucgucaucaucgucauccuccucucccucaucgccgucggccuccuccucuacugcaaggcccgcugaggacuagucccuguucccagagcccacuuuuuuuucuuuuuuugaaauaaaauagccugucuuucagaucuaaaaaaaaaaaaaaaaaaaaaaaaaaaaaaaaaaaaaaaaaaaaaaaaaaaaaaaaaaaaaaaaugcaucccccccccccccccccccccccccccccccaaaggcucuuuucagagccaccagaauu

SEQ ID NO: 1303 - RNA, 1984 nt, Artificial Sequence
  mRNA product Design a-4 comprising derived and/or modified sequence from HRSV(A2)__F-del_DSCav1 (opt3)
gggagacuccugucgggcggaaguaggaggaguagaguuuaaaaacaguacucuuuuuccgguucgggacguaguugaagcaacgacaagccggauaaccgcucuugagacaggaagcuuaccauggagcugcucauccuuaaggccaacgcuauuaccacaauacugacugcagugacguucugcuuugccagcggccagaauaucaccgaagaguucuaccaauccacauguucugcggucucaaaaggguauuugagugcuuuaagaacuggaugguacaccagcguuauuacaaucgaacuguccaacauuaaggagaauaaaugcaacgguaccgacgccaaggugaaacuaaucaagcaggaacucgauaaguauaaaaaugcaguaacugagcugcagcuucugaugcagucuacacccgccaccaacaauagggcucggcgcgaguugccucgauuuaugaacuacacgcucaauaacgcaaagaaaacuaaugugacccugucgaagaaacguaagagaagguuccugggcuuucucuuaggggucggaucagccauagcuagcggcguggccguuuguaaggugcugcaccuugaaggugaggucaacaaaaucaagagugcguugcuguccacaaauaaagcagugguaucucuaagcaacgggguuuccgugcucacuuucaagguccuggaccuuaaaaauuauauugauaagcaacuguugccaauccucaacaaacagucaugcaguauuagcaacaucgaaaccgugauagaguuucagcagaagaauaaccggcuguuagagauuacacgcgaguucucugugaaugccggagucaccacgccgguuuccacuuacaugcugacaaacucagaacuccuuagccugaucaaugacaugcccauuaccaacgaucaaaagaaauugaugaguaauaacgugcagaucguaagacagcagucuuauuccaucauguguauuauaaaggaagaggugcuagcuuacgucgugcaacugccucucuacggcguuaucgacacuccaugcuggaaacugcauacaagcccccuuuguaccacgaauaccaaggaaggcucgaacauuugccugacaaggacugaucgggggugguauugugacaaugccggaucuguguccuuuuucccucaggcagagaccugcaaaguccagucaaaccgcguguuuugugauacaaugaauaguuugacucucccaagcgagguaaaccugugcaauguugacaucuucaaccccaaguacgauugcaagauaaugaccuccaaaacagacgugucuagcucagucauuaccaguuuaggugcuaucguguccuguuauggcaagacuaaaugcacggccagcaacaagaaucgagggaucauuaaaacauuuucuaacggaugugauuacgucucaaauaagggcguggacaccguuaguguggguaacacucuguauuacguaaauaagcaagaagggaaaagccuauaugucaagggagagccuaucauuaacuucuacgacccacucguguucccguccgaugaauuugacgcgucuauaucgcagguuaaugagaaaaucaaccagagccuggccuucauuagaaaguccgaugaacuuuugcacaaugugaacgcaggcaaaucaaccacaaauaucaugaucaccacuauuauaaucgucauuaucgugauucugcucagucugaucgcuguaggccuucuguuguacugcaaggccaggugaggacuagucccuguucccagagcccacuuuuuuuucuuuuuuugaaauaaaauagccugucuuucagaucuaaaaaaaaaaaaaaaaaaaaaaaaaaaaaaaaaaaaaaaaaaaaaaaaaaaaaaaaaaaaaaaaugcaucccccccccccccccccccccccccccccccaaaggcucuuuucagagccaccagaauu

SEQ ID NO: 1304 - RNA, 1984 nt, Artificial Sequence
  mRNA product Design a-4 comprising derived and/or modified sequence from HRSV(A2)__F-del_DSCav1 (opt4)
gggagacuccugucgggcggaaguaggaggaguagaguuuaaaaacaguacucuuuuuccgguucgggacguaguugaagcaacgacaagccggauaaccgcucuugagacaggaagcuuaccauggagcugcugauccugaaggccaacgccaucaccaccauccugaccgccgugaccuucugcuucgccagcggccagaacaucaccgaggaguucuaccagagcaccugcagcgccgugagcaagggcuaccugagcgcccugagaaccggcugguacaccagcgugaucaccaucgagcugagcaacaucaaggagaacaagugcaacggcaccgacgccaaggugaagcugaucaagcaggagcuggacaaguacaagaacgccgugaccgagcugcagcugcugaugcagagcacccccgccaccaacaacagagccagaagagagcugcccagauucaugaacuacacccugaacaacgccaagaagaccaacgugacccugagcaagaagagaaagagaagauuccugggcuuccugcugggcgugggcagcgccaucgccagcggcguggccgugugcaaggugcugcaccuggagggcgaggugaacaagaucaagagcgcccugcugagcaccaacaaggccguggugagccugagcaacggcgugagcgugcugaccuucaaggugcuggaccugaagaacuacaucgacaagcagcugcugcccauccugaacaagcagagcugcagcaucagcaacaucgagaccgugaucgaguuccagcagaagaacaacagacugcuggagaucaccagagaguucagcgugaacgccggcgugaccacccccgugagcaccuacaugcugaccaacagcgagcugcugagccugaucaacgacaugcccaucaccaacgaccagaagaagcugaugagcaacaacgugcagaucgugagacagcagagcuacagcaucaugugcaucaucaaggaggaggugcuggccuacguggugcagcugccccuguacggcgugaucgacacccccugcuggaagcugcacaccagcccccugugcaccaccaacaccaaggagggcagcaacaucugccugaccagaaccgacagaggcugguacugcgacaacgccggcagcgugagcuucuucccccaggccgagaccugcaaggugcagagcaacagaguguucugcgacaccaugaacagccugacccugcccagcgaggugaaccugugcaacguggacaucuucaaccccaaguacgacugcaagaucaugaccagcaagaccgacgugagcagcagcgugaucaccagccugggcgccaucgugagcugcuacggcaagaccaagugcaccgccagcaacaagaacagaggcaucaucaagaccuucagcaacggcugcgacuacgugagcaacaagggcguggacaccgugagcgugggcaacacccuguacuacgugaacaagcaggagggcaagagccuguacgugaagggcgagcccaucaucaacuucuacgacccccugguguuccccagcgacgaguucgacgccagcaucagccaggugaacgagaagaucaaccagagccuggccuucaucagaaagagcgacgagcugcugcacaacgugaacgccggcaagagcaccaccaacaucaugaucaccaccaucaucaucgugaucaucgugauccugcugagccugaucgccgugggccugcugcuguacugcaaggccagaugaggacuagucccuguucccagagcccacuuuuuuuucuuuuuuugaaauaaaauagccugucuuucagaucuaaaaaaaaaaaaaaaaaaaaaaaaaaaaaaaaaaaaaaaaaaaaaaaaaaaaaaaaaaaaaaaaugcaucccccccccccccccccccccccccccccccaaaggcucuuuucagagccaccagaauu

SEQ ID NO: 1305 - RNA, 1984 nt, Artificial Sequence
  mRNA product Design a-4 comprising derived and/or modified sequence from HRSV(A2)__F-del_DSCav1 (opt5)
gggagacuccugucgggcggaaguaggaggaguagaguuuaaaaacaguacucuuuuuccgguucgggacguaguugaagcaacgacaagccggauaaccgcucuugagacaggaagcuuaccauggagcugcucauccugaaggccaacgcuauuaccacaauccuuacggccgugaccuucugcuuugcgagcggccagaauauuacagaagaguucuaccaauccaccuguucugcugucagcaaaggguaucuguccgcccucagaacaggaugguacaccucuguuaucacaauugaacugagcaacaucaaggagaauaaaugcaacggcaccgacgccaaggugaaacuuaucaagcaggaacuggauaaguauaaaaaugcugugacggagcuccagcugcugaugcaguccacccccgccacaaacaaucgggcucgcagagagcucccucgguuuaugaacuacacccugaauaacgccaagaaaacaaaugucacccuuucuaagaaacgcaagagacgguuccugggguuucuccugggagugggcagcgcgauugccuccgggguugcuguguguaagguccuucaccuggaaggagaggugaacaaaaucaagagcgcccuccugucuacgaauaaagcuguugugucccugagcaacggcgucucugugcucacauucaaggugcuggaccuuaaaaauuauauugauaagcaacugcucccgauccugaacaaacaguccugcagcauuucuaacaucgaaaccgucauugaguuucagcagaagaauaaccgccuucuggagaucacaagagaauuuuccguuaaugccggcgugaccacccccgugagcacauacaugcucacgaacuccgagcugcugucucucaucaaugacaugccuauuaccaacgaucaaaagaaacugaugagcaauaacguccagaucgugcggcagcaguccuauagcauuauguguaucauuaaggaagagguucuugcguacgugguccaacugccccucuacggggugaucgacacaccuugcuggaaacugcauaccucuccccuuuguacaaccaauacgaaggaaggauccaacaucugccugacacgcaccgauagaggcugguauugugacaaugccgggagcguuucuuucuucccucaggcugagaccugcaaagugcagagcaaccgggucuuuugugauacaaugaacucccucacccugccgucugaggugaaucugugcaaugucgacauuuucaaccccaaguacgauugcaagaucaugacaagcaaaacggacguguccagcucuguuauuaccucccucggagccaucgugagcuguuauggcaagacaaaaugcaccgcuucuaacaagaaucgcgggauuaucaaaacauuuuccaacggaugugauuacgucagcaauaagggcguggacaccguuuccgugggcaacacgcuguauuacgucaauaagcaagaagggaaaucucuuuaugugaagggagagccuaucauuaacuucuacgacccccugguguucccuagcgaugaauuugacgccuccaucucucagguuaaugagaaaauuaaccagagccucgccuucaucagaaaguccgaugaacugcugcacaaugucaacgcuggcaaaagcaccacaaauauuaugaucaccacaauuaucaucgugauuaucgugauucuucucucucugaucgcggucgggcugcuccuguacugcaaggcccggugaggacuagucccuguucccagagcccacuuuuuuuucuuuuuuugaaauaaaauagccugucuuucagaucuaaaaaaaaaaaaaaaaaaaaaaaaaaaaaaaaaaaaaaaaaaaaaaaaaaaaaaaaaaaaaaaaugcaucccccccccccccccccccccccccccccccaaaggcucuuuucagagccaccagaauu

SEQ ID NO: 1306 - RNA, 1984 nt, Artificial Sequence
  mRNA product Design a-4 comprising derived and/or modified sequence from HRSV(A2)__F-del_DSCav1 (opt6)
gggagacuccugucgggcggaaguaggaggaguagaguuuaaaaacaguacucuuuuuccgguucgggacguaguugaagcaacgacaagccggauaaccgcucuugagacaggaagcuuaccauggaacuauuaauauuaaaagcaaaugcuauuaccacaauacuuacugcuguaaccuucugcuuugccucuggccaaaacauaacagaagaauuuuaucaaucaacuugcuccgcuguaagcaaaggcuaccuaucagcauuacgcaccggcugguacacaucaguaauaacaauagaacuauccaacauaaaagaaaauaaaugcaacggaacagacgcaaaaguaaaauuaauaaaacaagaacucgacaaauacaaaaacgcaguaacagaauuacaacuacuaaugcaaaguacuccagccaccaacaacagagcaagaagagaauuaccacgauuuaugaacuacacacuaaacaaugcaaaaaaaacaaacguaacacuaucaaaaaaacguaaacgcagauucuuaggcuuccuccuagguguaggcucagcaaucgccucaggaguggcaguuuguaaaguacuacaccuagaaggagaaguaaacaaaaucaaaucugcccuuuuaucgacaaacaaagcaguaguaucguuauccaauggagucucaguauugacauucaaaguauuagaccuaaaaaauuauauagauaaacaacucuuaccuaucuuaaauaaacaaagcugcucaauaaguaacauagaaaccguaauagaauuucaacaaaaaaacaauagacuccuugagaucacucgagaauuuucaguaaacgcagguguaacaacaccaguaagcacauacaugcuaacaaauagugaacuauuaucucuaauuaacgauaugcccauaaccaacgaucaaaaaaaacucaugaguaacaacguacaaauaguaagacaacaauccuauagcauaaugugcauuauaaaagaagaaguacuagcauauguaguccaacuaccacuauacggcguaauagacacaccaugcuggaaacuacacaccucaccccuaugcacaacaaauacaaaagaaggaucaaacauaugcuuaaccaggacagacagaggcugguacugcgauaacgcaggaucuguuucauucuucccccaagcagaaacaugcaaaguacaaucaaacagaguauuuugugauaccaugaacucacucacauuaccauccgaagucaaccucugcaacguagacauauucaaccccaaauacgacugcaaaauaaugaccucaaaaacagauguaucaucaucaguaaucacaucacuaggagcuaucguaucuuguuauggaaaaacaaaaugcacagcauccaacaaaaacagaggaauuaucaaaacauucucaaauggaugugacuauguaucaaacaaaggaguagacaccguaagcguaggcaauacacuauauuacguaaauaaacaagaaggaaaaucacuauacguaaaaggugaaccaauaauaaacuucuaugacccccuaguauucccaucagaugaauuugacgcaagcauaucacaagucaacgaaaaaauaaaccaaucacuggcauucauucgcaaaucagaugaacuucuccacaacguaaacgcugguaaaagcacuacaaacauaaugauaacaacaaucaucauugucauaauaguuauucuauuaucacuaaucgcaguaggauuacuacuauacuguaaagcgagguaaggacuagucccuguucccagagcccacuuuuuuuucuuuuuuugaaauaaaauagccugucuuucagaucuaaaaaaaaaaaaaaaaaaaaaaaaaaaaaaaaaaaaaaaaaaaaaaaaaaaaaaaaaaaaaaaaugcaucccccccccccccccccccccccccccccccaaaggcucuuuucagagccaccagaauu

SEQ ID NO: 1307 - RNA, 1984 nt, Artificial Sequence
  mRNA product Design a-4 comprising derived and/or modified sequence from HRSV(A2)__F-del_DSCav1 (opt11)
gggagacuccugucgggcggaaguaggaggaguagaguuuaaaaacaguacucuuuuuccgguucgggacguaguugaagcaacgacaagccggauaaccgcucuugagacaggaagcuuaccauggagcugcucauccugaaggccaacgccaucaccacaauccugacggcggugaccuucugcuucgccagcggccagaacaucaccgaggaguucuaccaguccacgugcagcgccgucuccaagggguaccucagcgcccugcgaaccggcugguacaccuccgugaucaccaucgagcugucaaacaucaaggagaacaagugcaacgggaccgaugccaagguuaagcucaucaagcaggagcuggacaaguacaagaacgcggucacggagcugcagcuccugaugcaguccacuccggcaaccaacaaccgcgccaggcgcgagcugccccgguucaugaacuacacccucaacaacgccaagaagacgaaugugacccugagcaagaagcgcaagcggcgcuuccugggcuuccuccuaggggugggcuccgccaucgcgagcggcgucgccgugugcaagguguugcaccucgagggggaggucaacaagaucaagagcgcccugcuguccaccaacaaggccgugguaagccucuccaacggcgucagcguucugaccuucaaggugcuggaccucaagaacuauaucgacaagcagcugcugcccauccugaacaagcagagcugcuccaucucaaacaucgaaacggugauugaguuccagcagaagaacaaccggcuccuggaaaucacccgcgaguucagcgugaacgccggggucaccacccccguguccacguacaugcugaccaacagcgagcuccuaucccugaucaacgacaugccgaucaccaacgaccagaagaagcucaugagcaacaacgugcagaucguccggcagcaguccuacagcaucaugugcaucaucaaggaagaggugcuggcguacgugguccagcugccccucuacggcgugaucgacacccccugcuggaagcugcacacgagcccccugugcacaaccaacaccaaggagggguccaacaucugccucacgcgcaccgaccggggcugguacugcgacaacgccggcagcgucuccuucuucccgcaggccgagaccugcaaggugcagagcaaccgcguguucugcgacaccaugaacucccugacgcugcccucugagguaaaccucugcaacgucgacaucuucaaccccaaguacgacugcaagaucaugaccuccaagacagacgugagcuccagcgugaucacaucccugggggccaucgucagcugcuacggcaagacuaaguguacugccagcaacaagaaccgggggaucaucaagaccuucuccaacggcugcgacuacgugagcaacaagggcguggacaccguguccgucgggaacacccuguacuacguuaauaagcaggagggcaagagccucuacgugaaaggggagcccaucauuaacuucuacgacccacugguuuuccccuccgacgaguucgacgcgagcaucucccaggugaacgagaagaucaaccagagccuggccuucauccgcaaguccgacgagcugcuccacaacgugaacgccggcaagagcacgaccaacaucaugaucaccaccaucaucaucgugaucaucgugauucugcugucccucaucgccguggggcugcugcuuuacugcaaggcccggugaggacuagucccuguucccagagcccacuuuuuuuucuuuuuuugaaauaaaauagccugucuuucagaucuaaaaaaaaaaaaaaaaaaaaaaaaaaaaaaaaaaaaaaaaaaaaaaaaaaaaaaaaaaaaaaaaugcaucccccccccccccccccccccccccccccccaaaggcucuuuucagagccaccagaauu

SEQ ID NO: 1308 - RNA, 1930 nt, Artificial Sequence
  mRNA product Design a-5 comprising derived and/or modified sequence from HRSV(A2)__F-del_DSCav1 (opt1)
gggagacuuucccauucuguagcagaauuugguguugccuguggucuuggucccgcggagaagcuuaccauggagcugcucauccugaaggccaacgccaucaccaccauccugacggcggugaccuucugcuucgccagcggccagaacaucaccgaggaguucuaccaguccacgugcagcgccgucuccaagggguaccucagcgcccugcggaccggcugguacaccuccgugaucaccaucgagcugagcaacaucaaggagaacaagugcaacgggaccgacgccaaggugaagcucaucaagcaggagcuggacaaguacaagaacgcggucacggagcugcagcuccugaugcaguccaccccggcaaccaacaaccgcgcccggcgcgagcugccccgguucaugaacuacacccucaacaacgccaagaagacgaacgugacccugagcaagaagcgcaagcggcgcuuccugggcuuccuccugggggugggcuccgccaucgcgagcggcgucgccgugugcaaggugcugcaccucgagggggaggucaacaagaucaagagcgcccugcuguccaccaacaaggccguggugagccucuccaacggcgucagcgugcugaccuucaaggugcuggaccucaagaacuacaucgacaagcagcugcugcccauccugaacaagcagagcugcuccaucagcaacaucgagacggugaucgaguuccagcagaagaacaaccggcuccuggagaucacccgcgaguucagcgugaacgccggggucaccacccccguguccacguacaugcugaccaacagcgagcuccugucccugaucaacgacaugccgaucaccaacgaccagaagaagcucaugagcaacaacgugcagaucguccggcagcaguccuacagcaucaugugcaucaucaaggaggaggugcuggcguacgugguccagcugccccucuacggcgugaucgacacccccugcuggaagcugcacacgagcccccugugcaccaccaacaccaaggagggguccaacaucugccucacgcgcaccgaccggggcugguacugcgacaacgccggcagcgucuccuucuucccgcaggccgagaccugcaaggugcagagcaaccgcguguucugcgacaccaugaacucccugacgcugcccagcgagguaaaccucugcaacgucgacaucuucaaccccaaguacgacugcaagaucaugaccuccaagaccgacgugagcuccagcgugaucaccucccugggggccaucgucagcugcuacggcaagacgaagugcaccgccagcaacaagaaccgggggaucaucaagaccuucuccaacggcugcgacuacgugagcaacaagggcguggacaccguguccgucgggaacacccuguacuacgugaacaagcaggagggcaagagccucuacgugaagggggagcccaucaucaacuucuacgacccgcuggucuuccccuccgacgaguucgacgcgagcaucucccaggugaacgagaagaucaaccagagccuggccuucauccgcaaguccgacgagcugcuccacaacgugaacgccggcaagagcacgaccaacaucaugaucaccaccaucaucaucgucaucaucgugauccugcugucccucaucgccguggggcugcugcucuacugcaaggcccggugaggacuagucccuguucccagagcccacuuuuuuuucuuuuuuugaaauaaaauagccugucuuucagaucuaaaaaaaaaaaaaaaaaaaaaaaaaaaaaaaaaaaaaaaaaaaaaaaaaaaaaaaaaaaaaaaaugcaucccccccccccccccccccccccccccccccaaaggcucuuuucagagccaccagaauu

SEQ ID NO: 1309 - RNA, 1930 nt, Artificial Sequence
  mRNA product Design a-5 comprising derived and/or modified sequence from HRSV(A2)__F-del_DSCav1 (opt1)
gggagacuuucccauucuguagcagaauuugguguugccuguggucuuggucccgcggagaagcuuaccauggagcugcucauccugaaggccaacgccaucaccaccauccugacggcggugaccuucugcuucgccagcggccagaacaucaccgaggaguucuaccaguccacgugcagcgccgucuccaagggguaccucagcgcccugcgcaccggcugguacaccuccgugaucaccaucgagcugagcaacaucaaggagaacaagugcaacgggaccgacgccaaggugaagcucaucaagcaggagcuggacaaguacaagaacgcggucacggagcugcagcuccugaugcaguccacccccgccaccaacaaccgggcccgccgggagcugccgcgcuucaugaacuacacccucaacaacgccaagaagacgaacgugacccugagcaagaagcggaagcgccgguuccugggcuuccuccugggggugggcuccgcgaucgccagcggcgucgccgugugcaaggugcugcaccucgagggggaggucaacaagaucaaguccgcccugcugagcaccaacaaggccguggugucccucagcaacggcgucuccgugcugaccuucaaggugcuggaccucaagaacuacaucgacaagcagcugcugcccauccucaacaagcagagcugcuccaucagcaacaucgagacggucaucgaguuccagcagaagaacaaccgccugcuggagaucacccgggaguucuccgugaacgcgggggugaccacccccgucagcacguacaugcucaccaacagcgagcugcugucccucaucaacgacaugcccaucaccaacgaccagaagaagcugaugagcaacaacgugcagaucgugcgccagcaguccuacagcaucaugugcaucaucaaggaggagguccuggccuacguggugcagcucccgcuguacggcgucaucgacacccccugcuggaagcugcacacgagcccccucugcaccaccaacaccaaggaggggagcaacaucugccugacgcggaccgaccgcggcugguacugcgacaacgccggcuccgugagcuucuucccccaggccgagaccugcaagguccaguccaaccggguguucugcgacaccaugaacagccugacgcucccguccgaggugaaccugugcaacgucgacaucuucaaccccaaguacgacugcaagaucaugaccagcaagaccgacguguccagcuccgugaucaccagccugggggccaucgucuccugcuacggcaagacgaagugcaccgcgagcaacaagaaccgcgggaucaucaagaccuucuccaacggcugcgacuacgugagcaacaagggcguggacaccgucagcguggggaacacccucuacuacgugaacaagcaggagggcaagucccuguacgucaagggggagcccaucaucaacuucuacgacccccugguguucccgagcgacgaguucgacgccuccaucagccaggugaacgagaagaucaaccagucccucgccuucauccggaaguccgacgagcugcugcacaacgucaacgccggcaaguccacgaccaacaucaugaucaccaccaucaucaucgugaucaucgugauccugcucagccugaucgccgucgggcugcuccuguacugcaaggcgcgcugaggacuagucccuguucccagagcccacuuuuuuuucuuuuuuugaaauaaaauagccugucuuucagaucuaaaaaaaaaaaaaaaaaaaaaaaaaaaaaaaaaaaaaaaaaaaaaaaaaaaaaaaaaaaaaaaaugcaucccccccccccccccccccccccccccccccaaaggcucuuuucagagccaccagaauu

SEQ ID NO: 1310 - RNA, 1930 nt, Artificial Sequence
  mRNA product Design a-5 comprising derived and/or modified sequence from HRSV(A2)__F-del_DSCav1 (opt2)
gggagacuuucccauucuguagcagaauuugguguugccuguggucuuggucccgcggagaagcuuaccauggagcuccucauccucaaggccaacgccaucaccaccauccucaccgccgucaccuucugcuucgccuccggccagaacaucaccgaggaguucuaccaguccaccugcuccgccgucuccaagggcuaccucuccgcccuccgcaccggcugguacaccuccgucaucaccaucgagcucuccaacaucaaggagaacaagugcaacggcaccgacgccaaggucaagcucaucaagcaggagcucgacaaguacaagaacgccgucaccgagcuccagcuccucaugcaguccacccccgccaccaacaaccgcgcccgccgcgagcucccccgcuucaugaacuacacccucaacaacgccaagaagaccaacgucacccucuccaagaagcgcaagcgccgcuuccucggcuuccuccucggcgucggcuccgccaucgccuccggcgucgccgucugcaagguccuccaccucgagggcgaggucaacaagaucaaguccgcccuccucuccaccaacaaggccgucgucucccucuccaacggcgucuccguccucaccuucaagguccucgaccucaagaacuacaucgacaagcagcuccuccccauccucaacaagcaguccugcuccaucuccaacaucgagaccgucaucgaguuccagcagaagaacaaccgccuccucgagaucacccgcgaguucuccgucaacgccggcgucaccacccccgucuccaccuacaugcucaccaacuccgagcuccucucccucaucaacgacaugcccaucaccaacgaccagaagaagcucauguccaacaacguccagaucguccgccagcaguccuacuccaucaugugcaucaucaaggaggagguccucgccuacgucguccagcucccccucuacggcgucaucgacacccccugcuggaagcuccacaccuccccccucugcaccaccaacaccaaggagggcuccaacaucugccucacccgcaccgaccgcggcugguacugcgacaacgccggcuccgucuccuucuucccccaggccgagaccugcaagguccaguccaaccgcgucuucugcgacaccaugaacucccucacccuccccuccgaggucaaccucugcaacgucgacaucuucaaccccaaguacgacugcaagaucaugaccuccaagaccgacgucuccuccuccgucaucaccucccucggcgccaucgucuccugcuacggcaagaccaagugcaccgccuccaacaagaaccgcggcaucaucaagaccuucuccaacggcugcgacuacgucuccaacaagggcgucgacaccgucuccgucggcaacacccucuacuacgucaacaagcaggagggcaagucccucuacgucaagggcgagcccaucaucaacuucuacgacccccucgucuuccccuccgacgaguucgacgccuccaucucccaggucaacgagaagaucaaccagucccucgccuucauccgcaaguccgacgagcuccuccacaacgucaacgccggcaaguccaccaccaacaucaugaucaccaccaucaucaucgucaucaucgucauccuccucucccucaucgccgucggccuccuccucuacugcaaggcccgcugaggacuagucccuguucccagagcccacuuuuuuuucuuuuuuugaaauaaaauagccugucuuucagaucuaaaaaaaaaaaaaaaaaaaaaaaaaaaaaaaaaaaaaaaaaaaaaaaaaaaaaaaaaaaaaaaaugcaucccccccccccccccccccccccccccccccaaaggcucuuuucagagccaccagaauu

SEQ ID NO: 1311 - RNA, 1930 nt, Artificial Sequence
  mRNA product Design a-5 comprising derived and/or modified sequence from HRSV(A2)__F-del_DSCav1 (opt3)
gggagacuuucccauucuguagcagaauuugguguugccuguggucuuggucccgcggagaagcuuaccauggagcugcucauccuuaaggccaacgcuauuaccacaauacugacugcagugacguucugcuuugccagcggccagaauaucaccgaagaguucuaccaauccacauguucugcggucucaaaaggguauuugagugcuuuaagaacuggaugguacaccagcguuauuacaaucgaacuguccaacauuaaggagaauaaaugcaacgguaccgacgccaaggugaaacuaaucaagcaggaacucgauaaguauaaaaaugcaguaacugagcugcagcuucugaugcagucuacacccgccaccaacaauagggcucggcgcgaguugccucgauuuaugaacuacacgcucaauaacgcaaagaaaacuaaugugacccugucgaagaaacguaagagaagguuccugggcuuucucuuaggggucggaucagccauagcuagcggcguggccguuuguaaggugcugcaccuugaaggugaggucaacaaaaucaagagugcguugcuguccacaaauaaagcagugguaucucuaagcaacgggguuuccgugcucacuuucaagguccuggaccuuaaaaauuauauugauaagcaacuguugccaauccucaacaaacagucaugcaguauuagcaacaucgaaaccgugauagaguuucagcagaagaauaaccggcuguuagagauuacacgcgaguucucugugaaugccggagucaccacgccgguuuccacuuacaugcugacaaacucagaacuccuuagccugaucaaugacaugcccauuaccaacgaucaaaagaaauugaugaguaauaacgugcagaucguaagacagcagucuuauuccaucauguguauuauaaaggaagaggugcuagcuuacgucgugcaacugccucucuacggcguuaucgacacuccaugcuggaaacugcauacaagcccccuuuguaccacgaauaccaaggaaggcucgaacauuugccugacaaggacugaucgggggugguauugugacaaugccggaucuguguccuuuuucccucaggcagagaccugcaaaguccagucaaaccgcguguuuugugauacaaugaauaguuugacucucccaagcgagguaaaccugugcaauguugacaucuucaaccccaaguacgauugcaagauaaugaccuccaaaacagacgugucuagcucagucauuaccaguuuaggugcuaucguguccuguuauggcaagacuaaaugcacggccagcaacaagaaucgagggaucauuaaaacauuuucuaacggaugugauuacgucucaaauaagggcguggacaccguuaguguggguaacacucuguauuacguaaauaagcaagaagggaaaagccuauaugucaagggagagccuaucauuaacuucuacgacccacucguguucccguccgaugaauuugacgcgucuauaucgcagguuaaugagaaaaucaaccagagccuggccuucauuagaaaguccgaugaacuuuugcacaaugugaacgcaggcaaaucaaccacaaauaucaugaucaccacuauuauaaucgucauuaucgugauucugcucagucugaucgcuguaggccuucuguuguacugcaaggccaggugaggacuagucccuguucccagagcccacuuuuuuuucuuuuuuugaaauaaaauagccugucuuucagaucuaaaaaaaaaaaaaaaaaaaaaaaaaaaaaaaaaaaaaaaaaaaaaaaaaaaaaaaaaaaaaaaaugcaucccccccccccccccccccccccccccccccaaaggcucuuuucagagccaccagaauu

SEQ ID NO: 1312 - RNA, 1930 nt, Artificial Sequence
  mRNA product Design a-5 comprising derived and/or modified sequence from HRSV(A2)__F-del_DSCav1 (opt4)
gggagacuuucccauucuguagcagaauuugguguugccuguggucuuggucccgcggagaagcuuaccauggagcugcugauccugaaggccaacgccaucaccaccauccugaccgccgugaccuucugcuucgccagcggccagaacaucaccgaggaguucuaccagagcaccugcagcgccgugagcaagggcuaccugagcgcccugagaaccggcugguacaccagcgugaucaccaucgagcugagcaacaucaaggagaacaagugcaacggcaccgacgccaaggugaagcugaucaagcaggagcuggacaaguacaagaacgccgugaccgagcugcagcugcugaugcagagcacccccgccaccaacaacagagccagaagagagcugcccagauucaugaacuacacccugaacaacgccaagaagaccaacgugacccugagcaagaagagaaagagaagauuccugggcuuccugcugggcgugggcagcgccaucgccagcggcguggccgugugcaaggugcugcaccuggagggcgaggugaacaagaucaagagcgcccugcugagcaccaacaaggccguggugagccugagcaacggcgugagcgugcugaccuucaaggugcuggaccugaagaacuacaucgacaagcagcugcugcccauccugaacaagcagagcugcagcaucagcaacaucgagaccgugaucgaguuccagcagaagaacaacagacugcuggagaucaccagagaguucagcgugaacgccggcgugaccacccccgugagcaccuacaugcugaccaacagcgagcugcugagccugaucaacgacaugcccaucaccaacgaccagaagaagcugaugagcaacaacgugcagaucgugagacagcagagcuacagcaucaugugcaucaucaaggaggaggugcuggccuacguggugcagcugccccuguacggcgugaucgacacccccugcuggaagcugcacaccagcccccugugcaccaccaacaccaaggagggcagcaacaucugccugaccagaaccgacagaggcugguacugcgacaacgccggcagcgugagcuucuucccccaggccgagaccugcaaggugcagagcaacagaguguucugcgacaccaugaacagccugacccugcccagcgaggugaaccugugcaacguggacaucuucaaccccaaguacgacugcaagaucaugaccagcaagaccgacgugagcagcagcgugaucaccagccugggcgccaucgugagcugcuacggcaagaccaagugcaccgccagcaacaagaacagaggcaucaucaagaccuucagcaacggcugcgacuacgugagcaacaagggcguggacaccgugagcgugggcaacacccuguacuacgugaacaagcaggagggcaagagccuguacgugaagggcgagcccaucaucaacuucuacgacccccugguguuccccagcgacgaguucgacgccagcaucagccaggugaacgagaagaucaaccagagccuggccuucaucagaaagagcgacgagcugcugcacaacgugaacgccggcaagagcaccaccaacaucaugaucaccaccaucaucaucgugaucaucgugauccugcugagccugaucgccgugggccugcugcuguacugcaaggccagaugaggacuagucccuguucccagagcccacuuuuuuuucuuuuuuugaaauaaaauagccugucuuucagaucuaaaaaaaaaaaaaaaaaaaaaaaaaaaaaaaaaaaaaaaaaaaaaaaaaaaaaaaaaaaaaaaaugcaucccccccccccccccccccccccccccccccaaaggcucuuuucagagccaccagaauu

SEQ ID NO: 1313 - RNA, 1930 nt, Artificial Sequence
  mRNA product Design a-5 comprising derived and/or modified sequence from HRSV(A2)__F-del_DSCav1 (opt5)
gggagacuuucccauucuguagcagaauuugguguugccuguggucuuggucccgcggagaagcuuaccauggagcugcucauccugaaggccaacgcuauuaccacaauccuuacggccgugaccuucugcuuugcgagcggccagaauauuacagaagaguucuaccaauccaccuguucugcugucagcaaaggguaucuguccgcccucagaacaggaugguacaccucuguuaucacaauugaacugagcaacaucaaggagaauaaaugcaacggcaccgacgccaaggugaaacuuaucaagcaggaacuggauaaguauaaaaaugcugugacggagcuccagcugcugaugcaguccacccccgccacaaacaaucgggcucgcagagagcucccucgguuuaugaacuacacccugaauaacgccaagaaaacaaaugucacccuuucuaagaaacgcaagagacgguuccugggguuucuccugggagugggcagcgcgauugccuccgggguugcuguguguaagguccuucaccuggaaggagaggugaacaaaaucaagagcgcccuccugucuacgaauaaagcuguugugucccugagcaacggcgucucugugcucacauucaaggugcuggaccuuaaaaauuauauugauaagcaacugcucccgauccugaacaaacaguccugcagcauuucuaacaucgaaaccgucauugaguuucagcagaagaauaaccgccuucuggagaucacaagagaauuuuccguuaaugccggcgugaccacccccgugagcacauacaugcucacgaacuccgagcugcugucucucaucaaugacaugccuauuaccaacgaucaaaagaaacugaugagcaauaacguccagaucgugcggcagcaguccuauagcauuauguguaucauuaaggaagagguucuugcguacgugguccaacugccccucuacggggugaucgacacaccuugcuggaaacugcauaccucuccccuuuguacaaccaauacgaaggaaggauccaacaucugccugacacgcaccgauagaggcugguauugugacaaugccgggagcguuucuuucuucccucaggcugagaccugcaaagugcagagcaaccgggucuuuugugauacaaugaacucccucacccugccgucugaggugaaucugugcaaugucgacauuuucaaccccaaguacgauugcaagaucaugacaagcaaaacggacguguccagcucuguuauuaccucccucggagccaucgugagcuguuauggcaagacaaaaugcaccgcuucuaacaagaaucgcgggauuaucaaaacauuuuccaacggaugugauuacgucagcaauaagggcguggacaccguuuccgugggcaacacgcuguauuacgucaauaagcaagaagggaaaucucuuuaugugaagggagagccuaucauuaacuucuacgacccccugguguucccuagcgaugaauuugacgccuccaucucucagguuaaugagaaaauuaaccagagccucgccuucaucagaaaguccgaugaacugcugcacaaugucaacgcuggcaaaagcaccacaaauauuaugaucaccacaauuaucaucgugauuaucgugauucuucucucucugaucgcggucgggcugcuccuguacugcaaggcccggugaggacuagucccuguucccagagcccacuuuuuuuucuuuuuuugaaauaaaauagccugucuuucagaucuaaaaaaaaaaaaaaaaaaaaaaaaaaaaaaaaaaaaaaaaaaaaaaaaaaaaaaaaaaaaaaaaugcaucccccccccccccccccccccccccccccccaaaggcucuuuucagagccaccagaauu

SEQ ID NO: 1314 - RNA, 1930 nt, Artificial Sequence
  mRNA product Design a-5 comprising derived and/or modified sequence from HRSV(A2)__F-del_DSCav1 (opt6)
gggagacuuucccauucuguagcagaauuugguguugccuguggucuuggucccgcggagaagcuuaccauggaacuauuaauauuaaaagcaaaugcuauuaccacaauacuuacugcuguaaccuucugcuuugccucuggccaaaacauaacagaagaauuuuaucaaucaacuugcuccgcuguaagcaaaggcuaccuaucagcauuacgcaccggcugguacacaucaguaauaacaauagaacuauccaacauaaaagaaaauaaaugcaacggaacagacgcaaaaguaaaauuaauaaaacaagaacucgacaaauacaaaaacgcaguaacagaauuacaacuacuaaugcaaaguacuccagccaccaacaacagagcaagaagagaauuaccacgauuuaugaacuacacacuaaacaaugcaaaaaaaacaaacguaacacuaucaaaaaaacguaaacgcagauucuuaggcuuccuccuagguguaggcucagcaaucgccucaggaguggcaguuuguaaaguacuacaccuagaaggagaaguaaacaaaaucaaaucugcccuuuuaucgacaaacaaagcaguaguaucguuauccaauggagucucaguauugacauucaaaguauuagaccuaaaaaauuauauagauaaacaacucuuaccuaucuuaaauaaacaaagcugcucaauaaguaacauagaaaccguaauagaauuucaacaaaaaaacaauagacuccuugagaucacucgagaauuuucaguaaacgcagguguaacaacaccaguaagcacauacaugcuaacaaauagugaacuauuaucucuaauuaacgauaugcccauaaccaacgaucaaaaaaaacucaugaguaacaacguacaaauaguaagacaacaauccuauagcauaaugugcauuauaaaagaagaaguacuagcauauguaguccaacuaccacuauacggcguaauagacacaccaugcuggaaacuacacaccucaccccuaugcacaacaaauacaaaagaaggaucaaacauaugcuuaaccaggacagacagaggcugguacugcgauaacgcaggaucuguuucauucuucccccaagcagaaacaugcaaaguacaaucaaacagaguauuuugugauaccaugaacucacucacauuaccauccgaagucaaccucugcaacguagacauauucaaccccaaauacgacugcaaaauaaugaccucaaaaacagauguaucaucaucaguaaucacaucacuaggagcuaucguaucuuguuauggaaaaacaaaaugcacagcauccaacaaaaacagaggaauuaucaaaacauucucaaauggaugugacuauguaucaaacaaaggaguagacaccguaagcguaggcaauacacuauauuacguaaauaaacaagaaggaaaaucacuauacguaaaaggugaaccaauaauaaacuucuaugacccccuaguauucccaucagaugaauuugacgcaagcauaucacaagucaacgaaaaaauaaaccaaucacuggcauucauucgcaaaucagaugaacuucuccacaacguaaacgcugguaaaagcacuacaaacauaaugauaacaacaaucaucauugucauaauaguuauucuauuaucacuaaucgcaguaggauuacuacuauacuguaaagcgagguaaggacuagucccuguucccagagcccacuuuuuuuucuuuuuuugaaauaaaauagccugucuuucagaucuaaaaaaaaaaaaaaaaaaaaaaaaaaaaaaaaaaaaaaaaaaaaaaaaaaaaaaaaaaaaaaaaugcaucccccccccccccccccccccccccccccccaaaggcucuuuucagagccaccagaauu

SEQ ID NO: 1315 - RNA, 1930 nt, Artificial Sequence
  mRNA product Design a-5 comprising derived and/or modified sequence from HRSV(A2)__F-del_DSCav1 (opt11)
gggagacuuucccauucuguagcagaauuugguguugccuguggucuuggucccgcggagaagcuuaccauggagcugcucauccugaaggccaacgccaucaccacaauccugacggcggugaccuucugcuucgccagcggccagaacaucaccgaggaguucuaccaguccacgugcagcgccgucuccaagggguaccucagcgcccugcgaaccggcugguacaccuccgugaucaccaucgagcugucaaacaucaaggagaacaagugcaacgggaccgaugccaagguuaagcucaucaagcaggagcuggacaaguacaagaacgcggucacggagcugcagcuccugaugcaguccacuccggcaaccaacaaccgcgccaggcgcgagcugccccgguucaugaacuacacccucaacaacgccaagaagacgaaugugacccugagcaagaagcgcaagcggcgcuuccugggcuuccuccuaggggugggcuccgccaucgcgagcggcgucgccgugugcaagguguugcaccucgagggggaggucaacaagaucaagagcgcccugcuguccaccaacaaggccgugguaagccucuccaacggcgucagcguucugaccuucaaggugcuggaccucaagaacuauaucgacaagcagcugcugcccauccugaacaagcagagcugcuccaucucaaacaucgaaacggugauugaguuccagcagaagaacaaccggcuccuggaaaucacccgcgaguucagcgugaacgccggggucaccacccccguguccacguacaugcugaccaacagcgagcuccuaucccugaucaacgacaugccgaucaccaacgaccagaagaagcucaugagcaacaacgugcagaucguccggcagcaguccuacagcaucaugugcaucaucaaggaagaggugcuggcguacgugguccagcugccccucuacggcgugaucgacacccccugcuggaagcugcacacgagcccccugugcacaaccaacaccaaggagggguccaacaucugccucacgcgcaccgaccggggcugguacugcgacaacgccggcagcgucuccuucuucccgcaggccgagaccugcaaggugcagagcaaccgcguguucugcgacaccaugaacucccugacgcugcccucugagguaaaccucugcaacgucgacaucuucaaccccaaguacgacugcaagaucaugaccuccaagacagacgugagcuccagcgugaucacaucccugggggccaucgucagcugcuacggcaagacuaaguguacugccagcaacaagaaccgggggaucaucaagaccuucuccaacggcugcgacuacgugagcaacaagggcguggacaccguguccgucgggaacacccuguacuacguuaauaagcaggagggcaagagccucuacgugaaaggggagcccaucauuaacuucuacgacccacugguuuuccccuccgacgaguucgacgcgagcaucucccaggugaacgagaagaucaaccagagccuggccuucauccgcaaguccgacgagcugcuccacaacgugaacgccggcaagagcacgaccaacaucaugaucaccaccaucaucaucgugaucaucgugauucugcugucccucaucgccguggggcugcugcuuuacugcaaggcccggugaggacuagucccuguucccagagcccacuuuuuuuucuuuuuuugaaauaaaauagccugucuuucagaucuaaaaaaaaaaaaaaaaaaaaaaaaaaaaaaaaaaaaaaaaaaaaaaaaaaaaaaaaaaaaaaaaugcaucccccccccccccccccccccccccccccccaaaggcucuuuucagagccaccagaauu

SEQ ID NO: 1316 - RNA, 2111 nt, Artificial Sequence
  mRNA product Design b-1 comprising derived and/or modified sequence from HRSV(A2)__F-del_DSCav1 (opt1)
gggagacggagacggccugcaggaccugcucucucagcccucagccgaggccuacgccgagccgagugcgcagccgacgaccgggaggagccgcagccuucaacucugagguacugugauccgcgcugcccgccgggccgccccaguccgcugcugcggcaccuccuucccucgcgcccucuucgcucgccagcgccuucccugugagccugcgucaccgcggccgccaagcuuaccauggagcugcucauccugaaggccaacgccaucaccaccauccugacggcggugaccuucugcuucgccagcggccagaacaucaccgaggaguucuaccaguccacgugcagcgccgucuccaagggguaccucagcgcccugcggaccggcugguacaccuccgugaucaccaucgagcugagcaacaucaaggagaacaagugcaacgggaccgacgccaaggugaagcucaucaagcaggagcuggacaaguacaagaacgcggucacggagcugcagcuccugaugcaguccaccccggcaaccaacaaccgcgcccggcgcgagcugccccgguucaugaacuacacccucaacaacgccaagaagacgaacgugacccugagcaagaagcgcaagcggcgcuuccugggcuuccuccugggggugggcuccgccaucgcgagcggcgucgccgugugcaaggugcugcaccucgagggggaggucaacaagaucaagagcgcccugcuguccaccaacaaggccguggugagccucuccaacggcgucagcgugcugaccuucaaggugcuggaccucaagaacuacaucgacaagcagcugcugcccauccugaacaagcagagcugcuccaucagcaacaucgagacggugaucgaguuccagcagaagaacaaccggcuccuggagaucacccgcgaguucagcgugaacgccggggucaccacccccguguccacguacaugcugaccaacagcgagcuccugucccugaucaacgacaugccgaucaccaacgaccagaagaagcucaugagcaacaacgugcagaucguccggcagcaguccuacagcaucaugugcaucaucaaggaggaggugcuggcguacgugguccagcugccccucuacggcgugaucgacacccccugcuggaagcugcacacgagcccccugugcaccaccaacaccaaggagggguccaacaucugccucacgcgcaccgaccggggcugguacugcgacaacgccggcagcgucuccuucuucccgcaggccgagaccugcaaggugcagagcaaccgcguguucugcgacaccaugaacucccugacgcugcccagcgagguaaaccucugcaacgucgacaucuucaaccccaaguacgacugcaagaucaugaccuccaagaccgacgugagcuccagcgugaucaccucccugggggccaucgucagcugcuacggcaagacgaagugcaccgccagcaacaagaaccgggggaucaucaagaccuucuccaacggcugcgacuacgugagcaacaagggcguggacaccguguccgucgggaacacccuguacuacgugaacaagcaggagggcaagagccucuacgugaagggggagcccaucaucaacuucuacgacccgcuggucuuccccuccgacgaguucgacgcgagcaucucccaggugaacgagaagaucaaccagagccuggccuucauccgcaaguccgacgagcugcuccacaacgugaacgccggcaagagcacgaccaacaucaugaucaccaccaucaucaucgucaucaucgugauccugcugucccucaucgccguggggcugcugcucuacugcaaggcccggugaggacuaguguccaccugucccuccugggcugcuggauugucucguuuuccugccaaauaaacaggaucagcgcuuuacagaucuaaaaaaaaaaaaaaaaaaaaaaaaaaaaaaaaaaaaaaaaaaaaaaaaaaaaaaaaaaaaaaaaugcaucccccccccccccccccccccccccccccccaaaggcucuuuucagagccaccagaauu

SEQ ID NO: 1317 - RNA, 2111 nt, Artificial Sequence
  mRNA product Design b-1 comprising derived and/or modified sequence from HRSV(A2)__F-del_DSCav1 (opt1)
gggagacggagacggccugcaggaccugcucucucagcccucagccgaggccuacgccgagccgagugcgcagccgacgaccgggaggagccgcagccuucaacucugagguacugugauccgcgcugcccgccgggccgccccaguccgcugcugcggcaccuccuucccucgcgcccucuucgcucgccagcgccuucccugugagccugcgucaccgcggccgccaagcuuaccauggagcugcucauccugaaggccaacgccaucaccaccauccugacggcggugaccuucugcuucgccagcggccagaacaucaccgaggaguucuaccaguccacgugcagcgccgucuccaagggguaccucagcgcccugcgcaccggcugguacaccuccgugaucaccaucgagcugagcaacaucaaggagaacaagugcaacgggaccgacgccaaggugaagcucaucaagcaggagcuggacaaguacaagaacgcggucacggagcugcagcuccugaugcaguccacccccgccaccaacaaccgggcccgccgggagcugccgcgcuucaugaacuacacccucaacaacgccaagaagacgaacgugacccugagcaagaagcggaagcgccgguuccugggcuuccuccugggggugggcuccgcgaucgccagcggcgucgccgugugcaaggugcugcaccucgagggggaggucaacaagaucaaguccgcccugcugagcaccaacaaggccguggugucccucagcaacggcgucuccgugcugaccuucaaggugcuggaccucaagaacuacaucgacaagcagcugcugcccauccucaacaagcagagcugcuccaucagcaacaucgagacggucaucgaguuccagcagaagaacaaccgccugcuggagaucacccgggaguucuccgugaacgcgggggugaccacccccgucagcacguacaugcucaccaacagcgagcugcugucccucaucaacgacaugcccaucaccaacgaccagaagaagcugaugagcaacaacgugcagaucgugcgccagcaguccuacagcaucaugugcaucaucaaggaggagguccuggccuacguggugcagcucccgcuguacggcgucaucgacacccccugcuggaagcugcacacgagcccccucugcaccaccaacaccaaggaggggagcaacaucugccugacgcggaccgaccgcggcugguacugcgacaacgccggcuccgugagcuucuucccccaggccgagaccugcaagguccaguccaaccggguguucugcgacaccaugaacagccugacgcucccguccgaggugaaccugugcaacgucgacaucuucaaccccaaguacgacugcaagaucaugaccagcaagaccgacguguccagcuccgugaucaccagccugggggccaucgucuccugcuacggcaagacgaagugcaccgcgagcaacaagaaccgcgggaucaucaagaccuucuccaacggcugcgacuacgugagcaacaagggcguggacaccgucagcguggggaacacccucuacuacgugaacaagcaggagggcaagucccuguacgucaagggggagcccaucaucaacuucuacgacccccugguguucccgagcgacgaguucgacgccuccaucagccaggugaacgagaagaucaaccagucccucgccuucauccggaaguccgacgagcugcugcacaacgucaacgccggcaaguccacgaccaacaucaugaucaccaccaucaucaucgugaucaucgugauccugcucagccugaucgccgucgggcugcuccuguacugcaaggcgcgcugaggacuaguguccaccugucccuccugggcugcuggauugucucguuuuccugccaaauaaacaggaucagcgcuuuacagaucuaaaaaaaaaaaaaaaaaaaaaaaaaaaaaaaaaaaaaaaaaaaaaaaaaaaaaaaaaaaaaaaaugcaucccccccccccccccccccccccccccccccaaaggcucuuuucagagccaccagaauu

SEQ ID NO: 1318 - RNA, 2111 nt, Artificial Sequence
  mRNA product Design b-1 comprising derived and/or modified sequence from HRSV(A2)__F-del_DSCav1 (opt2)
gggagacggagacggccugcaggaccugcucucucagcccucagccgaggccuacgccgagccgagugcgcagccgacgaccgggaggagccgcagccuucaacucugagguacugugauccgcgcugcccgccgggccgccccaguccgcugcugcggcaccuccuucccucgcgcccucuucgcucgccagcgccuucccugugagccugcgucaccgcggccgccaagcuuaccauggagcuccucauccucaaggccaacgccaucaccaccauccucaccgccgucaccuucugcuucgccuccggccagaacaucaccgaggaguucuaccaguccaccugcuccgccgucuccaagggcuaccucuccgcccuccgcaccggcugguacaccuccgucaucaccaucgagcucuccaacaucaaggagaacaagugcaacggcaccgacgccaaggucaagcucaucaagcaggagcucgacaaguacaagaacgccgucaccgagcuccagcuccucaugcaguccacccccgccaccaacaaccgcgcccgccgcgagcucccccgcuucaugaacuacacccucaacaacgccaagaagaccaacgucacccucuccaagaagcgcaagcgccgcuuccucggcuuccuccucggcgucggcuccgccaucgccuccggcgucgccgucugcaagguccuccaccucgagggcgaggucaacaagaucaaguccgcccuccucuccaccaacaaggccgucgucucccucuccaacggcgucuccguccucaccuucaagguccucgaccucaagaacuacaucgacaagcagcuccuccccauccucaacaagcaguccugcuccaucuccaacaucgagaccgucaucgaguuccagcagaagaacaaccgccuccucgagaucacccgcgaguucuccgucaacgccggcgucaccacccccgucuccaccuacaugcucaccaacuccgagcuccucucccucaucaacgacaugcccaucaccaacgaccagaagaagcucauguccaacaacguccagaucguccgccagcaguccuacuccaucaugugcaucaucaaggaggagguccucgccuacgucguccagcucccccucuacggcgucaucgacacccccugcuggaagcuccacaccuccccccucugcaccaccaacaccaaggagggcuccaacaucugccucacccgcaccgaccgcggcugguacugcgacaacgccggcuccgucuccuucuucccccaggccgagaccugcaagguccaguccaaccgcgucuucugcgacaccaugaacucccucacccuccccuccgaggucaaccucugcaacgucgacaucuucaaccccaaguacgacugcaagaucaugaccuccaagaccgacgucuccuccuccgucaucaccucccucggcgccaucgucuccugcuacggcaagaccaagugcaccgccuccaacaagaaccgcggcaucaucaagaccuucuccaacggcugcgacuacgucuccaacaagggcgucgacaccgucuccgucggcaacacccucuacuacgucaacaagcaggagggcaagucccucuacgucaagggcgagcccaucaucaacuucuacgacccccucgucuuccccuccgacgaguucgacgccuccaucucccaggucaacgagaagaucaaccagucccucgccuucauccgcaaguccgacgagcuccuccacaacgucaacgccggcaaguccaccaccaacaucaugaucaccaccaucaucaucgucaucaucgucauccuccucucccucaucgccgucggccuccuccucuacugcaaggcccgcugaggacuaguguccaccugucccuccugggcugcuggauugucucguuuuccugccaaauaaacaggaucagcgcuuuacagaucuaaaaaaaaaaaaaaaaaaaaaaaaaaaaaaaaaaaaaaaaaaaaaaaaaaaaaaaaaaaaaaaaugcaucccccccccccccccccccccccccccccccaaaggcucuuuucagagccaccagaauu

SEQ ID NO: 1319 - RNA, 2111 nt, Artificial Sequence
  mRNA product Design b-1 comprising derived and/or modified sequence from HRSV(A2)__F-del_DSCav1 (opt3)
gggagacggagacggccugcaggaccugcucucucagcccucagccgaggccuacgccgagccgagugcgcagccgacgaccgggaggagccgcagccuucaacucugagguacugugauccgcgcugcccgccgggccgccccaguccgcugcugcggcaccuccuucccucgcgcccucuucgcucgccagcgccuucccugugagccugcgucaccgcggccgccaagcuuaccauggagcugcucauccuuaaggccaacgcuauuaccacaauacugacugcagugacguucugcuuugccagcggccagaauaucaccgaagaguucuaccaauccacauguucugcggucucaaaaggguauuugagugcuuuaagaacuggaugguacaccagcguuauuacaaucgaacuguccaacauuaaggagaauaaaugcaacgguaccgacgccaaggugaaacuaaucaagcaggaacucgauaaguauaaaaaugcaguaacugagcugcagcuucugaugcagucuacacccgccaccaacaauagggcucggcgcgaguugccucgauuuaugaacuacacgcucaauaacgcaaagaaaacuaaugugacccugucgaagaaacguaagagaagguuccugggcuuucucuuaggggucggaucagccauagcuagcggcguggccguuuguaaggugcugcaccuugaaggugaggucaacaaaaucaagagugcguugcuguccacaaauaaagcagugguaucucuaagcaacgggguuuccgugcucacuuucaagguccuggaccuuaaaaauuauauugauaagcaacuguugccaauccucaacaaacagucaugcaguauuagcaacaucgaaaccgugauagaguuucagcagaagaauaaccggcuguuagagauuacacgcgaguucucugugaaugccggagucaccacgccgguuuccacuuacaugcugacaaacucagaacuccuuagccugaucaaugacaugcccauuaccaacgaucaaaagaaauugaugaguaauaacgugcagaucguaagacagcagucuuauuccaucauguguauuauaaaggaagaggugcuagcuuacgucgugcaacugccucucuacggcguuaucgacacuccaugcuggaaacugcauacaagcccccuuuguaccacgaauaccaaggaaggcucgaacauuugccugacaaggacugaucgggggugguauugugacaaugccggaucuguguccuuuuucccucaggcagagaccugcaaaguccagucaaaccgcguguuuugugauacaaugaauaguuugacucucccaagcgagguaaaccugugcaauguugacaucuucaaccccaaguacgauugcaagauaaugaccuccaaaacagacgugucuagcucagucauuaccaguuuaggugcuaucguguccuguuauggcaagacuaaaugcacggccagcaacaagaaucgagggaucauuaaaacauuuucuaacggaugugauuacgucucaaauaagggcguggacaccguuaguguggguaacacucuguauuacguaaauaagcaagaagggaaaagccuauaugucaagggagagccuaucauuaacuucuacgacccacucguguucccguccgaugaauuugacgcgucuauaucgcagguuaaugagaaaaucaaccagagccuggccuucauuagaaaguccgaugaacuuuugcacaaugugaacgcaggcaaaucaaccacaaauaucaugaucaccacuauuauaaucgucauuaucgugauucugcucagucugaucgcuguaggccuucuguuguacugcaaggccaggugaggacuaguguccaccugucccuccugggcugcuggauugucucguuuuccugccaaauaaacaggaucagcgcuuuacagaucuaaaaaaaaaaaaaaaaaaaaaaaaaaaaaaaaaaaaaaaaaaaaaaaaaaaaaaaaaaaaaaaaugcaucccccccccccccccccccccccccccccccaaaggcucuuuucagagccaccagaauu

SEQ ID NO: 1320 - RNA, 2111 nt, Artificial Sequence
  mRNA product Design b-1 comprising derived and/or modified sequence from HRSV(A2)__F-del_DSCav1 (opt4)
gggagacggagacggccugcaggaccugcucucucagcccucagccgaggccuacgccgagccgagugcgcagccgacgaccgggaggagccgcagccuucaacucugagguacugugauccgcgcugcccgccgggccgccccaguccgcugcugcggcaccuccuucccucgcgcccucuucgcucgccagcgccuucccugugagccugcgucaccgcggccgccaagcuuaccauggagcugcugauccugaaggccaacgccaucaccaccauccugaccgccgugaccuucugcuucgccagcggccagaacaucaccgaggaguucuaccagagcaccugcagcgccgugagcaagggcuaccugagcgcccugagaaccggcugguacaccagcgugaucaccaucgagcugagcaacaucaaggagaacaagugcaacggcaccgacgccaaggugaagcugaucaagcaggagcuggacaaguacaagaacgccgugaccgagcugcagcugcugaugcagagcacccccgccaccaacaacagagccagaagagagcugcccagauucaugaacuacacccugaacaacgccaagaagaccaacgugacccugagcaagaagagaaagagaagauuccugggcuuccugcugggcgugggcagcgccaucgccagcggcguggccgugugcaaggugcugcaccuggagggcgaggugaacaagaucaagagcgcccugcugagcaccaacaaggccguggugagccugagcaacggcgugagcgugcugaccuucaaggugcuggaccugaagaacuacaucgacaagcagcugcugcccauccugaacaagcagagcugcagcaucagcaacaucgagaccgugaucgaguuccagcagaagaacaacagacugcuggagaucaccagagaguucagcgugaacgccggcgugaccacccccgugagcaccuacaugcugaccaacagcgagcugcugagccugaucaacgacaugcccaucaccaacgaccagaagaagcugaugagcaacaacgugcagaucgugagacagcagagcuacagcaucaugugcaucaucaaggaggaggugcuggccuacguggugcagcugccccuguacggcgugaucgacacccccugcuggaagcugcacaccagcccccugugcaccaccaacaccaaggagggcagcaacaucugccugaccagaaccgacagaggcugguacugcgacaacgccggcagcgugagcuucuucccccaggccgagaccugcaaggugcagagcaacagaguguucugcgacaccaugaacagccugacccugcccagcgaggugaaccugugcaacguggacaucuucaaccccaaguacgacugcaagaucaugaccagcaagaccgacgugagcagcagcgugaucaccagccugggcgccaucgugagcugcuacggcaagaccaagugcaccgccagcaacaagaacagaggcaucaucaagaccuucagcaacggcugcgacuacgugagcaacaagggcguggacaccgugagcgugggcaacacccuguacuacgugaacaagcaggagggcaagagccuguacgugaagggcgagcccaucaucaacuucuacgacccccugguguuccccagcgacgaguucgacgccagcaucagccaggugaacgagaagaucaaccagagccuggccuucaucagaaagagcgacgagcugcugcacaacgugaacgccggcaagagcaccaccaacaucaugaucaccaccaucaucaucgugaucaucgugauccugcugagccugaucgccgugggccugcugcuguacugcaaggccagaugaggacuaguguccaccugucccuccugggcugcuggauugucucguuuuccugccaaauaaacaggaucagcgcuuuacagaucuaaaaaaaaaaaaaaaaaaaaaaaaaaaaaaaaaaaaaaaaaaaaaaaaaaaaaaaaaaaaaaaaugcaucccccccccccccccccccccccccccccccaaaggcucuuuucagagccaccagaauu

SEQ ID NO: 1321 - RNA, 2111 nt, Artificial Sequence
  mRNA product Design b-1 comprising derived and/or modified sequence from HRSV(A2)__F-del_DSCav1 (opt5)
gggagacggagacggccugcaggaccugcucucucagcccucagccgaggccuacgccgagccgagugcgcagccgacgaccgggaggagccgcagccuucaacucugagguacugugauccgcgcugcccgccgggccgccccaguccgcugcugcggcaccuccuucccucgcgcccucuucgcucgccagcgccuucccugugagccugcgucaccgcggccgccaagcuuaccauggagcugcucauccugaaggccaacgcuauuaccacaauccuuacggccgugaccuucugcuuugcgagcggccagaauauuacagaagaguucuaccaauccaccuguucugcugucagcaaaggguaucuguccgcccucagaacaggaugguacaccucuguuaucacaauugaacugagcaacaucaaggagaauaaaugcaacggcaccgacgccaaggugaaacuuaucaagcaggaacuggauaaguauaaaaaugcugugacggagcuccagcugcugaugcaguccacccccgccacaaacaaucgggcucgcagagagcucccucgguuuaugaacuacacccugaauaacgccaagaaaacaaaugucacccuuucuaagaaacgcaagagacgguuccugggguuucuccugggagugggcagcgcgauugccuccgggguugcuguguguaagguccuucaccuggaaggagaggugaacaaaaucaagagcgcccuccugucuacgaauaaagcuguugugucccugagcaacggcgucucugugcucacauucaaggugcuggaccuuaaaaauuauauugauaagcaacugcucccgauccugaacaaacaguccugcagcauuucuaacaucgaaaccgucauugaguuucagcagaagaauaaccgccuucuggagaucacaagagaauuuuccguuaaugccggcgugaccacccccgugagcacauacaugcucacgaacuccgagcugcugucucucaucaaugacaugccuauuaccaacgaucaaaagaaacugaugagcaauaacguccagaucgugcggcagcaguccuauagcauuauguguaucauuaaggaagagguucuugcguacgugguccaacugccccucuacggggugaucgacacaccuugcuggaaacugcauaccucuccccuuuguacaaccaauacgaaggaaggauccaacaucugccugacacgcaccgauagaggcugguauugugacaaugccgggagcguuucuuucuucccucaggcugagaccugcaaagugcagagcaaccgggucuuuugugauacaaugaacucccucacccugccgucugaggugaaucugugcaaugucgacauuuucaaccccaaguacgauugcaagaucaugacaagcaaaacggacguguccagcucuguuauuaccucccucggagccaucgugagcuguuauggcaagacaaaaugcaccgcuucuaacaagaaucgcgggauuaucaaaacauuuuccaacggaugugauuacgucagcaauaagggcguggacaccguuuccgugggcaacacgcuguauuacgucaauaagcaagaagggaaaucucuuuaugugaagggagagccuaucauuaacuucuacgacccccugguguucccuagcgaugaauuugacgccuccaucucucagguuaaugagaaaauuaaccagagccucgccuucaucagaaaguccgaugaacugcugcacaaugucaacgcuggcaaaagcaccacaaauauuaugaucaccacaauuaucaucgugauuaucgugauucuucucucucugaucgcggucgggcugcuccuguacugcaaggcccggugaggacuaguguccaccugucccuccugggcugcuggauugucucguuuuccugccaaauaaacaggaucagcgcuuuacagaucuaaaaaaaaaaaaaaaaaaaaaaaaaaaaaaaaaaaaaaaaaaaaaaaaaaaaaaaaaaaaaaaaugcaucccccccccccccccccccccccccccccccaaaggcucuuuucagagccaccagaauu

SEQ ID NO: 1322 - RNA, 2111 nt, Artificial Sequence
  mRNA product Design b-1 comprising derived and/or modified sequence from HRSV(A2)__F-del_DSCav1 (opt6)
gggagacggagacggccugcaggaccugcucucucagcccucagccgaggccuacgccgagccgagugcgcagccgacgaccgggaggagccgcagccuucaacucugagguacugugauccgcgcugcccgccgggccgccccaguccgcugcugcggcaccuccuucccucgcgcccucuucgcucgccagcgccuucccugugagccugcgucaccgcggccgccaagcuuaccauggaacuauuaauauuaaaagcaaaugcuauuaccacaauacuuacugcuguaaccuucugcuuugccucuggccaaaacauaacagaagaauuuuaucaaucaacuugcuccgcuguaagcaaaggcuaccuaucagcauuacgcaccggcugguacacaucaguaauaacaauagaacuauccaacauaaaagaaaauaaaugcaacggaacagacgcaaaaguaaaauuaauaaaacaagaacucgacaaauacaaaaacgcaguaacagaauuacaacuacuaaugcaaaguacuccagccaccaacaacagagcaagaagagaauuaccacgauuuaugaacuacacacuaaacaaugcaaaaaaaacaaacguaacacuaucaaaaaaacguaaacgcagauucuuaggcuuccuccuagguguaggcucagcaaucgccucaggaguggcaguuuguaaaguacuacaccuagaaggagaaguaaacaaaaucaaaucugcccuuuuaucgacaaacaaagcaguaguaucguuauccaauggagucucaguauugacauucaaaguauuagaccuaaaaaauuauauagauaaacaacucuuaccuaucuuaaauaaacaaagcugcucaauaaguaacauagaaaccguaauagaauuucaacaaaaaaacaauagacuccuugagaucacucgagaauuuucaguaaacgcagguguaacaacaccaguaagcacauacaugcuaacaaauagugaacuauuaucucuaauuaacgauaugcccauaaccaacgaucaaaaaaaacucaugaguaacaacguacaaauaguaagacaacaauccuauagcauaaugugcauuauaaaagaagaaguacuagcauauguaguccaacuaccacuauacggcguaauagacacaccaugcuggaaacuacacaccucaccccuaugcacaacaaauacaaaagaaggaucaaacauaugcuuaaccaggacagacagaggcugguacugcgauaacgcaggaucuguuucauucuucccccaagcagaaacaugcaaaguacaaucaaacagaguauuuugugauaccaugaacucacucacauuaccauccgaagucaaccucugcaacguagacauauucaaccccaaauacgacugcaaaauaaugaccucaaaaacagauguaucaucaucaguaaucacaucacuaggagcuaucguaucuuguuauggaaaaacaaaaugcacagcauccaacaaaaacagaggaauuaucaaaacauucucaaauggaugugacuauguaucaaacaaaggaguagacaccguaagcguaggcaauacacuauauuacguaaauaaacaagaaggaaaaucacuauacguaaaaggugaaccaauaauaaacuucuaugacccccuaguauucccaucagaugaauuugacgcaagcauaucacaagucaacgaaaaaauaaaccaaucacuggcauucauucgcaaaucagaugaacuucuccacaacguaaacgcugguaaaagcacuacaaacauaaugauaacaacaaucaucauugucauaauaguuauucuauuaucacuaaucgcaguaggauuacuacuauacuguaaagcgagguaaggacuaguguccaccugucccuccugggcugcuggauugucucguuuuccugccaaauaaacaggaucagcgcuuuacagaucuaaaaaaaaaaaaaaaaaaaaaaaaaaaaaaaaaaaaaaaaaaaaaaaaaaaaaaaaaaaaaaaaugcaucccccccccccccccccccccccccccccccaaaggcucuuuucagagccaccagaauu

SEQ ID NO: 1323 - RNA, 2111 nt, Artificial Sequence
  mRNA product Design b-1 comprising derived and/or modified sequence from HRSV(A2)__F-del_DSCav1 (opt11)
gggagacggagacggccugcaggaccugcucucucagcccucagccgaggccuacgccgagccgagugcgcagccgacgaccgggaggagccgcagccuucaacucugagguacugugauccgcgcugcccgccgggccgccccaguccgcugcugcggcaccuccuucccucgcgcccucuucgcucgccagcgccuucccugugagccugcgucaccgcggccgccaagcuuaccauggagcugcucauccugaaggccaacgccaucaccacaauccugacggcggugaccuucugcuucgccagcggccagaacaucaccgaggaguucuaccaguccacgugcagcgccgucuccaagggguaccucagcgcccugcgaaccggcugguacaccuccgugaucaccaucgagcugucaaacaucaaggagaacaagugcaacgggaccgaugccaagguuaagcucaucaagcaggagcuggacaaguacaagaacgcggucacggagcugcagcuccugaugcaguccacuccggcaaccaacaaccgcgccaggcgcgagcugccccgguucaugaacuacacccucaacaacgccaagaagacgaaugugacccugagcaagaagcgcaagcggcgcuuccugggcuuccuccuaggggugggcuccgccaucgcgagcggcgucgccgugugcaagguguugcaccucgagggggaggucaacaagaucaagagcgcccugcuguccaccaacaaggccgugguaagccucuccaacggcgucagcguucugaccuucaaggugcuggaccucaagaacuauaucgacaagcagcugcugcccauccugaacaagcagagcugcuccaucucaaacaucgaaacggugauugaguuccagcagaagaacaaccggcuccuggaaaucacccgcgaguucagcgugaacgccggggucaccacccccguguccacguacaugcugaccaacagcgagcuccuaucccugaucaacgacaugccgaucaccaacgaccagaagaagcucaugagcaacaacgugcagaucguccggcagcaguccuacagcaucaugugcaucaucaaggaagaggugcuggcguacgugguccagcugccccucuacggcgugaucgacacccccugcuggaagcugcacacgagcccccugugcacaaccaacaccaaggagggguccaacaucugccucacgcgcaccgaccggggcugguacugcgacaacgccggcagcgucuccuucuucccgcaggccgagaccugcaaggugcagagcaaccgcguguucugcgacaccaugaacucccugacgcugcccucugagguaaaccucugcaacgucgacaucuucaaccccaaguacgacugcaagaucaugaccuccaagacagacgugagcuccagcgugaucacaucccugggggccaucgucagcugcuacggcaagacuaaguguacugccagcaacaagaaccgggggaucaucaagaccuucuccaacggcugcgacuacgugagcaacaagggcguggacaccguguccgucgggaacacccuguacuacguuaauaagcaggagggcaagagccucuacgugaaaggggagcccaucauuaacuucuacgacccacugguuuuccccuccgacgaguucgacgcgagcaucucccaggugaacgagaagaucaaccagagccuggccuucauccgcaaguccgacgagcugcuccacaacgugaacgccggcaagagcacgaccaacaucaugaucaccaccaucaucaucgugaucaucgugauucugcugucccucaucgccguggggcugcugcuuuacugcaaggcccggugaggacuaguguccaccugucccuccugggcugcuggauugucucguuuuccugccaaauaaacaggaucagcgcuuuacagaucuaaaaaaaaaaaaaaaaaaaaaaaaaaaaaaaaaaaaaaaaaaaaaaaaaaaaaaaaaaaaaaaaugcaucccccccccccccccccccccccccccccccaaaggcucuuuucagagccaccagaauu

SEQ ID NO: 1324 - RNA, 1931 nt, Artificial Sequence
  mRNA product Design b-2 comprising derived and/or modified sequence from HRSV(A2)__F-del_DSCav1 (opt1)
gggagagccucugcuggaguccggggaguggcguuggcugcuagagcgaagcuuaccauggagcugcucauccugaaggccaacgccaucaccaccauccugacggcggugaccuucugcuucgccagcggccagaacaucaccgaggaguucuaccaguccacgugcagcgccgucuccaagggguaccucagcgcccugcggaccggcugguacaccuccgugaucaccaucgagcugagcaacaucaaggagaacaagugcaacgggaccgacgccaaggugaagcucaucaagcaggagcuggacaaguacaagaacgcggucacggagcugcagcuccugaugcaguccaccccggcaaccaacaaccgcgcccggcgcgagcugccccgguucaugaacuacacccucaacaacgccaagaagacgaacgugacccugagcaagaagcgcaagcggcgcuuccugggcuuccuccugggggugggcuccgccaucgcgagcggcgucgccgugugcaaggugcugcaccucgagggggaggucaacaagaucaagagcgcccugcuguccaccaacaaggccguggugagccucuccaacggcgucagcgugcugaccuucaaggugcuggaccucaagaacuacaucgacaagcagcugcugcccauccugaacaagcagagcugcuccaucagcaacaucgagacggugaucgaguuccagcagaagaacaaccggcuccuggagaucacccgcgaguucagcgugaacgccggggucaccacccccguguccacguacaugcugaccaacagcgagcuccugucccugaucaacgacaugccgaucaccaacgaccagaagaagcucaugagcaacaacgugcagaucguccggcagcaguccuacagcaucaugugcaucaucaaggaggaggugcuggcguacgugguccagcugccccucuacggcgugaucgacacccccugcuggaagcugcacacgagcccccugugcaccaccaacaccaaggagggguccaacaucugccucacgcgcaccgaccggggcugguacugcgacaacgccggcagcgucuccuucuucccgcaggccgagaccugcaaggugcagagcaaccgcguguucugcgacaccaugaacucccugacgcugcccagcgagguaaaccucugcaacgucgacaucuucaaccccaaguacgacugcaagaucaugaccuccaagaccgacgugagcuccagcgugaucaccucccugggggccaucgucagcugcuacggcaagacgaagugcaccgccagcaacaagaaccgggggaucaucaagaccuucuccaacggcugcgacuacgugagcaacaagggcguggacaccguguccgucgggaacacccuguacuacgugaacaagcaggagggcaagagccucuacgugaagggggagcccaucaucaacuucuacgacccgcuggucuuccccuccgacgaguucgacgcgagcaucucccaggugaacgagaagaucaaccagagccuggccuucauccgcaaguccgacgagcugcuccacaacgugaacgccggcaagagcacgaccaacaucaugaucaccaccaucaucaucgucaucaucgugauccugcugucccucaucgccguggggcugcugcucuacugcaaggcccggugaggacuaguguccaccugucccuccugggcugcuggauugucucguuuuccugccaaauaaacaggaucagcgcuuuacagaucuaaaaaaaaaaaaaaaaaaaaaaaaaaaaaaaaaaaaaaaaaaaaaaaaaaaaaaaaaaaaaaaaugcaucccccccccccccccccccccccccccccccaaaggcucuuuucagagccaccagaauu

SEQ ID NO: 1325 - RNA, 1931 nt, Artificial Sequence
  mRNA product Design b-2 comprising derived and/or modified sequence from HRSV(A2)__F-del_DSCav1 (opt1)
gggagagccucugcuggaguccggggaguggcguuggcugcuagagcgaagcuuaccauggagcugcucauccugaaggccaacgccaucaccaccauccugacggcggugaccuucugcuucgccagcggccagaacaucaccgaggaguucuaccaguccacgugcagcgccgucuccaagggguaccucagcgcccugcgcaccggcugguacaccuccgugaucaccaucgagcugagcaacaucaaggagaacaagugcaacgggaccgacgccaaggugaagcucaucaagcaggagcuggacaaguacaagaacgcggucacggagcugcagcuccugaugcaguccacccccgccaccaacaaccgggcccgccgggagcugccgcgcuucaugaacuacacccucaacaacgccaagaagacgaacgugacccugagcaagaagcggaagcgccgguuccugggcuuccuccugggggugggcuccgcgaucgccagcggcgucgccgugugcaaggugcugcaccucgagggggaggucaacaagaucaaguccgcccugcugagcaccaacaaggccguggugucccucagcaacggcgucuccgugcugaccuucaaggugcuggaccucaagaacuacaucgacaagcagcugcugcccauccucaacaagcagagcugcuccaucagcaacaucgagacggucaucgaguuccagcagaagaacaaccgccugcuggagaucacccgggaguucuccgugaacgcgggggugaccacccccgucagcacguacaugcucaccaacagcgagcugcugucccucaucaacgacaugcccaucaccaacgaccagaagaagcugaugagcaacaacgugcagaucgugcgccagcaguccuacagcaucaugugcaucaucaaggaggagguccuggccuacguggugcagcucccgcuguacggcgucaucgacacccccugcuggaagcugcacacgagcccccucugcaccaccaacaccaaggaggggagcaacaucugccugacgcggaccgaccgcggcugguacugcgacaacgccggcuccgugagcuucuucccccaggccgagaccugcaagguccaguccaaccggguguucugcgacaccaugaacagccugacgcucccguccgaggugaaccugugcaacgucgacaucuucaaccccaaguacgacugcaagaucaugaccagcaagaccgacguguccagcuccgugaucaccagccugggggccaucgucuccugcuacggcaagacgaagugcaccgcgagcaacaagaaccgcgggaucaucaagaccuucuccaacggcugcgacuacgugagcaacaagggcguggacaccgucagcguggggaacacccucuacuacgugaacaagcaggagggcaagucccuguacgucaagggggagcccaucaucaacuucuacgacccccugguguucccgagcgacgaguucgacgccuccaucagccaggugaacgagaagaucaaccagucccucgccuucauccggaaguccgacgagcugcugcacaacgucaacgccggcaaguccacgaccaacaucaugaucaccaccaucaucaucgugaucaucgugauccugcucagccugaucgccgucgggcugcuccuguacugcaaggcgcgcugaggacuaguguccaccugucccuccugggcugcuggauugucucguuuuccugccaaauaaacaggaucagcgcuuuacagaucuaaaaaaaaaaaaaaaaaaaaaaaaaaaaaaaaaaaaaaaaaaaaaaaaaaaaaaaaaaaaaaaaugcaucccccccccccccccccccccccccccccccaaaggcucuuuucagagccaccagaauu

SEQ ID NO: 1326 - RNA, 1931 nt, Artificial Sequence
  mRNA product Design b-2 comprising derived and/or modified sequence from HRSV(A2)__F-del_DSCav1 (opt2)
gggagagccucugcuggaguccggggaguggcguuggcugcuagagcgaagcuuaccauggagcuccucauccucaaggccaacgccaucaccaccauccucaccgccgucaccuucugcuucgccuccggccagaacaucaccgaggaguucuaccaguccaccugcuccgccgucuccaagggcuaccucuccgcccuccgcaccggcugguacaccuccgucaucaccaucgagcucuccaacaucaaggagaacaagugcaacggcaccgacgccaaggucaagcucaucaagcaggagcucgacaaguacaagaacgccgucaccgagcuccagcuccucaugcaguccacccccgccaccaacaaccgcgcccgccgcgagcucccccgcuucaugaacuacacccucaacaacgccaagaagaccaacgucacccucuccaagaagcgcaagcgccgcuuccucggcuuccuccucggcgucggcuccgccaucgccuccggcgucgccgucugcaagguccuccaccucgagggcgaggucaacaagaucaaguccgcccuccucuccaccaacaaggccgucgucucccucuccaacggcgucuccguccucaccuucaagguccucgaccucaagaacuacaucgacaagcagcuccuccccauccucaacaagcaguccugcuccaucuccaacaucgagaccgucaucgaguuccagcagaagaacaaccgccuccucgagaucacccgcgaguucuccgucaacgccggcgucaccacccccgucuccaccuacaugcucaccaacuccgagcuccucucccucaucaacgacaugcccaucaccaacgaccagaagaagcucauguccaacaacguccagaucguccgccagcaguccuacuccaucaugugcaucaucaaggaggagguccucgccuacgucguccagcucccccucuacggcgucaucgacacccccugcuggaagcuccacaccuccccccucugcaccaccaacaccaaggagggcuccaacaucugccucacccgcaccgaccgcggcugguacugcgacaacgccggcuccgucuccuucuucccccaggccgagaccugcaagguccaguccaaccgcgucuucugcgacaccaugaacucccucacccuccccuccgaggucaaccucugcaacgucgacaucuucaaccccaaguacgacugcaagaucaugaccuccaagaccgacgucuccuccuccgucaucaccucccucggcgccaucgucuccugcuacggcaagaccaagugcaccgccuccaacaagaaccgcggcaucaucaagaccuucuccaacggcugcgacuacgucuccaacaagggcgucgacaccgucuccgucggcaacacccucuacuacgucaacaagcaggagggcaagucccucuacgucaagggcgagcccaucaucaacuucuacgacccccucgucuuccccuccgacgaguucgacgccuccaucucccaggucaacgagaagaucaaccagucccucgccuucauccgcaaguccgacgagcuccuccacaacgucaacgccggcaaguccaccaccaacaucaugaucaccaccaucaucaucgucaucaucgucauccuccucucccucaucgccgucggccuccuccucuacugcaaggcccgcugaggacuaguguccaccugucccuccugggcugcuggauugucucguuuuccugccaaauaaacaggaucagcgcuuuacagaucuaaaaaaaaaaaaaaaaaaaaaaaaaaaaaaaaaaaaaaaaaaaaaaaaaaaaaaaaaaaaaaaaugcaucccccccccccccccccccccccccccccccaaaggcucuuuucagagccaccagaauu

SEQ ID NO: 1327 - RNA, 1931 nt, Artificial Sequence
  mRNA product Design b-2 comprising derived and/or modified sequence from HRSV(A2)__F-del_DSCav1 (opt3)
gggagagccucugcuggaguccggggaguggcguuggcugcuagagcgaagcuuaccauggagcugcucauccuuaaggccaacgcuauuaccacaauacugacugcagugacguucugcuuugccagcggccagaauaucaccgaagaguucuaccaauccacauguucugcggucucaaaaggguauuugagugcuuuaagaacuggaugguacaccagcguuauuacaaucgaacuguccaacauuaaggagaauaaaugcaacgguaccgacgccaaggugaaacuaaucaagcaggaacucgauaaguauaaaaaugcaguaacugagcugcagcuucugaugcagucuacacccgccaccaacaauagggcucggcgcgaguugccucgauuuaugaacuacacgcucaauaacgcaaagaaaacuaaugugacccugucgaagaaacguaagagaagguuccugggcuuucucuuaggggucggaucagccauagcuagcggcguggccguuuguaaggugcugcaccuugaaggugaggucaacaaaaucaagagugcguugcuguccacaaauaaagcagugguaucucuaagcaacgggguuuccgugcucacuuucaagguccuggaccuuaaaaauuauauugauaagcaacuguugccaauccucaacaaacagucaugcaguauuagcaacaucgaaaccgugauagaguuucagcagaagaauaaccggcuguuagagauuacacgcgaguucucugugaaugccggagucaccacgccgguuuccacuuacaugcugacaaacucagaacuccuuagccugaucaaugacaugcccauuaccaacgaucaaaagaaauugaugaguaauaacgugcagaucguaagacagcagucuuauuccaucauguguauuauaaaggaagaggugcuagcuuacgucgugcaacugccucucuacggcguuaucgacacuccaugcuggaaacugcauacaagcccccuuuguaccacgaauaccaaggaaggcucgaacauuugccugacaaggacugaucgggggugguauugugacaaugccggaucuguguccuuuuucccucaggcagagaccugcaaaguccagucaaaccgcguguuuugugauacaaugaauaguuugacucucccaagcgagguaaaccugugcaauguugacaucuucaaccccaaguacgauugcaagauaaugaccuccaaaacagacgugucuagcucagucauuaccaguuuaggugcuaucguguccuguuauggcaagacuaaaugcacggccagcaacaagaaucgagggaucauuaaaacauuuucuaacggaugugauuacgucucaaauaagggcguggacaccguuaguguggguaacacucuguauuacguaaauaagcaagaagggaaaagccuauaugucaagggagagccuaucauuaacuucuacgacccacucguguucccguccgaugaauuugacgcgucuauaucgcagguuaaugagaaaaucaaccagagccuggccuucauuagaaaguccgaugaacuuuugcacaaugugaacgcaggcaaaucaaccacaaauaucaugaucaccacuauuauaaucgucauuaucgugauucugcucagucugaucgcuguaggccuucuguuguacugcaaggccaggugaggacuaguguccaccugucccuccugggcugcuggauugucucguuuuccugccaaauaaacaggaucagcgcuuuacagaucuaaaaaaaaaaaaaaaaaaaaaaaaaaaaaaaaaaaaaaaaaaaaaaaaaaaaaaaaaaaaaaaaugcaucccccccccccccccccccccccccccccccaaaggcucuuuucagagccaccagaauu

SEQ ID NO: 1328 - RNA, 1931 nt, Artificial Sequence
  mRNA product Design b-2 comprising derived and/or modified sequence from HRSV(A2)__F-del_DSCav1 (opt4)
gggagagccucugcuggaguccggggaguggcguuggcugcuagagcgaagcuuaccauggagcugcugauccugaaggccaacgccaucaccaccauccugaccgccgugaccuucugcuucgccagcggccagaacaucaccgaggaguucuaccagagcaccugcagcgccgugagcaagggcuaccugagcgcccugagaaccggcugguacaccagcgugaucaccaucgagcugagcaacaucaaggagaacaagugcaacggcaccgacgccaaggugaagcugaucaagcaggagcuggacaaguacaagaacgccgugaccgagcugcagcugcugaugcagagcacccccgccaccaacaacagagccagaagagagcugcccagauucaugaacuacacccugaacaacgccaagaagaccaacgugacccugagcaagaagagaaagagaagauuccugggcuuccugcugggcgugggcagcgccaucgccagcggcguggccgugugcaaggugcugcaccuggagggcgaggugaacaagaucaagagcgcccugcugagcaccaacaaggccguggugagccugagcaacggcgugagcgugcugaccuucaaggugcuggaccugaagaacuacaucgacaagcagcugcugcccauccugaacaagcagagcugcagcaucagcaacaucgagaccgugaucgaguuccagcagaagaacaacagacugcuggagaucaccagagaguucagcgugaacgccggcgugaccacccccgugagcaccuacaugcugaccaacagcgagcugcugagccugaucaacgacaugcccaucaccaacgaccagaagaagcugaugagcaacaacgugcagaucgugagacagcagagcuacagcaucaugugcaucaucaaggaggaggugcuggccuacguggugcagcugccccuguacggcgugaucgacacccccugcuggaagcugcacaccagcccccugugcaccaccaacaccaaggagggcagcaacaucugccugaccagaaccgacagaggcugguacugcgacaacgccggcagcgugagcuucuucccccaggccgagaccugcaaggugcagagcaacagaguguucugcgacaccaugaacagccugacccugcccagcgaggugaaccugugcaacguggacaucuucaaccccaaguacgacugcaagaucaugaccagcaagaccgacgugagcagcagcgugaucaccagccugggcgccaucgugagcugcuacggcaagaccaagugcaccgccagcaacaagaacagaggcaucaucaagaccuucagcaacggcugcgacuacgugagcaacaagggcguggacaccgugagcgugggcaacacccuguacuacgugaacaagcaggagggcaagagccuguacgugaagggcgagcccaucaucaacuucuacgacccccugguguuccccagcgacgaguucgacgccagcaucagccaggugaacgagaagaucaaccagagccuggccuucaucagaaagagcgacgagcugcugcacaacgugaacgccggcaagagcaccaccaacaucaugaucaccaccaucaucaucgugaucaucgugauccugcugagccugaucgccgugggccugcugcuguacugcaaggccagaugaggacuaguguccaccugucccuccugggcugcuggauugucucguuuuccugccaaauaaacaggaucagcgcuuuacagaucuaaaaaaaaaaaaaaaaaaaaaaaaaaaaaaaaaaaaaaaaaaaaaaaaaaaaaaaaaaaaaaaaugcaucccccccccccccccccccccccccccccccaaaggcucuuuucagagccaccagaauu

SEQ ID NO: 1329 - RNA, 1931 nt, Artificial Sequence
  mRNA product Design b-2 comprising derived and/or modified sequence from HRSV(A2)__F-del_DSCav1 (opt5)
gggagagccucugcuggaguccggggaguggcguuggcugcuagagcgaagcuuaccauggagcugcucauccugaaggccaacgcuauuaccacaauccuuacggccgugaccuucugcuuugcgagcggccagaauauuacagaagaguucuaccaauccaccuguucugcugucagcaaaggguaucuguccgcccucagaacaggaugguacaccucuguuaucacaauugaacugagcaacaucaaggagaauaaaugcaacggcaccgacgccaaggugaaacuuaucaagcaggaacuggauaaguauaaaaaugcugugacggagcuccagcugcugaugcaguccacccccgccacaaacaaucgggcucgcagagagcucccucgguuuaugaacuacacccugaauaacgccaagaaaacaaaugucacccuuucuaagaaacgcaagagacgguuccugggguuucuccugggagugggcagcgcgauugccuccgggguugcuguguguaagguccuucaccuggaaggagaggugaacaaaaucaagagcgcccuccugucuacgaauaaagcuguugugucccugagcaacggcgucucugugcucacauucaaggugcuggaccuuaaaaauuauauugauaagcaacugcucccgauccugaacaaacaguccugcagcauuucuaacaucgaaaccgucauugaguuucagcagaagaauaaccgccuucuggagaucacaagagaauuuuccguuaaugccggcgugaccacccccgugagcacauacaugcucacgaacuccgagcugcugucucucaucaaugacaugccuauuaccaacgaucaaaagaaacugaugagcaauaacguccagaucgugcggcagcaguccuauagcauuauguguaucauuaaggaagagguucuugcguacgugguccaacugccccucuacggggugaucgacacaccuugcuggaaacugcauaccucuccccuuuguacaaccaauacgaaggaaggauccaacaucugccugacacgcaccgauagaggcugguauugugacaaugccgggagcguuucuuucuucccucaggcugagaccugcaaagugcagagcaaccgggucuuuugugauacaaugaacucccucacccugccgucugaggugaaucugugcaaugucgacauuuucaaccccaaguacgauugcaagaucaugacaagcaaaacggacguguccagcucuguuauuaccucccucggagccaucgugagcuguuauggcaagacaaaaugcaccgcuucuaacaagaaucgcgggauuaucaaaacauuuuccaacggaugugauuacgucagcaauaagggcguggacaccguuuccgugggcaacacgcuguauuacgucaauaagcaagaagggaaaucucuuuaugugaagggagagccuaucauuaacuucuacgacccccugguguucccuagcgaugaauuugacgccuccaucucucagguuaaugagaaaauuaaccagagccucgccuucaucagaaaguccgaugaacugcugcacaaugucaacgcuggcaaaagcaccacaaauauuaugaucaccacaauuaucaucgugauuaucgugauucuucucucucugaucgcggucgggcugcuccuguacugcaaggcccggugaggacuaguguccaccugucccuccugggcugcuggauugucucguuuuccugccaaauaaacaggaucagcgcuuuacagaucuaaaaaaaaaaaaaaaaaaaaaaaaaaaaaaaaaaaaaaaaaaaaaaaaaaaaaaaaaaaaaaaaugcaucccccccccccccccccccccccccccccccaaaggcucuuuucagagccaccagaauu

SEQ ID NO: 1330 - RNA, 1931 nt, Artificial Sequence
  mRNA product Design b-2 comprising derived and/or modified sequence from HRSV(A2)__F-del_DSCav1 (opt6)
gggagagccucugcuggaguccggggaguggcguuggcugcuagagcgaagcuuaccauggaacuauuaauauuaaaagcaaaugcuauuaccacaauacuuacugcuguaaccuucugcuuugccucuggccaaaacauaacagaagaauuuuaucaaucaacuugcuccgcuguaagcaaaggcuaccuaucagcauuacgcaccggcugguacacaucaguaauaacaauagaacuauccaacauaaaagaaaauaaaugcaacggaacagacgcaaaaguaaaauuaauaaaacaagaacucgacaaauacaaaaacgcaguaacagaauuacaacuacuaaugcaaaguacuccagccaccaacaacagagcaagaagagaauuaccacgauuuaugaacuacacacuaaacaaugcaaaaaaaacaaacguaacacuaucaaaaaaacguaaacgcagauucuuaggcuuccuccuagguguaggcucagcaaucgccucaggaguggcaguuuguaaaguacuacaccuagaaggagaaguaaacaaaaucaaaucugcccuuuuaucgacaaacaaagcaguaguaucguuauccaauggagucucaguauugacauucaaaguauuagaccuaaaaaauuauauagauaaacaacucuuaccuaucuuaaauaaacaaagcugcucaauaaguaacauagaaaccguaauagaauuucaacaaaaaaacaauagacuccuugagaucacucgagaauuuucaguaaacgcagguguaacaacaccaguaagcacauacaugcuaacaaauagugaacuauuaucucuaauuaacgauaugcccauaaccaacgaucaaaaaaaacucaugaguaacaacguacaaauaguaagacaacaauccuauagcauaaugugcauuauaaaagaagaaguacuagcauauguaguccaacuaccacuauacggcguaauagacacaccaugcuggaaacuacacaccucaccccuaugcacaacaaauacaaaagaaggaucaaacauaugcuuaaccaggacagacagaggcugguacugcgauaacgcaggaucuguuucauucuucccccaagcagaaacaugcaaaguacaaucaaacagaguauuuugugauaccaugaacucacucacauuaccauccgaagucaaccucugcaacguagacauauucaaccccaaauacgacugcaaaauaaugaccucaaaaacagauguaucaucaucaguaaucacaucacuaggagcuaucguaucuuguuauggaaaaacaaaaugcacagcauccaacaaaaacagaggaauuaucaaaacauucucaaauggaugugacuauguaucaaacaaaggaguagacaccguaagcguaggcaauacacuauauuacguaaauaaacaagaaggaaaaucacuauacguaaaaggugaaccaauaauaaacuucuaugacccccuaguauucccaucagaugaauuugacgcaagcauaucacaagucaacgaaaaaauaaaccaaucacuggcauucauucgcaaaucagaugaacuucuccacaacguaaacgcugguaaaagcacuacaaacauaaugauaacaacaaucaucauugucauaauaguuauucuauuaucacuaaucgcaguaggauuacuacuauacuguaaagcgagguaaggacuaguguccaccugucccuccugggcugcuggauugucucguuuuccugccaaauaaacaggaucagcgcuuuacagaucuaaaaaaaaaaaaaaaaaaaaaaaaaaaaaaaaaaaaaaaaaaaaaaaaaaaaaaaaaaaaaaaaugcaucccccccccccccccccccccccccccccccaaaggcucuuuucagagccaccagaauu

SEQ ID NO: 1331 - RNA, 1931 nt, Artificial Sequence
  mRNA product Design b-2 comprising derived and/or modified sequence from HRSV(A2)__F-del_DSCav1 (opt11)
gggagagccucugcuggaguccggggaguggcguuggcugcuagagcgaagcuuaccauggagcugcucauccugaaggccaacgccaucaccacaauccugacggcggugaccuucugcuucgccagcggccagaacaucaccgaggaguucuaccaguccacgugcagcgccgucuccaagggguaccucagcgcccugcgaaccggcugguacaccuccgugaucaccaucgagcugucaaacaucaaggagaacaagugcaacgggaccgaugccaagguuaagcucaucaagcaggagcuggacaaguacaagaacgcggucacggagcugcagcuccugaugcaguccacuccggcaaccaacaaccgcgccaggcgcgagcugccccgguucaugaacuacacccucaacaacgccaagaagacgaaugugacccugagcaagaagcgcaagcggcgcuuccugggcuuccuccuaggggugggcuccgccaucgcgagcggcgucgccgugugcaagguguugcaccucgagggggaggucaacaagaucaagagcgcccugcuguccaccaacaaggccgugguaagccucuccaacggcgucagcguucugaccuucaaggugcuggaccucaagaacuauaucgacaagcagcugcugcccauccugaacaagcagagcugcuccaucucaaacaucgaaacggugauugaguuccagcagaagaacaaccggcuccuggaaaucacccgcgaguucagcgugaacgccggggucaccacccccguguccacguacaugcugaccaacagcgagcuccuaucccugaucaacgacaugccgaucaccaacgaccagaagaagcucaugagcaacaacgugcagaucguccggcagcaguccuacagcaucaugugcaucaucaaggaagaggugcuggcguacgugguccagcugccccucuacggcgugaucgacacccccugcuggaagcugcacacgagcccccugugcacaaccaacaccaaggagggguccaacaucugccucacgcgcaccgaccggggcugguacugcgacaacgccggcagcgucuccuucuucccgcaggccgagaccugcaaggugcagagcaaccgcguguucugcgacaccaugaacucccugacgcugcccucugagguaaaccucugcaacgucgacaucuucaaccccaaguacgacugcaagaucaugaccuccaagacagacgugagcuccagcgugaucacaucccugggggccaucgucagcugcuacggcaagacuaaguguacugccagcaacaagaaccgggggaucaucaagaccuucuccaacggcugcgacuacgugagcaacaagggcguggacaccguguccgucgggaacacccuguacuacguuaauaagcaggagggcaagagccucuacgugaaaggggagcccaucauuaacuucuacgacccacugguuuuccccuccgacgaguucgacgcgagcaucucccaggugaacgagaagaucaaccagagccuggccuucauccgcaaguccgacgagcugcuccacaacgugaacgccggcaagagcacgaccaacaucaugaucaccaccaucaucaucgugaucaucgugauucugcugucccucaucgccguggggcugcugcuuuacugcaaggcccggugaggacuaguguccaccugucccuccugggcugcuggauugucucguuuuccugccaaauaaacaggaucagcgcuuuacagaucuaaaaaaaaaaaaaaaaaaaaaaaaaaaaaaaaaaaaaaaaaaaaaaaaaaaaaaaaaaaaaaaaugcaucccccccccccccccccccccccccccccccaaaggcucuuuucagagccaccagaauu

SEQ ID NO: 1332 - RNA, 1951 nt, Artificial Sequence
  mRNA product Design b-3 comprising derived and/or modified sequence from HRSV(A2)__F-del_DSCav1 (opt1)
gggagagucccgcagucggcguccagcggcucugcuuguucgugugugugucguugcaggccuuauucaagcuuaccauggagcugcucauccugaaggccaacgccaucaccaccauccugacggcggugaccuucugcuucgccagcggccagaacaucaccgaggaguucuaccaguccacgugcagcgccgucuccaagggguaccucagcgcccugcggaccggcugguacaccuccgugaucaccaucgagcugagcaacaucaaggagaacaagugcaacgggaccgacgccaaggugaagcucaucaagcaggagcuggacaaguacaagaacgcggucacggagcugcagcuccugaugcaguccaccccggcaaccaacaaccgcgcccggcgcgagcugccccgguucaugaacuacacccucaacaacgccaagaagacgaacgugacccugagcaagaagcgcaagcggcgcuuccugggcuuccuccugggggugggcuccgccaucgcgagcggcgucgccgugugcaaggugcugcaccucgagggggaggucaacaagaucaagagcgcccugcuguccaccaacaaggccguggugagccucuccaacggcgucagcgugcugaccuucaaggugcuggaccucaagaacuacaucgacaagcagcugcugcccauccugaacaagcagagcugcuccaucagcaacaucgagacggugaucgaguuccagcagaagaacaaccggcuccuggagaucacccgcgaguucagcgugaacgccggggucaccacccccguguccacguacaugcugaccaacagcgagcuccugucccugaucaacgacaugccgaucaccaacgaccagaagaagcucaugagcaacaacgugcagaucguccggcagcaguccuacagcaucaugugcaucaucaaggaggaggugcuggcguacgugguccagcugccccucuacggcgugaucgacacccccugcuggaagcugcacacgagcccccugugcaccaccaacaccaaggagggguccaacaucugccucacgcgcaccgaccggggcugguacugcgacaacgccggcagcgucuccuucuucccgcaggccgagaccugcaaggugcagagcaaccgcguguucugcgacaccaugaacucccugacgcugcccagcgagguaaaccucugcaacgucgacaucuucaaccccaaguacgacugcaagaucaugaccuccaagaccgacgugagcuccagcgugaucaccucccugggggccaucgucagcugcuacggcaagacgaagugcaccgccagcaacaagaaccgggggaucaucaagaccuucuccaacggcugcgacuacgugagcaacaagggcguggacaccguguccgucgggaacacccuguacuacgugaacaagcaggagggcaagagccucuacgugaagggggagcccaucaucaacuucuacgacccgcuggucuuccccuccgacgaguucgacgcgagcaucucccaggugaacgagaagaucaaccagagccuggccuucauccgcaaguccgacgagcugcuccacaacgugaacgccggcaagagcacgaccaacaucaugaucaccaccaucaucaucgucaucaucgugauccugcugucccucaucgccguggggcugcugcucuacugcaaggcccggugaggacuaguguccaccugucccuccugggcugcuggauugucucguuuuccugccaaauaaacaggaucagcgcuuuacagaucuaaaaaaaaaaaaaaaaaaaaaaaaaaaaaaaaaaaaaaaaaaaaaaaaaaaaaaaaaaaaaaaaugcaucccccccccccccccccccccccccccccccaaaggcucuuuucagagccaccagaauu

SEQ ID NO: 1333 - RNA, 1951 nt, Artificial Sequence
  mRNA product Design b-3 comprising derived and/or modified sequence from HRSV(A2)__F-del_DSCav1 (opt1)
gggagagucccgcagucggcguccagcggcucugcuuguucgugugugugucguugcaggccuuauucaagcuuaccauggagcugcucauccugaaggccaacgccaucaccaccauccugacggcggugaccuucugcuucgccagcggccagaacaucaccgaggaguucuaccaguccacgugcagcgccgucuccaagggguaccucagcgcccugcgcaccggcugguacaccuccgugaucaccaucgagcugagcaacaucaaggagaacaagugcaacgggaccgacgccaaggugaagcucaucaagcaggagcuggacaaguacaagaacgcggucacggagcugcagcuccugaugcaguccacccccgccaccaacaaccgggcccgccgggagcugccgcgcuucaugaacuacacccucaacaacgccaagaagacgaacgugacccugagcaagaagcggaagcgccgguuccugggcuuccuccugggggugggcuccgcgaucgccagcggcgucgccgugugcaaggugcugcaccucgagggggaggucaacaagaucaaguccgcccugcugagcaccaacaaggccguggugucccucagcaacggcgucuccgugcugaccuucaaggugcuggaccucaagaacuacaucgacaagcagcugcugcccauccucaacaagcagagcugcuccaucagcaacaucgagacggucaucgaguuccagcagaagaacaaccgccugcuggagaucacccgggaguucuccgugaacgcgggggugaccacccccgucagcacguacaugcucaccaacagcgagcugcugucccucaucaacgacaugcccaucaccaacgaccagaagaagcugaugagcaacaacgugcagaucgugcgccagcaguccuacagcaucaugugcaucaucaaggaggagguccuggccuacguggugcagcucccgcuguacggcgucaucgacacccccugcuggaagcugcacacgagcccccucugcaccaccaacaccaaggaggggagcaacaucugccugacgcggaccgaccgcggcugguacugcgacaacgccggcuccgugagcuucuucccccaggccgagaccugcaagguccaguccaaccggguguucugcgacaccaugaacagccugacgcucccguccgaggugaaccugugcaacgucgacaucuucaaccccaaguacgacugcaagaucaugaccagcaagaccgacguguccagcuccgugaucaccagccugggggccaucgucuccugcuacggcaagacgaagugcaccgcgagcaacaagaaccgcgggaucaucaagaccuucuccaacggcugcgacuacgugagcaacaagggcguggacaccgucagcguggggaacacccucuacuacgugaacaagcaggagggcaagucccuguacgucaagggggagcccaucaucaacuucuacgacccccugguguucccgagcgacgaguucgacgccuccaucagccaggugaacgagaagaucaaccagucccucgccuucauccggaaguccgacgagcugcugcacaacgucaacgccggcaaguccacgaccaacaucaugaucaccaccaucaucaucgugaucaucgugauccugcucagccugaucgccgucgggcugcuccuguacugcaaggcgcgcugaggacuaguguccaccugucccuccugggcugcuggauugucucguuuuccugccaaauaaacaggaucagcgcuuuacagaucuaaaaaaaaaaaaaaaaaaaaaaaaaaaaaaaaaaaaaaaaaaaaaaaaaaaaaaaaaaaaaaaaugcaucccccccccccccccccccccccccccccccaaaggcucuuuucagagccaccagaauu

SEQ ID NO: 1334 - RNA, 1951 nt, Artificial Sequence
  mRNA product Design b-3 comprising derived and/or modified sequence from HRSV(A2)__F-del_DSCav1 (opt2)
gggagagucccgcagucggcguccagcggcucugcuuguucgugugugugucguugcaggccuuauucaagcuuaccauggagcuccucauccucaaggccaacgccaucaccaccauccucaccgccgucaccuucugcuucgccuccggccagaacaucaccgaggaguucuaccaguccaccugcuccgccgucuccaagggcuaccucuccgcccuccgcaccggcugguacaccuccgucaucaccaucgagcucuccaacaucaaggagaacaagugcaacggcaccgacgccaaggucaagcucaucaagcaggagcucgacaaguacaagaacgccgucaccgagcuccagcuccucaugcaguccacccccgccaccaacaaccgcgcccgccgcgagcucccccgcuucaugaacuacacccucaacaacgccaagaagaccaacgucacccucuccaagaagcgcaagcgccgcuuccucggcuuccuccucggcgucggcuccgccaucgccuccggcgucgccgucugcaagguccuccaccucgagggcgaggucaacaagaucaaguccgcccuccucuccaccaacaaggccgucgucucccucuccaacggcgucuccguccucaccuucaagguccucgaccucaagaacuacaucgacaagcagcuccuccccauccucaacaagcaguccugcuccaucuccaacaucgagaccgucaucgaguuccagcagaagaacaaccgccuccucgagaucacccgcgaguucuccgucaacgccggcgucaccacccccgucuccaccuacaugcucaccaacuccgagcuccucucccucaucaacgacaugcccaucaccaacgaccagaagaagcucauguccaacaacguccagaucguccgccagcaguccuacuccaucaugugcaucaucaaggaggagguccucgccuacgucguccagcucccccucuacggcgucaucgacacccccugcuggaagcuccacaccuccccccucugcaccaccaacaccaaggagggcuccaacaucugccucacccgcaccgaccgcggcugguacugcgacaacgccggcuccgucuccuucuucccccaggccgagaccugcaagguccaguccaaccgcgucuucugcgacaccaugaacucccucacccuccccuccgaggucaaccucugcaacgucgacaucuucaaccccaaguacgacugcaagaucaugaccuccaagaccgacgucuccuccuccgucaucaccucccucggcgccaucgucuccugcuacggcaagaccaagugcaccgccuccaacaagaaccgcggcaucaucaagaccuucuccaacggcugcgacuacgucuccaacaagggcgucgacaccgucuccgucggcaacacccucuacuacgucaacaagcaggagggcaagucccucuacgucaagggcgagcccaucaucaacuucuacgacccccucgucuuccccuccgacgaguucgacgccuccaucucccaggucaacgagaagaucaaccagucccucgccuucauccgcaaguccgacgagcuccuccacaacgucaacgccggcaaguccaccaccaacaucaugaucaccaccaucaucaucgucaucaucgucauccuccucucccucaucgccgucggccuccuccucuacugcaaggcccgcugaggacuaguguccaccugucccuccugggcugcuggauugucucguuuuccugccaaauaaacaggaucagcgcuuuacagaucuaaaaaaaaaaaaaaaaaaaaaaaaaaaaaaaaaaaaaaaaaaaaaaaaaaaaaaaaaaaaaaaaugcaucccccccccccccccccccccccccccccccaaaggcucuuuucagagccaccagaauu

SEQ ID NO: 1335 - RNA, 1951 nt, Artificial Sequence
  mRNA product Design b-3 comprising derived and/or modified sequence from HRSV(A2)__F-del_DSCav1 (opt3)
gggagagucccgcagucggcguccagcggcucugcuuguucgugugugugucguugcaggccuuauucaagcuuaccauggagcugcucauccuuaaggccaacgcuauuaccacaauacugacugcagugacguucugcuuugccagcggccagaauaucaccgaagaguucuaccaauccacauguucugcggucucaaaaggguauuugagugcuuuaagaacuggaugguacaccagcguuauuacaaucgaacuguccaacauuaaggagaauaaaugcaacgguaccgacgccaaggugaaacuaaucaagcaggaacucgauaaguauaaaaaugcaguaacugagcugcagcuucugaugcagucuacacccgccaccaacaauagggcucggcgcgaguugccucgauuuaugaacuacacgcucaauaacgcaaagaaaacuaaugugacccugucgaagaaacguaagagaagguuccugggcuuucucuuaggggucggaucagccauagcuagcggcguggccguuuguaaggugcugcaccuugaaggugaggucaacaaaaucaagagugcguugcuguccacaaauaaagcagugguaucucuaagcaacgggguuuccgugcucacuuucaagguccuggaccuuaaaaauuauauugauaagcaacuguugccaauccucaacaaacagucaugcaguauuagcaacaucgaaaccgugauagaguuucagcagaagaauaaccggcuguuagagauuacacgcgaguucucugugaaugccggagucaccacgccgguuuccacuuacaugcugacaaacucagaacuccuuagccugaucaaugacaugcccauuaccaacgaucaaaagaaauugaugaguaauaacgugcagaucguaagacagcagucuuauuccaucauguguauuauaaaggaagaggugcuagcuuacgucgugcaacugccucucuacggcguuaucgacacuccaugcuggaaacugcauacaagcccccuuuguaccacgaauaccaaggaaggcucgaacauuugccugacaaggacugaucgggggugguauugugacaaugccggaucuguguccuuuuucccucaggcagagaccugcaaaguccagucaaaccgcguguuuugugauacaaugaauaguuugacucucccaagcgagguaaaccugugcaauguugacaucuucaaccccaaguacgauugcaagauaaugaccuccaaaacagacgugucuagcucagucauuaccaguuuaggugcuaucguguccuguuauggcaagacuaaaugcacggccagcaacaagaaucgagggaucauuaaaacauuuucuaacggaugugauuacgucucaaauaagggcguggacaccguuaguguggguaacacucuguauuacguaaauaagcaagaagggaaaagccuauaugucaagggagagccuaucauuaacuucuacgacccacucguguucccguccgaugaauuugacgcgucuauaucgcagguuaaugagaaaaucaaccagagccuggccuucauuagaaaguccgaugaacuuuugcacaaugugaacgcaggcaaaucaaccacaaauaucaugaucaccacuauuauaaucgucauuaucgugauucugcucagucugaucgcuguaggccuucuguuguacugcaaggccaggugaggacuaguguccaccugucccuccugggcugcuggauugucucguuuuccugccaaauaaacaggaucagcgcuuuacagaucuaaaaaaaaaaaaaaaaaaaaaaaaaaaaaaaaaaaaaaaaaaaaaaaaaaaaaaaaaaaaaaaaugcaucccccccccccccccccccccccccccccccaaaggcucuuuucagagccaccagaauu

SEQ ID NO: 1336 - RNA, 1951 nt, Artificial Sequence
  mRNA product Design b-3 comprising derived and/or modified sequence from HRSV(A2)__F-del_DSCav1 (opt4)
gggagagucccgcagucggcguccagcggcucugcuuguucgugugugugucguugcaggccuuauucaagcuuaccauggagcugcugauccugaaggccaacgccaucaccaccauccugaccgccgugaccuucugcuucgccagcggccagaacaucaccgaggaguucuaccagagcaccugcagcgccgugagcaagggcuaccugagcgcccugagaaccggcugguacaccagcgugaucaccaucgagcugagcaacaucaaggagaacaagugcaacggcaccgacgccaaggugaagcugaucaagcaggagcuggacaaguacaagaacgccgugaccgagcugcagcugcugaugcagagcacccccgccaccaacaacagagccagaagagagcugcccagauucaugaacuacacccugaacaacgccaagaagaccaacgugacccugagcaagaagagaaagagaagauuccugggcuuccugcugggcgugggcagcgccaucgccagcggcguggccgugugcaaggugcugcaccuggagggcgaggugaacaagaucaagagcgcccugcugagcaccaacaaggccguggugagccugagcaacggcgugagcgugcugaccuucaaggugcuggaccugaagaacuacaucgacaagcagcugcugcccauccugaacaagcagagcugcagcaucagcaacaucgagaccgugaucgaguuccagcagaagaacaacagacugcuggagaucaccagagaguucagcgugaacgccggcgugaccacccccgugagcaccuacaugcugaccaacagcgagcugcugagccugaucaacgacaugcccaucaccaacgaccagaagaagcugaugagcaacaacgugcagaucgugagacagcagagcuacagcaucaugugcaucaucaaggaggaggugcuggccuacguggugcagcugccccuguacggcgugaucgacacccccugcuggaagcugcacaccagcccccugugcaccaccaacaccaaggagggcagcaacaucugccugaccagaaccgacagaggcugguacugcgacaacgccggcagcgugagcuucuucccccaggccgagaccugcaaggugcagagcaacagaguguucugcgacaccaugaacagccugacccugcccagcgaggugaaccugugcaacguggacaucuucaaccccaaguacgacugcaagaucaugaccagcaagaccgacgugagcagcagcgugaucaccagccugggcgccaucgugagcugcuacggcaagaccaagugcaccgccagcaacaagaacagaggcaucaucaagaccuucagcaacggcugcgacuacgugagcaacaagggcguggacaccgugagcgugggcaacacccuguacuacgugaacaagcaggagggcaagagccuguacgugaagggcgagcccaucaucaacuucuacgacccccugguguuccccagcgacgaguucgacgccagcaucagccaggugaacgagaagaucaaccagagccuggccuucaucagaaagagcgacgagcugcugcacaacgugaacgccggcaagagcaccaccaacaucaugaucaccaccaucaucaucgugaucaucgugauccugcugagccugaucgccgugggccugcugcuguacugcaaggccagaugaggacuaguguccaccugucccuccugggcugcuggauugucucguuuuccugccaaauaaacaggaucagcgcuuuacagaucuaaaaaaaaaaaaaaaaaaaaaaaaaaaaaaaaaaaaaaaaaaaaaaaaaaaaaaaaaaaaaaaaugcaucccccccccccccccccccccccccccccccaaaggcucuuuucagagccaccagaauu

SEQ ID NO: 1337 - RNA, 1951 nt, Artificial Sequence
  mRNA product Design b-3 comprising derived and/or modified sequence from HRSV(A2)__F-del_DSCav1 (opt5)
gggagagucccgcagucggcguccagcggcucugcuuguucgugugugugucguugcaggccuuauucaagcuuaccauggagcugcucauccugaaggccaacgcuauuaccacaauccuuacggccgugaccuucugcuuugcgagcggccagaauauuacagaagaguucuaccaauccaccuguucugcugucagcaaaggguaucuguccgcccucagaacaggaugguacaccucuguuaucacaauugaacugagcaacaucaaggagaauaaaugcaacggcaccgacgccaaggugaaacuuaucaagcaggaacuggauaaguauaaaaaugcugugacggagcuccagcugcugaugcaguccacccccgccacaaacaaucgggcucgcagagagcucccucgguuuaugaacuacacccugaauaacgccaagaaaacaaaugucacccuuucuaagaaacgcaagagacgguuccugggguuucuccugggagugggcagcgcgauugccuccgggguugcuguguguaagguccuucaccuggaaggagaggugaacaaaaucaagagcgcccuccugucuacgaauaaagcuguugugucccugagcaacggcgucucugugcucacauucaaggugcuggaccuuaaaaauuauauugauaagcaacugcucccgauccugaacaaacaguccugcagcauuucuaacaucgaaaccgucauugaguuucagcagaagaauaaccgccuucuggagaucacaagagaauuuuccguuaaugccggcgugaccacccccgugagcacauacaugcucacgaacuccgagcugcugucucucaucaaugacaugccuauuaccaacgaucaaaagaaacugaugagcaauaacguccagaucgugcggcagcaguccuauagcauuauguguaucauuaaggaagagguucuugcguacgugguccaacugccccucuacggggugaucgacacaccuugcuggaaacugcauaccucuccccuuuguacaaccaauacgaaggaaggauccaacaucugccugacacgcaccgauagaggcugguauugugacaaugccgggagcguuucuuucuucccucaggcugagaccugcaaagugcagagcaaccgggucuuuugugauacaaugaacucccucacccugccgucugaggugaaucugugcaaugucgacauuuucaaccccaaguacgauugcaagaucaugacaagcaaaacggacguguccagcucuguuauuaccucccucggagccaucgugagcuguuauggcaagacaaaaugcaccgcuucuaacaagaaucgcgggauuaucaaaacauuuuccaacggaugugauuacgucagcaauaagggcguggacaccguuuccgugggcaacacgcuguauuacgucaauaagcaagaagggaaaucucuuuaugugaagggagagccuaucauuaacuucuacgacccccugguguucccuagcgaugaauuugacgccuccaucucucagguuaaugagaaaauuaaccagagccucgccuucaucagaaaguccgaugaacugcugcacaaugucaacgcuggcaaaagcaccacaaauauuaugaucaccacaauuaucaucgugauuaucgugauucuucucucucugaucgcggucgggcugcuccuguacugcaaggcccggugaggacuaguguccaccugucccuccugggcugcuggauugucucguuuuccugccaaauaaacaggaucagcgcuuuacagaucuaaaaaaaaaaaaaaaaaaaaaaaaaaaaaaaaaaaaaaaaaaaaaaaaaaaaaaaaaaaaaaaaugcaucccccccccccccccccccccccccccccccaaaggcucuuuucagagccaccagaauu

SEQ ID NO: 1338 - RNA, 1951 nt, Artificial Sequence
  mRNA product Design b-3 comprising derived and/or modified sequence from HRSV(A2)__F-del_DSCav1 (opt6)
gggagagucccgcagucggcguccagcggcucugcuuguucgugugugugucguugcaggccuuauucaagcuuaccauggaacuauuaauauuaaaagcaaaugcuauuaccacaauacuuacugcuguaaccuucugcuuugccucuggccaaaacauaacagaagaauuuuaucaaucaacuugcuccgcuguaagcaaaggcuaccuaucagcauuacgcaccggcugguacacaucaguaauaacaauagaacuauccaacauaaaagaaaauaaaugcaacggaacagacgcaaaaguaaaauuaauaaaacaagaacucgacaaauacaaaaacgcaguaacagaauuacaacuacuaaugcaaaguacuccagccaccaacaacagagcaagaagagaauuaccacgauuuaugaacuacacacuaaacaaugcaaaaaaaacaaacguaacacuaucaaaaaaacguaaacgcagauucuuaggcuuccuccuagguguaggcucagcaaucgccucaggaguggcaguuuguaaaguacuacaccuagaaggagaaguaaacaaaaucaaaucugcccuuuuaucgacaaacaaagcaguaguaucguuauccaauggagucucaguauugacauucaaaguauuagaccuaaaaaauuauauagauaaacaacucuuaccuaucuuaaauaaacaaagcugcucaauaaguaacauagaaaccguaauagaauuucaacaaaaaaacaauagacuccuugagaucacucgagaauuuucaguaaacgcagguguaacaacaccaguaagcacauacaugcuaacaaauagugaacuauuaucucuaauuaacgauaugcccauaaccaacgaucaaaaaaaacucaugaguaacaacguacaaauaguaagacaacaauccuauagcauaaugugcauuauaaaagaagaaguacuagcauauguaguccaacuaccacuauacggcguaauagacacaccaugcuggaaacuacacaccucaccccuaugcacaacaaauacaaaagaaggaucaaacauaugcuuaaccaggacagacagaggcugguacugcgauaacgcaggaucuguuucauucuucccccaagcagaaacaugcaaaguacaaucaaacagaguauuuugugauaccaugaacucacucacauuaccauccgaagucaaccucugcaacguagacauauucaaccccaaauacgacugcaaaauaaugaccucaaaaacagauguaucaucaucaguaaucacaucacuaggagcuaucguaucuuguuauggaaaaacaaaaugcacagcauccaacaaaaacagaggaauuaucaaaacauucucaaauggaugugacuauguaucaaacaaaggaguagacaccguaagcguaggcaauacacuauauuacguaaauaaacaagaaggaaaaucacuauacguaaaaggugaaccaauaauaaacuucuaugacccccuaguauucccaucagaugaauuugacgcaagcauaucacaagucaacgaaaaaauaaaccaaucacuggcauucauucgcaaaucagaugaacuucuccacaacguaaacgcugguaaaagcacuacaaacauaaugauaacaacaaucaucauugucauaauaguuauucuauuaucacuaaucgcaguaggauuacuacuauacuguaaagcgagguaaggacuaguguccaccugucccuccugggcugcuggauugucucguuuuccugccaaauaaacaggaucagcgcuuuacagaucuaaaaaaaaaaaaaaaaaaaaaaaaaaaaaaaaaaaaaaaaaaaaaaaaaaaaaaaaaaaaaaaaugcaucccccccccccccccccccccccccccccccaaaggcucuuuucagagccaccagaauu

SEQ ID NO: 1339 - RNA, 1951 nt, Artificial Sequence
  mRNA product Design b-3 comprising derived and/or modified sequence from HRSV(A2)__F-del_DSCav1 (opt11)
gggagagucccgcagucggcguccagcggcucugcuuguucgugugugugucguugcaggccuuauucaagcuuaccauggagcugcucauccugaaggccaacgccaucaccacaauccugacggcggugaccuucugcuucgccagcggccagaacaucaccgaggaguucuaccaguccacgugcagcgccgucuccaagggguaccucagcgcccugcgaaccggcugguacaccuccgugaucaccaucgagcugucaaacaucaaggagaacaagugcaacgggaccgaugccaagguuaagcucaucaagcaggagcuggacaaguacaagaacgcggucacggagcugcagcuccugaugcaguccacuccggcaaccaacaaccgcgccaggcgcgagcugccccgguucaugaacuacacccucaacaacgccaagaagacgaaugugacccugagcaagaagcgcaagcggcgcuuccugggcuuccuccuaggggugggcuccgccaucgcgagcggcgucgccgugugcaagguguugcaccucgagggggaggucaacaagaucaagagcgcccugcuguccaccaacaaggccgugguaagccucuccaacggcgucagcguucugaccuucaaggugcuggaccucaagaacuauaucgacaagcagcugcugcccauccugaacaagcagagcugcuccaucucaaacaucgaaacggugauugaguuccagcagaagaacaaccggcuccuggaaaucacccgcgaguucagcgugaacgccggggucaccacccccguguccacguacaugcugaccaacagcgagcuccuaucccugaucaacgacaugccgaucaccaacgaccagaagaagcucaugagcaacaacgugcagaucguccggcagcaguccuacagcaucaugugcaucaucaaggaagaggugcuggcguacgugguccagcugccccucuacggcgugaucgacacccccugcuggaagcugcacacgagcccccugugcacaaccaacaccaaggagggguccaacaucugccucacgcgcaccgaccggggcugguacugcgacaacgccggcagcgucuccuucuucccgcaggccgagaccugcaaggugcagagcaaccgcguguucugcgacaccaugaacucccugacgcugcccucugagguaaaccucugcaacgucgacaucuucaaccccaaguacgacugcaagaucaugaccuccaagacagacgugagcuccagcgugaucacaucccugggggccaucgucagcugcuacggcaagacuaaguguacugccagcaacaagaaccgggggaucaucaagaccuucuccaacggcugcgacuacgugagcaacaagggcguggacaccguguccgucgggaacacccuguacuacguuaauaagcaggagggcaagagccucuacgugaaaggggagcccaucauuaacuucuacgacccacugguuuuccccuccgacgaguucgacgcgagcaucucccaggugaacgagaagaucaaccagagccuggccuucauccgcaaguccgacgagcugcuccacaacgugaacgccggcaagagcacgaccaacaucaugaucaccaccaucaucaucgugaucaucgugauucugcugucccucaucgccguggggcugcugcuuuacugcaaggcccggugaggacuaguguccaccugucccuccugggcugcuggauugucucguuuuccugccaaauaaacaggaucagcgcuuuacagaucuaaaaaaaaaaaaaaaaaaaaaaaaaaaaaaaaaaaaaaaaaaaaaaaaaaaaaaaaaaaaaaaaugcaucccccccccccccccccccccccccccccccaaaggcucuuuucagagccaccagaauu

SEQ ID NO: 1340 - RNA, 2002 nt, Artificial Sequence
  mRNA product Design b-4 comprising derived and/or modified sequence from HRSV(A2)__F-del_DSCav1 (opt1)
gggagagucccgcagucggcguccagcggcucugcuuguucgugugugugucguugcaggccuuauucaagcuuaccauggagcugcucauccugaaggccaacgccaucaccaccauccugacggcggugaccuucugcuucgccagcggccagaacaucaccgaggaguucuaccaguccacgugcagcgccgucuccaagggguaccucagcgcccugcggaccggcugguacaccuccgugaucaccaucgagcugagcaacaucaaggagaacaagugcaacgggaccgacgccaaggugaagcucaucaagcaggagcuggacaaguacaagaacgcggucacggagcugcagcuccugaugcaguccaccccggcaaccaacaaccgcgcccggcgcgagcugccccgguucaugaacuacacccucaacaacgccaagaagacgaacgugacccugagcaagaagcgcaagcggcgcuuccugggcuuccuccugggggugggcuccgccaucgcgagcggcgucgccgugugcaaggugcugcaccucgagggggaggucaacaagaucaagagcgcccugcuguccaccaacaaggccguggugagccucuccaacggcgucagcgugcugaccuucaaggugcuggaccucaagaacuacaucgacaagcagcugcugcccauccugaacaagcagagcugcuccaucagcaacaucgagacggugaucgaguuccagcagaagaacaaccggcuccuggagaucacccgcgaguucagcgugaacgccggggucaccacccccguguccacguacaugcugaccaacagcgagcuccugucccugaucaacgacaugccgaucaccaacgaccagaagaagcucaugagcaacaacgugcagaucguccggcagcaguccuacagcaucaugugcaucaucaaggaggaggugcuggcguacgugguccagcugccccucuacggcgugaucgacacccccugcuggaagcugcacacgagcccccugugcaccaccaacaccaaggagggguccaacaucugccucacgcgcaccgaccggggcugguacugcgacaacgccggcagcgucuccuucuucccgcaggccgagaccugcaaggugcagagcaaccgcguguucugcgacaccaugaacucccugacgcugcccagcgagguaaaccucugcaacgucgacaucuucaaccccaaguacgacugcaagaucaugaccuccaagaccgacgugagcuccagcgugaucaccucccugggggccaucgucagcugcuacggcaagacgaagugcaccgccagcaacaagaaccgggggaucaucaagaccuucuccaacggcugcgacuacgugagcaacaagggcguggacaccguguccgucgggaacacccuguacuacgugaacaagcaggagggcaagagccucuacgugaagggggagcccaucaucaacuucuacgacccgcuggucuuccccuccgacgaguucgacgcgagcaucucccaggugaacgagaagaucaaccagagccuggccuucauccgcaaguccgacgagcugcuccacaacgugaacgccggcaagagcacgaccaacaucaugaucaccaccaucaucaucgucaucaucgugauccugcugucccucaucgccguggggcugcugcucuacugcaaggcccggugaggacuaguaauaaggaaacuguaugaaugucugugggcaggaagugaagagauccuucuguaaagguuuuuggaauuaugucugcugaauaauaaacuuuuuugaaauaauaaaucugguagaaaaaugagaucuaaaaaaaaaaaaaaaaaaaaaaaaaaaaaaaaaaaaaaaaaaaaaaaaaaaaaaaaaaaaaaaaugcaucccccccccccccccccccccccccccccccaaaggcucuuuucagagccaccagaauu

SEQ ID NO: 1341 - RNA, 2002 nt, Artificial Sequence
  mRNA product Design b-4 comprising derived and/or modified sequence from HRSV(A2)__F-del_DSCav1 (opt1)
gggagagucccgcagucggcguccagcggcucugcuuguucgugugugugucguugcaggccuuauucaagcuuaccauggagcugcucauccugaaggccaacgccaucaccaccauccugacggcggugaccuucugcuucgccagcggccagaacaucaccgaggaguucuaccaguccacgugcagcgccgucuccaagggguaccucagcgcccugcgcaccggcugguacaccuccgugaucaccaucgagcugagcaacaucaaggagaacaagugcaacgggaccgacgccaaggugaagcucaucaagcaggagcuggacaaguacaagaacgcggucacggagcugcagcuccugaugcaguccacccccgccaccaacaaccgggcccgccgggagcugccgcgcuucaugaacuacacccucaacaacgccaagaagacgaacgugacccugagcaagaagcggaagcgccgguuccugggcuuccuccugggggugggcuccgcgaucgccagcggcgucgccgugugcaaggugcugcaccucgagggggaggucaacaagaucaaguccgcccugcugagcaccaacaaggccguggugucccucagcaacggcgucuccgugcugaccuucaaggugcuggaccucaagaacuacaucgacaagcagcugcugcccauccucaacaagcagagcugcuccaucagcaacaucgagacggucaucgaguuccagcagaagaacaaccgccugcuggagaucacccgggaguucuccgugaacgcgggggugaccacccccgucagcacguacaugcucaccaacagcgagcugcugucccucaucaacgacaugcccaucaccaacgaccagaagaagcugaugagcaacaacgugcagaucgugcgccagcaguccuacagcaucaugugcaucaucaaggaggagguccuggccuacguggugcagcucccgcuguacggcgucaucgacacccccugcuggaagcugcacacgagcccccucugcaccaccaacaccaaggaggggagcaacaucugccugacgcggaccgaccgcggcugguacugcgacaacgccggcuccgugagcuucuucccccaggccgagaccugcaagguccaguccaaccggguguucugcgacaccaugaacagccugacgcucccguccgaggugaaccugugcaacgucgacaucuucaaccccaaguacgacugcaagaucaugaccagcaagaccgacguguccagcuccgugaucaccagccugggggccaucgucuccugcuacggcaagacgaagugcaccgcgagcaacaagaaccgcgggaucaucaagaccuucuccaacggcugcgacuacgugagcaacaagggcguggacaccgucagcguggggaacacccucuacuacgugaacaagcaggagggcaagucccuguacgucaagggggagcccaucaucaacuucuacgacccccugguguucccgagcgacgaguucgacgccuccaucagccaggugaacgagaagaucaaccagucccucgccuucauccggaaguccgacgagcugcugcacaacgucaacgccggcaaguccacgaccaacaucaugaucaccaccaucaucaucgugaucaucgugauccugcucagccugaucgccgucgggcugcuccuguacugcaaggcgcgcugaggacuaguaauaaggaaacuguaugaaugucugugggcaggaagugaagagauccuucuguaaagguuuuuggaauuaugucugcugaauaauaaacuuuuuugaaauaauaaaucugguagaaaaaugagaucuaaaaaaaaaaaaaaaaaaaaaaaaaaaaaaaaaaaaaaaaaaaaaaaaaaaaaaaaaaaaaaaaugcaucccccccccccccccccccccccccccccccaaaggcucuuuucagagccaccagaauu

SEQ ID NO: 1342 - RNA, 2002 nt, Artificial Sequence
  mRNA product Design b-4 comprising derived and/or modified sequence from HRSV(A2)__F-del_DSCav1 (opt2)
gggagagucccgcagucggcguccagcggcucugcuuguucgugugugugucguugcaggccuuauucaagcuuaccauggagcuccucauccucaaggccaacgccaucaccaccauccucaccgccgucaccuucugcuucgccuccggccagaacaucaccgaggaguucuaccaguccaccugcuccgccgucuccaagggcuaccucuccgcccuccgcaccggcugguacaccuccgucaucaccaucgagcucuccaacaucaaggagaacaagugcaacggcaccgacgccaaggucaagcucaucaagcaggagcucgacaaguacaagaacgccgucaccgagcuccagcuccucaugcaguccacccccgccaccaacaaccgcgcccgccgcgagcucccccgcuucaugaacuacacccucaacaacgccaagaagaccaacgucacccucuccaagaagcgcaagcgccgcuuccucggcuuccuccucggcgucggcuccgccaucgccuccggcgucgccgucugcaagguccuccaccucgagggcgaggucaacaagaucaaguccgcccuccucuccaccaacaaggccgucgucucccucuccaacggcgucuccguccucaccuucaagguccucgaccucaagaacuacaucgacaagcagcuccuccccauccucaacaagcaguccugcuccaucuccaacaucgagaccgucaucgaguuccagcagaagaacaaccgccuccucgagaucacccgcgaguucuccgucaacgccggcgucaccacccccgucuccaccuacaugcucaccaacuccgagcuccucucccucaucaacgacaugcccaucaccaacgaccagaagaagcucauguccaacaacguccagaucguccgccagcaguccuacuccaucaugugcaucaucaaggaggagguccucgccuacgucguccagcucccccucuacggcgucaucgacacccccugcuggaagcuccacaccuccccccucugcaccaccaacaccaaggagggcuccaacaucugccucacccgcaccgaccgcggcugguacugcgacaacgccggcuccgucuccuucuucccccaggccgagaccugcaagguccaguccaaccgcgucuucugcgacaccaugaacucccucacccuccccuccgaggucaaccucugcaacgucgacaucuucaaccccaaguacgacugcaagaucaugaccuccaagaccgacgucuccuccuccgucaucaccucccucggcgccaucgucuccugcuacggcaagaccaagugcaccgccuccaacaagaaccgcggcaucaucaagaccuucuccaacggcugcgacuacgucuccaacaagggcgucgacaccgucuccgucggcaacacccucuacuacgucaacaagcaggagggcaagucccucuacgucaagggcgagcccaucaucaacuucuacgacccccucgucuuccccuccgacgaguucgacgccuccaucucccaggucaacgagaagaucaaccagucccucgccuucauccgcaaguccgacgagcuccuccacaacgucaacgccggcaaguccaccaccaacaucaugaucaccaccaucaucaucgucaucaucgucauccuccucucccucaucgccgucggccuccuccucuacugcaaggcccgcugaggacuaguaauaaggaaacuguaugaaugucugugggcaggaagugaagagauccuucuguaaagguuuuuggaauuaugucugcugaauaauaaacuuuuuugaaauaauaaaucugguagaaaaaugagaucuaaaaaaaaaaaaaaaaaaaaaaaaaaaaaaaaaaaaaaaaaaaaaaaaaaaaaaaaaaaaaaaaugcaucccccccccccccccccccccccccccccccaaaggcucuuuucagagccaccagaauu

SEQ ID NO: 1343 - RNA, 2002 nt, Artificial Sequence
  mRNA product Design b-4 comprising derived and/or modified sequence from HRSV(A2)__F-del_DSCav1 (opt3)
gggagagucccgcagucggcguccagcggcucugcuuguucgugugugugucguugcaggccuuauucaagcuuaccauggagcugcucauccuuaaggccaacgcuauuaccacaauacugacugcagugacguucugcuuugccagcggccagaauaucaccgaagaguucuaccaauccacauguucugcggucucaaaaggguauuugagugcuuuaagaacuggaugguacaccagcguuauuacaaucgaacuguccaacauuaaggagaauaaaugcaacgguaccgacgccaaggugaaacuaaucaagcaggaacucgauaaguauaaaaaugcaguaacugagcugcagcuucugaugcagucuacacccgccaccaacaauagggcucggcgcgaguugccucgauuuaugaacuacacgcucaauaacgcaaagaaaacuaaugugacccugucgaagaaacguaagagaagguuccugggcuuucucuuaggggucggaucagccauagcuagcggcguggccguuuguaaggugcugcaccuugaaggugaggucaacaaaaucaagagugcguugcuguccacaaauaaagcagugguaucucuaagcaacgggguuuccgugcucacuuucaagguccuggaccuuaaaaauuauauugauaagcaacuguugccaauccucaacaaacagucaugcaguauuagcaacaucgaaaccgugauagaguuucagcagaagaauaaccggcuguuagagauuacacgcgaguucucugugaaugccggagucaccacgccgguuuccacuuacaugcugacaaacucagaacuccuuagccugaucaaugacaugcccauuaccaacgaucaaaagaaauugaugaguaauaacgugcagaucguaagacagcagucuuauuccaucauguguauuauaaaggaagaggugcuagcuuacgucgugcaacugccucucuacggcguuaucgacacuccaugcuggaaacugcauacaagcccccuuuguaccacgaauaccaaggaaggcucgaacauuugccugacaaggacugaucgggggugguauugugacaaugccggaucuguguccuuuuucccucaggcagagaccugcaaaguccagucaaaccgcguguuuugugauacaaugaauaguuugacucucccaagcgagguaaaccugugcaauguugacaucuucaaccccaaguacgauugcaagauaaugaccuccaaaacagacgugucuagcucagucauuaccaguuuaggugcuaucguguccuguuauggcaagacuaaaugcacggccagcaacaagaaucgagggaucauuaaaacauuuucuaacggaugugauuacgucucaaauaagggcguggacaccguuaguguggguaacacucuguauuacguaaauaagcaagaagggaaaagccuauaugucaagggagagccuaucauuaacuucuacgacccacucguguucccguccgaugaauuugacgcgucuauaucgcagguuaaugagaaaaucaaccagagccuggccuucauuagaaaguccgaugaacuuuugcacaaugugaacgcaggcaaaucaaccacaaauaucaugaucaccacuauuauaaucgucauuaucgugauucugcucagucugaucgcuguaggccuucuguuguacugcaaggccaggugaggacuaguaauaaggaaacuguaugaaugucugugggcaggaagugaagagauccuucuguaaagguuuuuggaauuaugucugcugaauaauaaacuuuuuugaaauaauaaaucugguagaaaaaugagaucuaaaaaaaaaaaaaaaaaaaaaaaaaaaaaaaaaaaaaaaaaaaaaaaaaaaaaaaaaaaaaaaaugcaucccccccccccccccccccccccccccccccaaaggcucuuuucagagccaccagaauu

SEQ ID NO: 1344 - RNA, 2002 nt, Artificial Sequence
  mRNA product Design b-4 comprising derived and/or modified sequence from HRSV(A2)__F-del_DSCav1 (opt4)
gggagagucccgcagucggcguccagcggcucugcuuguucgugugugugucguugcaggccuuauucaagcuuaccauggagcugcugauccugaaggccaacgccaucaccaccauccugaccgccgugaccuucugcuucgccagcggccagaacaucaccgaggaguucuaccagagcaccugcagcgccgugagcaagggcuaccugagcgcccugagaaccggcugguacaccagcgugaucaccaucgagcugagcaacaucaaggagaacaagugcaacggcaccgacgccaaggugaagcugaucaagcaggagcuggacaaguacaagaacgccgugaccgagcugcagcugcugaugcagagcacccccgccaccaacaacagagccagaagagagcugcccagauucaugaacuacacccugaacaacgccaagaagaccaacgugacccugagcaagaagagaaagagaagauuccugggcuuccugcugggcgugggcagcgccaucgccagcggcguggccgugugcaaggugcugcaccuggagggcgaggugaacaagaucaagagcgcccugcugagcaccaacaaggccguggugagccugagcaacggcgugagcgugcugaccuucaaggugcuggaccugaagaacuacaucgacaagcagcugcugcccauccugaacaagcagagcugcagcaucagcaacaucgagaccgugaucgaguuccagcagaagaacaacagacugcuggagaucaccagagaguucagcgugaacgccggcgugaccacccccgugagcaccuacaugcugaccaacagcgagcugcugagccugaucaacgacaugcccaucaccaacgaccagaagaagcugaugagcaacaacgugcagaucgugagacagcagagcuacagcaucaugugcaucaucaaggaggaggugcuggccuacguggugcagcugccccuguacggcgugaucgacacccccugcuggaagcugcacaccagcccccugugcaccaccaacaccaaggagggcagcaacaucugccugaccagaaccgacagaggcugguacugcgacaacgccggcagcgugagcuucuucccccaggccgagaccugcaaggugcagagcaacagaguguucugcgacaccaugaacagccugacccugcccagcgaggugaaccugugcaacguggacaucuucaaccccaaguacgacugcaagaucaugaccagcaagaccgacgugagcagcagcgugaucaccagccugggcgccaucgugagcugcuacggcaagaccaagugcaccgccagcaacaagaacagaggcaucaucaagaccuucagcaacggcugcgacuacgugagcaacaagggcguggacaccgugagcgugggcaacacccuguacuacgugaacaagcaggagggcaagagccuguacgugaagggcgagcccaucaucaacuucuacgacccccugguguuccccagcgacgaguucgacgccagcaucagccaggugaacgagaagaucaaccagagccuggccuucaucagaaagagcgacgagcugcugcacaacgugaacgccggcaagagcaccaccaacaucaugaucaccaccaucaucaucgugaucaucgugauccugcugagccugaucgccgugggccugcugcuguacugcaaggccagaugaggacuaguaauaaggaaacuguaugaaugucugugggcaggaagugaagagauccuucuguaaagguuuuuggaauuaugucugcugaauaauaaacuuuuuugaaauaauaaaucugguagaaaaaugagaucuaaaaaaaaaaaaaaaaaaaaaaaaaaaaaaaaaaaaaaaaaaaaaaaaaaaaaaaaaaaaaaaaugcaucccccccccccccccccccccccccccccccaaaggcucuuuucagagccaccagaauu

SEQ ID NO: 1345 - RNA, 2002 nt, Artificial Sequence
  mRNA product Design b-4 comprising derived and/or modified sequence from HRSV(A2)__F-del_DSCav1 (opt5)
gggagagucccgcagucggcguccagcggcucugcuuguucgugugugugucguugcaggccuuauucaagcuuaccauggagcugcucauccugaaggccaacgcuauuaccacaauccuuacggccgugaccuucugcuuugcgagcggccagaauauuacagaagaguucuaccaauccaccuguucugcugucagcaaaggguaucuguccgcccucagaacaggaugguacaccucuguuaucacaauugaacugagcaacaucaaggagaauaaaugcaacggcaccgacgccaaggugaaacuuaucaagcaggaacuggauaaguauaaaaaugcugugacggagcuccagcugcugaugcaguccacccccgccacaaacaaucgggcucgcagagagcucccucgguuuaugaacuacacccugaauaacgccaagaaaacaaaugucacccuuucuaagaaacgcaagagacgguuccugggguuucuccugggagugggcagcgcgauugccuccgggguugcuguguguaagguccuucaccuggaaggagaggugaacaaaaucaagagcgcccuccugucuacgaauaaagcuguugugucccugagcaacggcgucucugugcucacauucaaggugcuggaccuuaaaaauuauauugauaagcaacugcucccgauccugaacaaacaguccugcagcauuucuaacaucgaaaccgucauugaguuucagcagaagaauaaccgccuucuggagaucacaagagaauuuuccguuaaugccggcgugaccacccccgugagcacauacaugcucacgaacuccgagcugcugucucucaucaaugacaugccuauuaccaacgaucaaaagaaacugaugagcaauaacguccagaucgugcggcagcaguccuauagcauuauguguaucauuaaggaagagguucuugcguacgugguccaacugccccucuacggggugaucgacacaccuugcuggaaacugcauaccucuccccuuuguacaaccaauacgaaggaaggauccaacaucugccugacacgcaccgauagaggcugguauugugacaaugccgggagcguuucuuucuucccucaggcugagaccugcaaagugcagagcaaccgggucuuuugugauacaaugaacucccucacccugccgucugaggugaaucugugcaaugucgacauuuucaaccccaaguacgauugcaagaucaugacaagcaaaacggacguguccagcucuguuauuaccucccucggagccaucgugagcuguuauggcaagacaaaaugcaccgcuucuaacaagaaucgcgggauuaucaaaacauuuuccaacggaugugauuacgucagcaauaagggcguggacaccguuuccgugggcaacacgcuguauuacgucaauaagcaagaagggaaaucucuuuaugugaagggagagccuaucauuaacuucuacgacccccugguguucccuagcgaugaauuugacgccuccaucucucagguuaaugagaaaauuaaccagagccucgccuucaucagaaaguccgaugaacugcugcacaaugucaacgcuggcaaaagcaccacaaauauuaugaucaccacaauuaucaucgugauuaucgugauucuucucucucugaucgcggucgggcugcuccuguacugcaaggcccggugaggacuaguaauaaggaaacuguaugaaugucugugggcaggaagugaagagauccuucuguaaagguuuuuggaauuaugucugcugaauaauaaacuuuuuugaaauaauaaaucugguagaaaaaugagaucuaaaaaaaaaaaaaaaaaaaaaaaaaaaaaaaaaaaaaaaaaaaaaaaaaaaaaaaaaaaaaaaaugcaucccccccccccccccccccccccccccccccaaaggcucuuuucagagccaccagaauu

SEQ ID NO: 1346 - RNA, 2002 nt, Artificial Sequence
  mRNA product Design b-4 comprising derived and/or modified sequence from HRSV(A2)__F-del_DSCav1 (opt6)
gggagagucccgcagucggcguccagcggcucugcuuguucgugugugugucguugcaggccuuauucaagcuuaccauggaacuauuaauauuaaaagcaaaugcuauuaccacaauacuuacugcuguaaccuucugcuuugccucuggccaaaacauaacagaagaauuuuaucaaucaacuugcuccgcuguaagcaaaggcuaccuaucagcauuacgcaccggcugguacacaucaguaauaacaauagaacuauccaacauaaaagaaaauaaaugcaacggaacagacgcaaaaguaaaauuaauaaaacaagaacucgacaaauacaaaaacgcaguaacagaauuacaacuacuaaugcaaaguacuccagccaccaacaacagagcaagaagagaauuaccacgauuuaugaacuacacacuaaacaaugcaaaaaaaacaaacguaacacuaucaaaaaaacguaaacgcagauucuuaggcuuccuccuagguguaggcucagcaaucgccucaggaguggcaguuuguaaaguacuacaccuagaaggagaaguaaacaaaaucaaaucugcccuuuuaucgacaaacaaagcaguaguaucguuauccaauggagucucaguauugacauucaaaguauuagaccuaaaaaauuauauagauaaacaacucuuaccuaucuuaaauaaacaaagcugcucaauaaguaacauagaaaccguaauagaauuucaacaaaaaaacaauagacuccuugagaucacucgagaauuuucaguaaacgcagguguaacaacaccaguaagcacauacaugcuaacaaauagugaacuauuaucucuaauuaacgauaugcccauaaccaacgaucaaaaaaaacucaugaguaacaacguacaaauaguaagacaacaauccuauagcauaaugugcauuauaaaagaagaaguacuagcauauguaguccaacuaccacuauacggcguaauagacacaccaugcuggaaacuacacaccucaccccuaugcacaacaaauacaaaagaaggaucaaacauaugcuuaaccaggacagacagaggcugguacugcgauaacgcaggaucuguuucauucuucccccaagcagaaacaugcaaaguacaaucaaacagaguauuuugugauaccaugaacucacucacauuaccauccgaagucaaccucugcaacguagacauauucaaccccaaauacgacugcaaaauaaugaccucaaaaacagauguaucaucaucaguaaucacaucacuaggagcuaucguaucuuguuauggaaaaacaaaaugcacagcauccaacaaaaacagaggaauuaucaaaacauucucaaauggaugugacuauguaucaaacaaaggaguagacaccguaagcguaggcaauacacuauauuacguaaauaaacaagaaggaaaaucacuauacguaaaaggugaaccaauaauaaacuucuaugacccccuaguauucccaucagaugaauuugacgcaagcauaucacaagucaacgaaaaaauaaaccaaucacuggcauucauucgcaaaucagaugaacuucuccacaacguaaacgcugguaaaagcacuacaaacauaaugauaacaacaaucaucauugucauaauaguuauucuauuaucacuaaucgcaguaggauuacuacuauacuguaaagcgagguaaggacuaguaauaaggaaacuguaugaaugucugugggcaggaagugaagagauccuucuguaaagguuuuuggaauuaugucugcugaauaauaaacuuuuuugaaauaauaaaucugguagaaaaaugagaucuaaaaaaaaaaaaaaaaaaaaaaaaaaaaaaaaaaaaaaaaaaaaaaaaaaaaaaaaaaaaaaaaugcaucccccccccccccccccccccccccccccccaaaggcucuuuucagagccaccagaauu

SEQ ID NO: 1347 - RNA, 2002 nt, Artificial Sequence
  mRNA product Design b-4 comprising derived and/or modified sequence from HRSV(A2)__F-del_DSCav1 (opt11)
gggagagucccgcagucggcguccagcggcucugcuuguucgugugugugucguugcaggccuuauucaagcuuaccauggagcugcucauccugaaggccaacgccaucaccacaauccugacggcggugaccuucugcuucgccagcggccagaacaucaccgaggaguucuaccaguccacgugcagcgccgucuccaagggguaccucagcgcccugcgaaccggcugguacaccuccgugaucaccaucgagcugucaaacaucaaggagaacaagugcaacgggaccgaugccaagguuaagcucaucaagcaggagcuggacaaguacaagaacgcggucacggagcugcagcuccugaugcaguccacuccggcaaccaacaaccgcgccaggcgcgagcugccccgguucaugaacuacacccucaacaacgccaagaagacgaaugugacccugagcaagaagcgcaagcggcgcuuccugggcuuccuccuaggggugggcuccgccaucgcgagcggcgucgccgugugcaagguguugcaccucgagggggaggucaacaagaucaagagcgcccugcuguccaccaacaaggccgugguaagccucuccaacggcgucagcguucugaccuucaaggugcuggaccucaagaacuauaucgacaagcagcugcugcccauccugaacaagcagagcugcuccaucucaaacaucgaaacggugauugaguuccagcagaagaacaaccggcuccuggaaaucacccgcgaguucagcgugaacgccggggucaccacccccguguccacguacaugcugaccaacagcgagcuccuaucccugaucaacgacaugccgaucaccaacgaccagaagaagcucaugagcaacaacgugcagaucguccggcagcaguccuacagcaucaugugcaucaucaaggaagaggugcuggcguacgugguccagcugccccucuacggcgugaucgacacccccugcuggaagcugcacacgagcccccugugcacaaccaacaccaaggagggguccaacaucugccucacgcgcaccgaccggggcugguacugcgacaacgccggcagcgucuccuucuucccgcaggccgagaccugcaaggugcagagcaaccgcguguucugcgacaccaugaacucccugacgcugcccucugagguaaaccucugcaacgucgacaucuucaaccccaaguacgacugcaagaucaugaccuccaagacagacgugagcuccagcgugaucacaucccugggggccaucgucagcugcuacggcaagacuaaguguacugccagcaacaagaaccgggggaucaucaagaccuucuccaacggcugcgacuacgugagcaacaagggcguggacaccguguccgucgggaacacccuguacuacguuaauaagcaggagggcaagagccucuacgugaaaggggagcccaucauuaacuucuacgacccacugguuuuccccuccgacgaguucgacgcgagcaucucccaggugaacgagaagaucaaccagagccuggccuucauccgcaaguccgacgagcugcuccacaacgugaacgccggcaagagcacgaccaacaucaugaucaccaccaucaucaucgugaucaucgugauucugcugucccucaucgccguggggcugcugcuuuacugcaaggcccggugaggacuaguaauaaggaaacuguaugaaugucugugggcaggaagugaagagauccuucuguaaagguuuuuggaauuaugucugcugaauaauaaacuuuuuugaaauaauaaaucugguagaaaaaugagaucuaaaaaaaaaaaaaaaaaaaaaaaaaaaaaaaaaaaaaaaaaaaaaaaaaaaaaaaaaaaaaaaaugcaucccccccccccccccccccccccccccccccaaaggcucuuuucagagccaccagaauu

SEQ ID NO: 1348 - RNA, 2064 nt, Artificial Sequence
  mRNA product Design b-5 comprising derived and/or modified sequence from HRSV(A2)__F-del_DSCav1 (opt1)
gggagacuccugucgggcggaaguaggaggaguagaguuuaaaaacaguacucuuuuuccgguucgggacguaguugaagcaacgacaagccggauaaccgcucuugagacaggaagcuuaccauggagcugcucauccugaaggccaacgccaucaccaccauccugacggcggugaccuucugcuucgccagcggccagaacaucaccgaggaguucuaccaguccacgugcagcgccgucuccaagggguaccucagcgcccugcggaccggcugguacaccuccgugaucaccaucgagcugagcaacaucaaggagaacaagugcaacgggaccgacgccaaggugaagcucaucaagcaggagcuggacaaguacaagaacgcggucacggagcugcagcuccugaugcaguccaccccggcaaccaacaaccgcgcccggcgcgagcugccccgguucaugaacuacacccucaacaacgccaagaagacgaacgugacccugagcaagaagcgcaagcggcgcuuccugggcuuccuccugggggugggcuccgccaucgcgagcggcgucgccgugugcaaggugcugcaccucgagggggaggucaacaagaucaagagcgcccugcuguccaccaacaaggccguggugagccucuccaacggcgucagcgugcugaccuucaaggugcuggaccucaagaacuacaucgacaagcagcugcugcccauccugaacaagcagagcugcuccaucagcaacaucgagacggugaucgaguuccagcagaagaacaaccggcuccuggagaucacccgcgaguucagcgugaacgccggggucaccacccccguguccacguacaugcugaccaacagcgagcuccugucccugaucaacgacaugccgaucaccaacgaccagaagaagcucaugagcaacaacgugcagaucguccggcagcaguccuacagcaucaugugcaucaucaaggaggaggugcuggcguacgugguccagcugccccucuacggcgugaucgacacccccugcuggaagcugcacacgagcccccugugcaccaccaacaccaaggagggguccaacaucugccucacgcgcaccgaccggggcugguacugcgacaacgccggcagcgucuccuucuucccgcaggccgagaccugcaaggugcagagcaaccgcguguucugcgacaccaugaacucccugacgcugcccagcgagguaaaccucugcaacgucgacaucuucaaccccaaguacgacugcaagaucaugaccuccaagaccgacgugagcuccagcgugaucaccucccugggggccaucgucagcugcuacggcaagacgaagugcaccgccagcaacaagaaccgggggaucaucaagaccuucuccaacggcugcgacuacgugagcaacaagggcguggacaccguguccgucgggaacacccuguacuacgugaacaagcaggagggcaagagccucuacgugaagggggagcccaucaucaacuucuacgacccgcuggucuuccccuccgacgaguucgacgcgagcaucucccaggugaacgagaagaucaaccagagccuggccuucauccgcaaguccgacgagcugcuccacaacgugaacgccggcaagagcacgaccaacaucaugaucaccaccaucaucaucgucaucaucgugauccugcugucccucaucgccguggggcugcugcucuacugcaaggcccggugaggacuaguacuggcugcaucucccuuuccucuguccuccauccuucucccaggauggugaagggggaccugguacccagugauccccaccccaggauccuaaaucaugacuuaccugcuaauaaaaacucauuggaaaagugagaagaucuaaaaaaaaaaaaaaaaaaaaaaaaaaaaaaaaaaaaaaaaaaaaaaaaaaaaaaaaaaaaaaaaugcaucccccccccccccccccccccccccccccccaaaggcucuuuucagagccaccagaauu

SEQ ID NO: 1349 - RNA, 2064 nt, Artificial Sequence
  mRNA product Design b-5 comprising derived and/or modified sequence from HRSV(A2)__F-del_DSCav1 (opt1)
gggagacuccugucgggcggaaguaggaggaguagaguuuaaaaacaguacucuuuuuccgguucgggacguaguugaagcaacgacaagccggauaaccgcucuugagacaggaagcuuaccauggagcugcucauccugaaggccaacgccaucaccaccauccugacggcggugaccuucugcuucgccagcggccagaacaucaccgaggaguucuaccaguccacgugcagcgccgucuccaagggguaccucagcgcccugcgcaccggcugguacaccuccgugaucaccaucgagcugagcaacaucaaggagaacaagugcaacgggaccgacgccaaggugaagcucaucaagcaggagcuggacaaguacaagaacgcggucacggagcugcagcuccugaugcaguccacccccgccaccaacaaccgggcccgccgggagcugccgcgcuucaugaacuacacccucaacaacgccaagaagacgaacgugacccugagcaagaagcggaagcgccgguuccugggcuuccuccugggggugggcuccgcgaucgccagcggcgucgccgugugcaaggugcugcaccucgagggggaggucaacaagaucaaguccgcccugcugagcaccaacaaggccguggugucccucagcaacggcgucuccgugcugaccuucaaggugcuggaccucaagaacuacaucgacaagcagcugcugcccauccucaacaagcagagcugcuccaucagcaacaucgagacggucaucgaguuccagcagaagaacaaccgccugcuggagaucacccgggaguucuccgugaacgcgggggugaccacccccgucagcacguacaugcucaccaacagcgagcugcugucccucaucaacgacaugcccaucaccaacgaccagaagaagcugaugagcaacaacgugcagaucgugcgccagcaguccuacagcaucaugugcaucaucaaggaggagguccuggccuacguggugcagcucccgcuguacggcgucaucgacacccccugcuggaagcugcacacgagcccccucugcaccaccaacaccaaggaggggagcaacaucugccugacgcggaccgaccgcggcugguacugcgacaacgccggcuccgugagcuucuucccccaggccgagaccugcaagguccaguccaaccggguguucugcgacaccaugaacagccugacgcucccguccgaggugaaccugugcaacgucgacaucuucaaccccaaguacgacugcaagaucaugaccagcaagaccgacguguccagcuccgugaucaccagccugggggccaucgucuccugcuacggcaagacgaagugcaccgcgagcaacaagaaccgcgggaucaucaagaccuucuccaacggcugcgacuacgugagcaacaagggcguggacaccgucagcguggggaacacccucuacuacgugaacaagcaggagggcaagucccuguacgucaagggggagcccaucaucaacuucuacgacccccugguguucccgagcgacgaguucgacgccuccaucagccaggugaacgagaagaucaaccagucccucgccuucauccggaaguccgacgagcugcugcacaacgucaacgccggcaaguccacgaccaacaucaugaucaccaccaucaucaucgugaucaucgugauccugcucagccugaucgccgucgggcugcuccuguacugcaaggcgcgcugaggacuaguacuggcugcaucucccuuuccucuguccuccauccuucucccaggauggugaagggggaccugguacccagugauccccaccccaggauccuaaaucaugacuuaccugcuaauaaaaacucauuggaaaagugagaagaucuaaaaaaaaaaaaaaaaaaaaaaaaaaaaaaaaaaaaaaaaaaaaaaaaaaaaaaaaaaaaaaaaugcaucccccccccccccccccccccccccccccccaaaggcucuuuucagagccaccagaauu

SEQ ID NO: 1350 - RNA, 2064 nt, Artificial Sequence
  mRNA product Design b-5 comprising derived and/or modified sequence from HRSV(A2)__F-del_DSCav1 (opt2)
gggagacuccugucgggcggaaguaggaggaguagaguuuaaaaacaguacucuuuuuccgguucgggacguaguugaagcaacgacaagccggauaaccgcucuugagacaggaagcuuaccauggagcuccucauccucaaggccaacgccaucaccaccauccucaccgccgucaccuucugcuucgccuccggccagaacaucaccgaggaguucuaccaguccaccugcuccgccgucuccaagggcuaccucuccgcccuccgcaccggcugguacaccuccgucaucaccaucgagcucuccaacaucaaggagaacaagugcaacggcaccgacgccaaggucaagcucaucaagcaggagcucgacaaguacaagaacgccgucaccgagcuccagcuccucaugcaguccacccccgccaccaacaaccgcgcccgccgcgagcucccccgcuucaugaacuacacccucaacaacgccaagaagaccaacgucacccucuccaagaagcgcaagcgccgcuuccucggcuuccuccucggcgucggcuccgccaucgccuccggcgucgccgucugcaagguccuccaccucgagggcgaggucaacaagaucaaguccgcccuccucuccaccaacaaggccgucgucucccucuccaacggcgucuccguccucaccuucaagguccucgaccucaagaacuacaucgacaagcagcuccuccccauccucaacaagcaguccugcuccaucuccaacaucgagaccgucaucgaguuccagcagaagaacaaccgccuccucgagaucacccgcgaguucuccgucaacgccggcgucaccacccccgucuccaccuacaugcucaccaacuccgagcuccucucccucaucaacgacaugcccaucaccaacgaccagaagaagcucauguccaacaacguccagaucguccgccagcaguccuacuccaucaugugcaucaucaaggaggagguccucgccuacgucguccagcucccccucuacggcgucaucgacacccccugcuggaagcuccacaccuccccccucugcaccaccaacaccaaggagggcuccaacaucugccucacccgcaccgaccgcggcugguacugcgacaacgccggcuccgucuccuucuucccccaggccgagaccugcaagguccaguccaaccgcgucuucugcgacaccaugaacucccucacccuccccuccgaggucaaccucugcaacgucgacaucuucaaccccaaguacgacugcaagaucaugaccuccaagaccgacgucuccuccuccgucaucaccucccucggcgccaucgucuccugcuacggcaagaccaagugcaccgccuccaacaagaaccgcggcaucaucaagaccuucuccaacggcugcgacuacgucuccaacaagggcgucgacaccgucuccgucggcaacacccucuacuacgucaacaagcaggagggcaagucccucuacgucaagggcgagcccaucaucaacuucuacgacccccucgucuuccccuccgacgaguucgacgccuccaucucccaggucaacgagaagaucaaccagucccucgccuucauccgcaaguccgacgagcuccuccacaacgucaacgccggcaaguccaccaccaacaucaugaucaccaccaucaucaucgucaucaucgucauccuccucucccucaucgccgucggccuccuccucuacugcaaggcccgcugaggacuaguacuggcugcaucucccuuuccucuguccuccauccuucucccaggauggugaagggggaccugguacccagugauccccaccccaggauccuaaaucaugacuuaccugcuaauaaaaacucauuggaaaagugagaagaucuaaaaaaaaaaaaaaaaaaaaaaaaaaaaaaaaaaaaaaaaaaaaaaaaaaaaaaaaaaaaaaaaugcaucccccccccccccccccccccccccccccccaaaggcucuuuucagagccaccagaauu

SEQ ID NO: 1351 - RNA, 2064 nt, Artificial Sequence
  mRNA product Design b-5 comprising derived and/or modified sequence from HRSV(A2)__F-del_DSCav1 (opt3)
gggagacuccugucgggcggaaguaggaggaguagaguuuaaaaacaguacucuuuuuccgguucgggacguaguugaagcaacgacaagccggauaaccgcucuugagacaggaagcuuaccauggagcugcucauccuuaaggccaacgcuauuaccacaauacugacugcagugacguucugcuuugccagcggccagaauaucaccgaagaguucuaccaauccacauguucugcggucucaaaaggguauuugagugcuuuaagaacuggaugguacaccagcguuauuacaaucgaacuguccaacauuaaggagaauaaaugcaacgguaccgacgccaaggugaaacuaaucaagcaggaacucgauaaguauaaaaaugcaguaacugagcugcagcuucugaugcagucuacacccgccaccaacaauagggcucggcgcgaguugccucgauuuaugaacuacacgcucaauaacgcaaagaaaacuaaugugacccugucgaagaaacguaagagaagguuccugggcuuucucuuaggggucggaucagccauagcuagcggcguggccguuuguaaggugcugcaccuugaaggugaggucaacaaaaucaagagugcguugcuguccacaaauaaagcagugguaucucuaagcaacgggguuuccgugcucacuuucaagguccuggaccuuaaaaauuauauugauaagcaacuguugccaauccucaacaaacagucaugcaguauuagcaacaucgaaaccgugauagaguuucagcagaagaauaaccggcuguuagagauuacacgcgaguucucugugaaugccggagucaccacgccgguuuccacuuacaugcugacaaacucagaacuccuuagccugaucaaugacaugcccauuaccaacgaucaaaagaaauugaugaguaauaacgugcagaucguaagacagcagucuuauuccaucauguguauuauaaaggaagaggugcuagcuuacgucgugcaacugccucucuacggcguuaucgacacuccaugcuggaaacugcauacaagcccccuuuguaccacgaauaccaaggaaggcucgaacauuugccugacaaggacugaucgggggugguauugugacaaugccggaucuguguccuuuuucccucaggcagagaccugcaaaguccagucaaaccgcguguuuugugauacaaugaauaguuugacucucccaagcgagguaaaccugugcaauguugacaucuucaaccccaaguacgauugcaagauaaugaccuccaaaacagacgugucuagcucagucauuaccaguuuaggugcuaucguguccuguuauggcaagacuaaaugcacggccagcaacaagaaucgagggaucauuaaaacauuuucuaacggaugugauuacgucucaaauaagggcguggacaccguuaguguggguaacacucuguauuacguaaauaagcaagaagggaaaagccuauaugucaagggagagccuaucauuaacuucuacgacccacucguguucccguccgaugaauuugacgcgucuauaucgcagguuaaugagaaaaucaaccagagccuggccuucauuagaaaguccgaugaacuuuugcacaaugugaacgcaggcaaaucaaccacaaauaucaugaucaccacuauuauaaucgucauuaucgugauucugcucagucugaucgcuguaggccuucuguuguacugcaaggccaggugaggacuaguacuggcugcaucucccuuuccucuguccuccauccuucucccaggauggugaagggggaccugguacccagugauccccaccccaggauccuaaaucaugacuuaccugcuaauaaaaacucauuggaaaagugagaagaucuaaaaaaaaaaaaaaaaaaaaaaaaaaaaaaaaaaaaaaaaaaaaaaaaaaaaaaaaaaaaaaaaugcaucccccccccccccccccccccccccccccccaaaggcucuuuucagagccaccagaauu

SEQ ID NO: 1352 - RNA, 2064 nt, Artificial Sequence
  mRNA product Design b-5 comprising derived and/or modified sequence from HRSV(A2)__F-del_DSCav1 (opt4)
gggagacuccugucgggcggaaguaggaggaguagaguuuaaaaacaguacucuuuuuccgguucgggacguaguugaagcaacgacaagccggauaaccgcucuugagacaggaagcuuaccauggagcugcugauccugaaggccaacgccaucaccaccauccugaccgccgugaccuucugcuucgccagcggccagaacaucaccgaggaguucuaccagagcaccugcagcgccgugagcaagggcuaccugagcgcccugagaaccggcugguacaccagcgugaucaccaucgagcugagcaacaucaaggagaacaagugcaacggcaccgacgccaaggugaagcugaucaagcaggagcuggacaaguacaagaacgccgugaccgagcugcagcugcugaugcagagcacccccgccaccaacaacagagccagaagagagcugcccagauucaugaacuacacccugaacaacgccaagaagaccaacgugacccugagcaagaagagaaagagaagauuccugggcuuccugcugggcgugggcagcgccaucgccagcggcguggccgugugcaaggugcugcaccuggagggcgaggugaacaagaucaagagcgcccugcugagcaccaacaaggccguggugagccugagcaacggcgugagcgugcugaccuucaaggugcuggaccugaagaacuacaucgacaagcagcugcugcccauccugaacaagcagagcugcagcaucagcaacaucgagaccgugaucgaguuccagcagaagaacaacagacugcuggagaucaccagagaguucagcgugaacgccggcgugaccacccccgugagcaccuacaugcugaccaacagcgagcugcugagccugaucaacgacaugcccaucaccaacgaccagaagaagcugaugagcaacaacgugcagaucgugagacagcagagcuacagcaucaugugcaucaucaaggaggaggugcuggccuacguggugcagcugccccuguacggcgugaucgacacccccugcuggaagcugcacaccagcccccugugcaccaccaacaccaaggagggcagcaacaucugccugaccagaaccgacagaggcugguacugcgacaacgccggcagcgugagcuucuucccccaggccgagaccugcaaggugcagagcaacagaguguucugcgacaccaugaacagccugacccugcccagcgaggugaaccugugcaacguggacaucuucaaccccaaguacgacugcaagaucaugaccagcaagaccgacgugagcagcagcgugaucaccagccugggcgccaucgugagcugcuacggcaagaccaagugcaccgccagcaacaagaacagaggcaucaucaagaccuucagcaacggcugcgacuacgugagcaacaagggcguggacaccgugagcgugggcaacacccuguacuacgugaacaagcaggagggcaagagccuguacgugaagggcgagcccaucaucaacuucuacgacccccugguguuccccagcgacgaguucgacgccagcaucagccaggugaacgagaagaucaaccagagccuggccuucaucagaaagagcgacgagcugcugcacaacgugaacgccggcaagagcaccaccaacaucaugaucaccaccaucaucaucgugaucaucgugauccugcugagccugaucgccgugggccugcugcuguacugcaaggccagaugaggacuaguacuggcugcaucucccuuuccucuguccuccauccuucucccaggauggugaagggggaccugguacccagugauccccaccccaggauccuaaaucaugacuuaccugcuaauaaaaacucauuggaaaagugagaagaucuaaaaaaaaaaaaaaaaaaaaaaaaaaaaaaaaaaaaaaaaaaaaaaaaaaaaaaaaaaaaaaaaugcaucccccccccccccccccccccccccccccccaaaggcucuuuucagagccaccagaauu

SEQ ID NO: 1353 - RNA, 2064 nt, Artificial Sequence
  mRNA product Design b-5 comprising derived and/or modified sequence from HRSV(A2)__F-del_DSCav1 (opt5)
gggagacuccugucgggcggaaguaggaggaguagaguuuaaaaacaguacucuuuuuccgguucgggacguaguugaagcaacgacaagccggauaaccgcucuugagacaggaagcuuaccauggagcugcucauccugaaggccaacgcuauuaccacaauccuuacggccgugaccuucugcuuugcgagcggccagaauauuacagaagaguucuaccaauccaccuguucugcugucagcaaaggguaucuguccgcccucagaacaggaugguacaccucuguuaucacaauugaacugagcaacaucaaggagaauaaaugcaacggcaccgacgccaaggugaaacuuaucaagcaggaacuggauaaguauaaaaaugcugugacggagcuccagcugcugaugcaguccacccccgccacaaacaaucgggcucgcagagagcucccucgguuuaugaacuacacccugaauaacgccaagaaaacaaaugucacccuuucuaagaaacgcaagagacgguuccugggguuucuccugggagugggcagcgcgauugccuccgggguugcuguguguaagguccuucaccuggaaggagaggugaacaaaaucaagagcgcccuccugucuacgaauaaagcuguugugucccugagcaacggcgucucugugcucacauucaaggugcuggaccuuaaaaauuauauugauaagcaacugcucccgauccugaacaaacaguccugcagcauuucuaacaucgaaaccgucauugaguuucagcagaagaauaaccgccuucuggagaucacaagagaauuuuccguuaaugccggcgugaccacccccgugagcacauacaugcucacgaacuccgagcugcugucucucaucaaugacaugccuauuaccaacgaucaaaagaaacugaugagcaauaacguccagaucgugcggcagcaguccuauagcauuauguguaucauuaaggaagagguucuugcguacgugguccaacugccccucuacggggugaucgacacaccuugcuggaaacugcauaccucuccccuuuguacaaccaauacgaaggaaggauccaacaucugccugacacgcaccgauagaggcugguauugugacaaugccgggagcguuucuuucuucccucaggcugagaccugcaaagugcagagcaaccgggucuuuugugauacaaugaacucccucacccugccgucugaggugaaucugugcaaugucgacauuuucaaccccaaguacgauugcaagaucaugacaagcaaaacggacguguccagcucuguuauuaccucccucggagccaucgugagcuguuauggcaagacaaaaugcaccgcuucuaacaagaaucgcgggauuaucaaaacauuuuccaacggaugugauuacgucagcaauaagggcguggacaccguuuccgugggcaacacgcuguauuacgucaauaagcaagaagggaaaucucuuuaugugaagggagagccuaucauuaacuucuacgacccccugguguucccuagcgaugaauuugacgccuccaucucucagguuaaugagaaaauuaaccagagccucgccuucaucagaaaguccgaugaacugcugcacaaugucaacgcuggcaaaagcaccacaaauauuaugaucaccacaauuaucaucgugauuaucgugauucuucucucucugaucgcggucgggcugcuccuguacugcaaggcccggugaggacuaguacuggcugcaucucccuuuccucuguccuccauccuucucccaggauggugaagggggaccugguacccagugauccccaccccaggauccuaaaucaugacuuaccugcuaauaaaaacucauuggaaaagugagaagaucuaaaaaaaaaaaaaaaaaaaaaaaaaaaaaaaaaaaaaaaaaaaaaaaaaaaaaaaaaaaaaaaaugcaucccccccccccccccccccccccccccccccaaaggcucuuuucagagccaccagaauu

SEQ ID NO: 1354 - RNA, 2064 nt, Artificial Sequence
  mRNA product Design b-5 comprising derived and/or modified sequence from HRSV(A2)__F-del_DSCav1 (opt6)
gggagacuccugucgggcggaaguaggaggaguagaguuuaaaaacaguacucuuuuuccgguucgggacguaguugaagcaacgacaagccggauaaccgcucuugagacaggaagcuuaccauggaacuauuaauauuaaaagcaaaugcuauuaccacaauacuuacugcuguaaccuucugcuuugccucuggccaaaacauaacagaagaauuuuaucaaucaacuugcuccgcuguaagcaaaggcuaccuaucagcauuacgcaccggcugguacacaucaguaauaacaauagaacuauccaacauaaaagaaaauaaaugcaacggaacagacgcaaaaguaaaauuaauaaaacaagaacucgacaaauacaaaaacgcaguaacagaauuacaacuacuaaugcaaaguacuccagccaccaacaacagagcaagaagagaauuaccacgauuuaugaacuacacacuaaacaaugcaaaaaaaacaaacguaacacuaucaaaaaaacguaaacgcagauucuuaggcuuccuccuagguguaggcucagcaaucgccucaggaguggcaguuuguaaaguacuacaccuagaaggagaaguaaacaaaaucaaaucugcccuuuuaucgacaaacaaagcaguaguaucguuauccaauggagucucaguauugacauucaaaguauuagaccuaaaaaauuauauagauaaacaacucuuaccuaucuuaaauaaacaaagcugcucaauaaguaacauagaaaccguaauagaauuucaacaaaaaaacaauagacuccuugagaucacucgagaauuuucaguaaacgcagguguaacaacaccaguaagcacauacaugcuaacaaauagugaacuauuaucucuaauuaacgauaugcccauaaccaacgaucaaaaaaaacucaugaguaacaacguacaaauaguaagacaacaauccuauagcauaaugugcauuauaaaagaagaaguacuagcauauguaguccaacuaccacuauacggcguaauagacacaccaugcuggaaacuacacaccucaccccuaugcacaacaaauacaaaagaaggaucaaacauaugcuuaaccaggacagacagaggcugguacugcgauaacgcaggaucuguuucauucuucccccaagcagaaacaugcaaaguacaaucaaacagaguauuuugugauaccaugaacucacucacauuaccauccgaagucaaccucugcaacguagacauauucaaccccaaauacgacugcaaaauaaugaccucaaaaacagauguaucaucaucaguaaucacaucacuaggagcuaucguaucuuguuauggaaaaacaaaaugcacagcauccaacaaaaacagaggaauuaucaaaacauucucaaauggaugugacuauguaucaaacaaaggaguagacaccguaagcguaggcaauacacuauauuacguaaauaaacaagaaggaaaaucacuauacguaaaaggugaaccaauaauaaacuucuaugacccccuaguauucccaucagaugaauuugacgcaagcauaucacaagucaacgaaaaaauaaaccaaucacuggcauucauucgcaaaucagaugaacuucuccacaacguaaacgcugguaaaagcacuacaaacauaaugauaacaacaaucaucauugucauaauaguuauucuauuaucacuaaucgcaguaggauuacuacuauacuguaaagcgagguaaggacuaguacuggcugcaucucccuuuccucuguccuccauccuucucccaggauggugaagggggaccugguacccagugauccccaccccaggauccuaaaucaugacuuaccugcuaauaaaaacucauuggaaaagugagaagaucuaaaaaaaaaaaaaaaaaaaaaaaaaaaaaaaaaaaaaaaaaaaaaaaaaaaaaaaaaaaaaaaaugcaucccccccccccccccccccccccccccccccaaaggcucuuuucagagccaccagaauu

SEQ ID NO: 1355 - RNA, 2064 nt, Artificial Sequence
  mRNA product Design b-5 comprising derived and/or modified sequence from HRSV(A2)__F-del_DSCav1 (opt11)
gggagacuccugucgggcggaaguaggaggaguagaguuuaaaaacaguacucuuuuuccgguucgggacguaguugaagcaacgacaagccggauaaccgcucuugagacaggaagcuuaccauggagcugcucauccugaaggccaacgccaucaccacaauccugacggcggugaccuucugcuucgccagcggccagaacaucaccgaggaguucuaccaguccacgugcagcgccgucuccaagggguaccucagcgcccugcgaaccggcugguacaccuccgugaucaccaucgagcugucaaacaucaaggagaacaagugcaacgggaccgaugccaagguuaagcucaucaagcaggagcuggacaaguacaagaacgcggucacggagcugcagcuccugaugcaguccacuccggcaaccaacaaccgcgccaggcgcgagcugccccgguucaugaacuacacccucaacaacgccaagaagacgaaugugacccugagcaagaagcgcaagcggcgcuuccugggcuuccuccuaggggugggcuccgccaucgcgagcggcgucgccgugugcaagguguugcaccucgagggggaggucaacaagaucaagagcgcccugcuguccaccaacaaggccgugguaagccucuccaacggcgucagcguucugaccuucaaggugcuggaccucaagaacuauaucgacaagcagcugcugcccauccugaacaagcagagcugcuccaucucaaacaucgaaacggugauugaguuccagcagaagaacaaccggcuccuggaaaucacccgcgaguucagcgugaacgccggggucaccacccccguguccacguacaugcugaccaacagcgagcuccuaucccugaucaacgacaugccgaucaccaacgaccagaagaagcucaugagcaacaacgugcagaucguccggcagcaguccuacagcaucaugugcaucaucaaggaagaggugcuggcguacgugguccagcugccccucuacggcgugaucgacacccccugcuggaagcugcacacgagcccccugugcacaaccaacaccaaggagggguccaacaucugccucacgcgcaccgaccggggcugguacugcgacaacgccggcagcgucuccuucuucccgcaggccgagaccugcaaggugcagagcaaccgcguguucugcgacaccaugaacucccugacgcugcccucugagguaaaccucugcaacgucgacaucuucaaccccaaguacgacugcaagaucaugaccuccaagacagacgugagcuccagcgugaucacaucccugggggccaucgucagcugcuacggcaagacuaaguguacugccagcaacaagaaccgggggaucaucaagaccuucuccaacggcugcgacuacgugagcaacaagggcguggacaccguguccgucgggaacacccuguacuacguuaauaagcaggagggcaagagccucuacgugaaaggggagcccaucauuaacuucuacgacccacugguuuuccccuccgacgaguucgacgcgagcaucucccaggugaacgagaagaucaaccagagccuggccuucauccgcaaguccgacgagcugcuccacaacgugaacgccggcaagagcacgaccaacaucaugaucaccaccaucaucaucgugaucaucgugauucugcugucccucaucgccguggggcugcugcuuuacugcaaggcccggugaggacuaguacuggcugcaucucccuuuccucuguccuccauccuucucccaggauggugaagggggaccugguacccagugauccccaccccaggauccuaaaucaugacuuaccugcuaauaaaaacucauuggaaaagugagaagaucuaaaaaaaaaaaaaaaaaaaaaaaaaaaaaaaaaaaaaaaaaaaaaaaaaaaaaaaaaaaaaaaaugcaucccccccccccccccccccccccccccccccaaaggcucuuuucagagccaccagaauu

SEQ ID NO: 1356 - RNA, 1970 nt, Artificial Sequence
  mRNA product Design c-1 comprising derived and/or modified sequence from HRSV(A2)__F-del_DSCav1 (opt1)
gggagaguccgcucagccagguugcagaagcggcuuagcguguguccuaaucuucucucugcguguagguaggccugugccgcaaacaagcuuaccauggagcugcucauccugaaggccaacgccaucaccaccauccugacggcggugaccuucugcuucgccagcggccagaacaucaccgaggaguucuaccaguccacgugcagcgccgucuccaagggguaccucagcgcccugcggaccggcugguacaccuccgugaucaccaucgagcugagcaacaucaaggagaacaagugcaacgggaccgacgccaaggugaagcucaucaagcaggagcuggacaaguacaagaacgcggucacggagcugcagcuccugaugcaguccaccccggcaaccaacaaccgcgcccggcgcgagcugccccgguucaugaacuacacccucaacaacgccaagaagacgaacgugacccugagcaagaagcgcaagcggcgcuuccugggcuuccuccugggggugggcuccgccaucgcgagcggcgucgccgugugcaaggugcugcaccucgagggggaggucaacaagaucaagagcgcccugcuguccaccaacaaggccguggugagccucuccaacggcgucagcgugcugaccuucaaggugcuggaccucaagaacuacaucgacaagcagcugcugcccauccugaacaagcagagcugcuccaucagcaacaucgagacggugaucgaguuccagcagaagaacaaccggcuccuggagaucacccgcgaguucagcgugaacgccggggucaccacccccguguccacguacaugcugaccaacagcgagcuccugucccugaucaacgacaugccgaucaccaacgaccagaagaagcucaugagcaacaacgugcagaucguccggcagcaguccuacagcaucaugugcaucaucaaggaggaggugcuggcguacgugguccagcugccccucuacggcgugaucgacacccccugcuggaagcugcacacgagcccccugugcaccaccaacaccaaggagggguccaacaucugccucacgcgcaccgaccggggcugguacugcgacaacgccggcagcgucuccuucuucccgcaggccgagaccugcaaggugcagagcaaccgcguguucugcgacaccaugaacucccugacgcugcccagcgagguaaaccucugcaacgucgacaucuucaaccccaaguacgacugcaagaucaugaccuccaagaccgacgugagcuccagcgugaucaccucccugggggccaucgucagcugcuacggcaagacgaagugcaccgccagcaacaagaaccgggggaucaucaagaccuucuccaacggcugcgacuacgugagcaacaagggcguggacaccguguccgucgggaacacccuguacuacgugaacaagcaggagggcaagagccucuacgugaagggggagcccaucaucaacuucuacgacccgcuggucuuccccuccgacgaguucgacgcgagcaucucccaggugaacgagaagaucaaccagagccuggccuucauccgcaaguccgacgagcugcuccacaacgugaacgccggcaagagcacgaccaacaucaugaucaccaccaucaucaucgucaucaucgugauccugcugucccucaucgccguggggcugcugcucuacugcaaggcccggugaggacuaguguccaccugucccuccugggcugcuggauugucucguuuuccugccaaauaaacaggaucagcgcuuuacagaucuaaaaaaaaaaaaaaaaaaaaaaaaaaaaaaaaaaaaaaaaaaaaaaaaaaaaaaaaaaaaaaaaugcaucccccccccccccccccccccccccccccccaaaggcucuuuucagagccaccagaauu

SEQ ID NO: 1357 - RNA, 1970 nt, Artificial Sequence
  mRNA product Design c-1 comprising derived and/or modified sequence from HRSV(A2)__F-del_DSCav1 (opt1)
gggagaguccgcucagccagguugcagaagcggcuuagcguguguccuaaucuucucucugcguguagguaggccugugccgcaaacaagcuuaccauggagcugcucauccugaaggccaacgccaucaccaccauccugacggcggugaccuucugcuucgccagcggccagaacaucaccgaggaguucuaccaguccacgugcagcgccgucuccaagggguaccucagcgcccugcgcaccggcugguacaccuccgugaucaccaucgagcugagcaacaucaaggagaacaagugcaacgggaccgacgccaaggugaagcucaucaagcaggagcuggacaaguacaagaacgcggucacggagcugcagcuccugaugcaguccacccccgccaccaacaaccgggcccgccgggagcugccgcgcuucaugaacuacacccucaacaacgccaagaagacgaacgugacccugagcaagaagcggaagcgccgguuccugggcuuccuccugggggugggcuccgcgaucgccagcggcgucgccgugugcaaggugcugcaccucgagggggaggucaacaagaucaaguccgcccugcugagcaccaacaaggccguggugucccucagcaacggcgucuccgugcugaccuucaaggugcuggaccucaagaacuacaucgacaagcagcugcugcccauccucaacaagcagagcugcuccaucagcaacaucgagacggucaucgaguuccagcagaagaacaaccgccugcuggagaucacccgggaguucuccgugaacgcgggggugaccacccccgucagcacguacaugcucaccaacagcgagcugcugucccucaucaacgacaugcccaucaccaacgaccagaagaagcugaugagcaacaacgugcagaucgugcgccagcaguccuacagcaucaugugcaucaucaaggaggagguccuggccuacguggugcagcucccgcuguacggcgucaucgacacccccugcuggaagcugcacacgagcccccucugcaccaccaacaccaaggaggggagcaacaucugccugacgcggaccgaccgcggcugguacugcgacaacgccggcuccgugagcuucuucccccaggccgagaccugcaagguccaguccaaccggguguucugcgacaccaugaacagccugacgcucccguccgaggugaaccugugcaacgucgacaucuucaaccccaaguacgacugcaagaucaugaccagcaagaccgacguguccagcuccgugaucaccagccugggggccaucgucuccugcuacggcaagacgaagugcaccgcgagcaacaagaaccgcgggaucaucaagaccuucuccaacggcugcgacuacgugagcaacaagggcguggacaccgucagcguggggaacacccucuacuacgugaacaagcaggagggcaagucccuguacgucaagggggagcccaucaucaacuucuacgacccccugguguucccgagcgacgaguucgacgccuccaucagccaggugaacgagaagaucaaccagucccucgccuucauccggaaguccgacgagcugcugcacaacgucaacgccggcaaguccacgaccaacaucaugaucaccaccaucaucaucgugaucaucgugauccugcucagccugaucgccgucgggcugcuccuguacugcaaggcgcgcugaggacuaguguccaccugucccuccugggcugcuggauugucucguuuuccugccaaauaaacaggaucagcgcuuuacagaucuaaaaaaaaaaaaaaaaaaaaaaaaaaaaaaaaaaaaaaaaaaaaaaaaaaaaaaaaaaaaaaaaugcaucccccccccccccccccccccccccccccccaaaggcucuuuucagagccaccagaauu

SEQ ID NO: 1358 - RNA, 1970 nt, Artificial Sequence
  mRNA product Design c-1 comprising derived and/or modified sequence from HRSV(A2)__F-del_DSCav1 (opt2)
gggagaguccgcucagccagguugcagaagcggcuuagcguguguccuaaucuucucucugcguguagguaggccugugccgcaaacaagcuuaccauggagcuccucauccucaaggccaacgccaucaccaccauccucaccgccgucaccuucugcuucgccuccggccagaacaucaccgaggaguucuaccaguccaccugcuccgccgucuccaagggcuaccucuccgcccuccgcaccggcugguacaccuccgucaucaccaucgagcucuccaacaucaaggagaacaagugcaacggcaccgacgccaaggucaagcucaucaagcaggagcucgacaaguacaagaacgccgucaccgagcuccagcuccucaugcaguccacccccgccaccaacaaccgcgcccgccgcgagcucccccgcuucaugaacuacacccucaacaacgccaagaagaccaacgucacccucuccaagaagcgcaagcgccgcuuccucggcuuccuccucggcgucggcuccgccaucgccuccggcgucgccgucugcaagguccuccaccucgagggcgaggucaacaagaucaaguccgcccuccucuccaccaacaaggccgucgucucccucuccaacggcgucuccguccucaccuucaagguccucgaccucaagaacuacaucgacaagcagcuccuccccauccucaacaagcaguccugcuccaucuccaacaucgagaccgucaucgaguuccagcagaagaacaaccgccuccucgagaucacccgcgaguucuccgucaacgccggcgucaccacccccgucuccaccuacaugcucaccaacuccgagcuccucucccucaucaacgacaugcccaucaccaacgaccagaagaagcucauguccaacaacguccagaucguccgccagcaguccuacuccaucaugugcaucaucaaggaggagguccucgccuacgucguccagcucccccucuacggcgucaucgacacccccugcuggaagcuccacaccuccccccucugcaccaccaacaccaaggagggcuccaacaucugccucacccgcaccgaccgcggcugguacugcgacaacgccggcuccgucuccuucuucccccaggccgagaccugcaagguccaguccaaccgcgucuucugcgacaccaugaacucccucacccuccccuccgaggucaaccucugcaacgucgacaucuucaaccccaaguacgacugcaagaucaugaccuccaagaccgacgucuccuccuccgucaucaccucccucggcgccaucgucuccugcuacggcaagaccaagugcaccgccuccaacaagaaccgcggcaucaucaagaccuucuccaacggcugcgacuacgucuccaacaagggcgucgacaccgucuccgucggcaacacccucuacuacgucaacaagcaggagggcaagucccucuacgucaagggcgagcccaucaucaacuucuacgacccccucgucuuccccuccgacgaguucgacgccuccaucucccaggucaacgagaagaucaaccagucccucgccuucauccgcaaguccgacgagcuccuccacaacgucaacgccggcaaguccaccaccaacaucaugaucaccaccaucaucaucgucaucaucgucauccuccucucccucaucgccgucggccuccuccucuacugcaaggcccgcugaggacuaguguccaccugucccuccugggcugcuggauugucucguuuuccugccaaauaaacaggaucagcgcuuuacagaucuaaaaaaaaaaaaaaaaaaaaaaaaaaaaaaaaaaaaaaaaaaaaaaaaaaaaaaaaaaaaaaaaugcaucccccccccccccccccccccccccccccccaaaggcucuuuucagagccaccagaauu

SEQ ID NO: 1359 - RNA, 1970 nt, Artificial Sequence
  mRNA product Design c-1 comprising derived and/or modified sequence from HRSV(A2)__F-del_DSCav1 (opt3)
gggagaguccgcucagccagguugcagaagcggcuuagcguguguccuaaucuucucucugcguguagguaggccugugccgcaaacaagcuuaccauggagcugcucauccuuaaggccaacgcuauuaccacaauacugacugcagugacguucugcuuugccagcggccagaauaucaccgaagaguucuaccaauccacauguucugcggucucaaaaggguauuugagugcuuuaagaacuggaugguacaccagcguuauuacaaucgaacuguccaacauuaaggagaauaaaugcaacgguaccgacgccaaggugaaacuaaucaagcaggaacucgauaaguauaaaaaugcaguaacugagcugcagcuucugaugcagucuacacccgccaccaacaauagggcucggcgcgaguugccucgauuuaugaacuacacgcucaauaacgcaaagaaaacuaaugugacccugucgaagaaacguaagagaagguuccugggcuuucucuuaggggucggaucagccauagcuagcggcguggccguuuguaaggugcugcaccuugaaggugaggucaacaaaaucaagagugcguugcuguccacaaauaaagcagugguaucucuaagcaacgggguuuccgugcucacuuucaagguccuggaccuuaaaaauuauauugauaagcaacuguugccaauccucaacaaacagucaugcaguauuagcaacaucgaaaccgugauagaguuucagcagaagaauaaccggcuguuagagauuacacgcgaguucucugugaaugccggagucaccacgccgguuuccacuuacaugcugacaaacucagaacuccuuagccugaucaaugacaugcccauuaccaacgaucaaaagaaauugaugaguaauaacgugcagaucguaagacagcagucuuauuccaucauguguauuauaaaggaagaggugcuagcuuacgucgugcaacugccucucuacggcguuaucgacacuccaugcuggaaacugcauacaagcccccuuuguaccacgaauaccaaggaaggcucgaacauuugccugacaaggacugaucgggggugguauugugacaaugccggaucuguguccuuuuucccucaggcagagaccugcaaaguccagucaaaccgcguguuuugugauacaaugaauaguuugacucucccaagcgagguaaaccugugcaauguugacaucuucaaccccaaguacgauugcaagauaaugaccuccaaaacagacgugucuagcucagucauuaccaguuuaggugcuaucguguccuguuauggcaagacuaaaugcacggccagcaacaagaaucgagggaucauuaaaacauuuucuaacggaugugauuacgucucaaauaagggcguggacaccguuaguguggguaacacucuguauuacguaaauaagcaagaagggaaaagccuauaugucaagggagagccuaucauuaacuucuacgacccacucguguucccguccgaugaauuugacgcgucuauaucgcagguuaaugagaaaaucaaccagagccuggccuucauuagaaaguccgaugaacuuuugcacaaugugaacgcaggcaaaucaaccacaaauaucaugaucaccacuauuauaaucgucauuaucgugauucugcucagucugaucgcuguaggccuucuguuguacugcaaggccaggugaggacuaguguccaccugucccuccugggcugcuggauugucucguuuuccugccaaauaaacaggaucagcgcuuuacagaucuaaaaaaaaaaaaaaaaaaaaaaaaaaaaaaaaaaaaaaaaaaaaaaaaaaaaaaaaaaaaaaaaugcaucccccccccccccccccccccccccccccccaaaggcucuuuucagagccaccagaauu

SEQ ID NO: 1360 - RNA, 1970 nt, Artificial Sequence
  mRNA product Design c-1 comprising derived and/or modified sequence from HRSV(A2)__F-del_DSCav1 (opt4)
gggagaguccgcucagccagguugcagaagcggcuuagcguguguccuaaucuucucucugcguguagguaggccugugccgcaaacaagcuuaccauggagcugcugauccugaaggccaacgccaucaccaccauccugaccgccgugaccuucugcuucgccagcggccagaacaucaccgaggaguucuaccagagcaccugcagcgccgugagcaagggcuaccugagcgcccugagaaccggcugguacaccagcgugaucaccaucgagcugagcaacaucaaggagaacaagugcaacggcaccgacgccaaggugaagcugaucaagcaggagcuggacaaguacaagaacgccgugaccgagcugcagcugcugaugcagagcacccccgccaccaacaacagagccagaagagagcugcccagauucaugaacuacacccugaacaacgccaagaagaccaacgugacccugagcaagaagagaaagagaagauuccugggcuuccugcugggcgugggcagcgccaucgccagcggcguggccgugugcaaggugcugcaccuggagggcgaggugaacaagaucaagagcgcccugcugagcaccaacaaggccguggugagccugagcaacggcgugagcgugcugaccuucaaggugcuggaccugaagaacuacaucgacaagcagcugcugcccauccugaacaagcagagcugcagcaucagcaacaucgagaccgugaucgaguuccagcagaagaacaacagacugcuggagaucaccagagaguucagcgugaacgccggcgugaccacccccgugagcaccuacaugcugaccaacagcgagcugcugagccugaucaacgacaugcccaucaccaacgaccagaagaagcugaugagcaacaacgugcagaucgugagacagcagagcuacagcaucaugugcaucaucaaggaggaggugcuggccuacguggugcagcugccccuguacggcgugaucgacacccccugcuggaagcugcacaccagcccccugugcaccaccaacaccaaggagggcagcaacaucugccugaccagaaccgacagaggcugguacugcgacaacgccggcagcgugagcuucuucccccaggccgagaccugcaaggugcagagcaacagaguguucugcgacaccaugaacagccugacccugcccagcgaggugaaccugugcaacguggacaucuucaaccccaaguacgacugcaagaucaugaccagcaagaccgacgugagcagcagcgugaucaccagccugggcgccaucgugagcugcuacggcaagaccaagugcaccgccagcaacaagaacagaggcaucaucaagaccuucagcaacggcugcgacuacgugagcaacaagggcguggacaccgugagcgugggcaacacccuguacuacgugaacaagcaggagggcaagagccuguacgugaagggcgagcccaucaucaacuucuacgacccccugguguuccccagcgacgaguucgacgccagcaucagccaggugaacgagaagaucaaccagagccuggccuucaucagaaagagcgacgagcugcugcacaacgugaacgccggcaagagcaccaccaacaucaugaucaccaccaucaucaucgugaucaucgugauccugcugagccugaucgccgugggccugcugcuguacugcaaggccagaugaggacuaguguccaccugucccuccugggcugcuggauugucucguuuuccugccaaauaaacaggaucagcgcuuuacagaucuaaaaaaaaaaaaaaaaaaaaaaaaaaaaaaaaaaaaaaaaaaaaaaaaaaaaaaaaaaaaaaaaugcaucccccccccccccccccccccccccccccccaaaggcucuuuucagagccaccagaauu

SEQ ID NO: 1361 - RNA, 1970 nt, Artificial Sequence
  mRNA product Design c-1 comprising derived and/or modified sequence from HRSV(A2)__F-del_DSCav1 (opt5)
gggagaguccgcucagccagguugcagaagcggcuuagcguguguccuaaucuucucucugcguguagguaggccugugccgcaaacaagcuuaccauggagcugcucauccugaaggccaacgcuauuaccacaauccuuacggccgugaccuucugcuuugcgagcggccagaauauuacagaagaguucuaccaauccaccuguucugcugucagcaaaggguaucuguccgcccucagaacaggaugguacaccucuguuaucacaauugaacugagcaacaucaaggagaauaaaugcaacggcaccgacgccaaggugaaacuuaucaagcaggaacuggauaaguauaaaaaugcugugacggagcuccagcugcugaugcaguccacccccgccacaaacaaucgggcucgcagagagcucccucgguuuaugaacuacacccugaauaacgccaagaaaacaaaugucacccuuucuaagaaacgcaagagacgguuccugggguuucuccugggagugggcagcgcgauugccuccgggguugcuguguguaagguccuucaccuggaaggagaggugaacaaaaucaagagcgcccuccugucuacgaauaaagcuguugugucccugagcaacggcgucucugugcucacauucaaggugcuggaccuuaaaaauuauauugauaagcaacugcucccgauccugaacaaacaguccugcagcauuucuaacaucgaaaccgucauugaguuucagcagaagaauaaccgccuucuggagaucacaagagaauuuuccguuaaugccggcgugaccacccccgugagcacauacaugcucacgaacuccgagcugcugucucucaucaaugacaugccuauuaccaacgaucaaaagaaacugaugagcaauaacguccagaucgugcggcagcaguccuauagcauuauguguaucauuaaggaagagguucuugcguacgugguccaacugccccucuacggggugaucgacacaccuugcuggaaacugcauaccucuccccuuuguacaaccaauacgaaggaaggauccaacaucugccugacacgcaccgauagaggcugguauugugacaaugccgggagcguuucuuucuucccucaggcugagaccugcaaagugcagagcaaccgggucuuuugugauacaaugaacucccucacccugccgucugaggugaaucugugcaaugucgacauuuucaaccccaaguacgauugcaagaucaugacaagcaaaacggacguguccagcucuguuauuaccucccucggagccaucgugagcuguuauggcaagacaaaaugcaccgcuucuaacaagaaucgcgggauuaucaaaacauuuuccaacggaugugauuacgucagcaauaagggcguggacaccguuuccgugggcaacacgcuguauuacgucaauaagcaagaagggaaaucucuuuaugugaagggagagccuaucauuaacuucuacgacccccugguguucccuagcgaugaauuugacgccuccaucucucagguuaaugagaaaauuaaccagagccucgccuucaucagaaaguccgaugaacugcugcacaaugucaacgcuggcaaaagcaccacaaauauuaugaucaccacaauuaucaucgugauuaucgugauucuucucucucugaucgcggucgggcugcuccuguacugcaaggcccggugaggacuaguguccaccugucccuccugggcugcuggauugucucguuuuccugccaaauaaacaggaucagcgcuuuacagaucuaaaaaaaaaaaaaaaaaaaaaaaaaaaaaaaaaaaaaaaaaaaaaaaaaaaaaaaaaaaaaaaaugcaucccccccccccccccccccccccccccccccaaaggcucuuuucagagccaccagaauu

SEQ ID NO: 1362 - RNA, 1970 nt, Artificial Sequence
  mRNA product Design c-1 comprising derived and/or modified sequence from HRSV(A2)__F-del_DSCav1 (opt6)
gggagaguccgcucagccagguugcagaagcggcuuagcguguguccuaaucuucucucugcguguagguaggccugugccgcaaacaagcuuaccauggaacuauuaauauuaaaagcaaaugcuauuaccacaauacuuacugcuguaaccuucugcuuugccucuggccaaaacauaacagaagaauuuuaucaaucaacuugcuccgcuguaagcaaaggcuaccuaucagcauuacgcaccggcugguacacaucaguaauaacaauagaacuauccaacauaaaagaaaauaaaugcaacggaacagacgcaaaaguaaaauuaauaaaacaagaacucgacaaauacaaaaacgcaguaacagaauuacaacuacuaaugcaaaguacuccagccaccaacaacagagcaagaagagaauuaccacgauuuaugaacuacacacuaaacaaugcaaaaaaaacaaacguaacacuaucaaaaaaacguaaacgcagauucuuaggcuuccuccuagguguaggcucagcaaucgccucaggaguggcaguuuguaaaguacuacaccuagaaggagaaguaaacaaaaucaaaucugcccuuuuaucgacaaacaaagcaguaguaucguuauccaauggagucucaguauugacauucaaaguauuagaccuaaaaaauuauauagauaaacaacucuuaccuaucuuaaauaaacaaagcugcucaauaaguaacauagaaaccguaauagaauuucaacaaaaaaacaauagacuccuugagaucacucgagaauuuucaguaaacgcagguguaacaacaccaguaagcacauacaugcuaacaaauagugaacuauuaucucuaauuaacgauaugcccauaaccaacgaucaaaaaaaacucaugaguaacaacguacaaauaguaagacaacaauccuauagcauaaugugcauuauaaaagaagaaguacuagcauauguaguccaacuaccacuauacggcguaauagacacaccaugcuggaaacuacacaccucaccccuaugcacaacaaauacaaaagaaggaucaaacauaugcuuaaccaggacagacagaggcugguacugcgauaacgcaggaucuguuucauucuucccccaagcagaaacaugcaaaguacaaucaaacagaguauuuugugauaccaugaacucacucacauuaccauccgaagucaaccucugcaacguagacauauucaaccccaaauacgacugcaaaauaaugaccucaaaaacagauguaucaucaucaguaaucacaucacuaggagcuaucguaucuuguuauggaaaaacaaaaugcacagcauccaacaaaaacagaggaauuaucaaaacauucucaaauggaugugacuauguaucaaacaaaggaguagacaccguaagcguaggcaauacacuauauuacguaaauaaacaagaaggaaaaucacuauacguaaaaggugaaccaauaauaaacuucuaugacccccuaguauucccaucagaugaauuugacgcaagcauaucacaagucaacgaaaaaauaaaccaaucacuggcauucauucgcaaaucagaugaacuucuccacaacguaaacgcugguaaaagcacuacaaacauaaugauaacaacaaucaucauugucauaauaguuauucuauuaucacuaaucgcaguaggauuacuacuauacuguaaagcgagguaaggacuaguguccaccugucccuccugggcugcuggauugucucguuuuccugccaaauaaacaggaucagcgcuuuacagaucuaaaaaaaaaaaaaaaaaaaaaaaaaaaaaaaaaaaaaaaaaaaaaaaaaaaaaaaaaaaaaaaaugcaucccccccccccccccccccccccccccccccaaaggcucuuuucagagccaccagaauu

SEQ ID NO: 1363 - RNA, 1970 nt, Artificial Sequence
  mRNA product Design c-1 comprising derived and/or modified sequence from HRSV(A2)__F-del_DSCav1 (opt11)
gggagaguccgcucagccagguugcagaagcggcuuagcguguguccuaaucuucucucugcguguagguaggccugugccgcaaacaagcuuaccauggagcugcucauccugaaggccaacgccaucaccacaauccugacggcggugaccuucugcuucgccagcggccagaacaucaccgaggaguucuaccaguccacgugcagcgccgucuccaagggguaccucagcgcccugcgaaccggcugguacaccuccgugaucaccaucgagcugucaaacaucaaggagaacaagugcaacgggaccgaugccaagguuaagcucaucaagcaggagcuggacaaguacaagaacgcggucacggagcugcagcuccugaugcaguccacuccggcaaccaacaaccgcgccaggcgcgagcugccccgguucaugaacuacacccucaacaacgccaagaagacgaaugugacccugagcaagaagcgcaagcggcgcuuccugggcuuccuccuaggggugggcuccgccaucgcgagcggcgucgccgugugcaagguguugcaccucgagggggaggucaacaagaucaagagcgcccugcuguccaccaacaaggccgugguaagccucuccaacggcgucagcguucugaccuucaaggugcuggaccucaagaacuauaucgacaagcagcugcugcccauccugaacaagcagagcugcuccaucucaaacaucgaaacggugauugaguuccagcagaagaacaaccggcuccuggaaaucacccgcgaguucagcgugaacgccggggucaccacccccguguccacguacaugcugaccaacagcgagcuccuaucccugaucaacgacaugccgaucaccaacgaccagaagaagcucaugagcaacaacgugcagaucguccggcagcaguccuacagcaucaugugcaucaucaaggaagaggugcuggcguacgugguccagcugccccucuacggcgugaucgacacccccugcuggaagcugcacacgagcccccugugcacaaccaacaccaaggagggguccaacaucugccucacgcgcaccgaccggggcugguacugcgacaacgccggcagcgucuccuucuucccgcaggccgagaccugcaaggugcagagcaaccgcguguucugcgacaccaugaacucccugacgcugcccucugagguaaaccucugcaacgucgacaucuucaaccccaaguacgacugcaagaucaugaccuccaagacagacgugagcuccagcgugaucacaucccugggggccaucgucagcugcuacggcaagacuaaguguacugccagcaacaagaaccgggggaucaucaagaccuucuccaacggcugcgacuacgugagcaacaagggcguggacaccguguccgucgggaacacccuguacuacguuaauaagcaggagggcaagagccucuacgugaaaggggagcccaucauuaacuucuacgacccacugguuuuccccuccgacgaguucgacgcgagcaucucccaggugaacgagaagaucaaccagagccuggccuucauccgcaaguccgacgagcugcuccacaacgugaacgccggcaagagcacgaccaacaucaugaucaccaccaucaucaucgugaucaucgugauucugcugucccucaucgccguggggcugcugcuuuacugcaaggcccggugaggacuaguguccaccugucccuccugggcugcuggauugucucguuuuccugccaaauaaacaggaucagcgcuuuacagaucuaaaaaaaaaaaaaaaaaaaaaaaaaaaaaaaaaaaaaaaaaaaaaaaaaaaaaaaaaaaaaaaaugcaucccccccccccccccccccccccccccccccaaaggcucuuuucagagccaccagaauu

SEQ ID NO: 1364 - RNA, 2060 nt, Artificial Sequence
  mRNA product Design c-2 comprising derived and/or modified sequence from HRSV(A2)__F-del_DSCav1 (opt1)
gggagacuccugucgggcggaaguaggaggaguagaguuuaaaaacaguacucuuuuuccgguucgggacguaguugaagcaacgacaagccggauaaccgcucuugagacaggaagcuuaccauggagcugcucauccugaaggccaacgccaucaccaccauccugacggcggugaccuucugcuucgccagcggccagaacaucaccgaggaguucuaccaguccacgugcagcgccgucuccaagggguaccucagcgcccugcggaccggcugguacaccuccgugaucaccaucgagcugagcaacaucaaggagaacaagugcaacgggaccgacgccaaggugaagcucaucaagcaggagcuggacaaguacaagaacgcggucacggagcugcagcuccugaugcaguccaccccggcaaccaacaaccgcgcccggcgcgagcugccccgguucaugaacuacacccucaacaacgccaagaagacgaacgugacccugagcaagaagcgcaagcggcgcuuccugggcuuccuccugggggugggcuccgccaucgcgagcggcgucgccgugugcaaggugcugcaccucgagggggaggucaacaagaucaagagcgcccugcuguccaccaacaaggccguggugagccucuccaacggcgucagcgugcugaccuucaaggugcuggaccucaagaacuacaucgacaagcagcugcugcccauccugaacaagcagagcugcuccaucagcaacaucgagacggugaucgaguuccagcagaagaacaaccggcuccuggagaucacccgcgaguucagcgugaacgccggggucaccacccccguguccacguacaugcugaccaacagcgagcuccugucccugaucaacgacaugccgaucaccaacgaccagaagaagcucaugagcaacaacgugcagaucguccggcagcaguccuacagcaucaugugcaucaucaaggaggaggugcuggcguacgugguccagcugccccucuacggcgugaucgacacccccugcuggaagcugcacacgagcccccugugcaccaccaacaccaaggagggguccaacaucugccucacgcgcaccgaccggggcugguacugcgacaacgccggcagcgucuccuucuucccgcaggccgagaccugcaaggugcagagcaaccgcguguucugcgacaccaugaacucccugacgcugcccagcgagguaaaccucugcaacgucgacaucuucaaccccaaguacgacugcaagaucaugaccuccaagaccgacgugagcuccagcgugaucaccucccugggggccaucgucagcugcuacggcaagacgaagugcaccgccagcaacaagaaccgggggaucaucaagaccuucuccaacggcugcgacuacgugagcaacaagggcguggacaccguguccgucgggaacacccuguacuacgugaacaagcaggagggcaagagccucuacgugaagggggagcccaucaucaacuucuacgacccgcuggucuuccccuccgacgaguucgacgcgagcaucucccaggugaacgagaagaucaaccagagccuggccuucauccgcaaguccgacgagcugcuccacaacgugaacgccggcaagagcacgaccaacaucaugaucaccaccaucaucaucgucaucaucgugauccugcugucccucaucgccguggggcugcugcucuacugcaaggcccggugaggacuaguggaagcauuuuccuggcugauuaaaagaaauuacucagcuauggucaucuguuccuguuagaaggcuaugcagcauauuauauacuaugcgcauguuaugaaaugcauaauaaaaaauuuuaaaaaaucuaaaagaucuaaaaaaaaaaaaaaaaaaaaaaaaaaaaaaaaaaaaaaaaaaaaaaaaaaaaaaaaaaaaaaaaugcaucccccccccccccccccccccccccccccccaaaggcucuuuucagagccaccagaauu

SEQ ID NO: 1365 - RNA, 2060 nt, Artificial Sequence
  mRNA product Design c-2 comprising derived and/or modified sequence from HRSV(A2)__F-del_DSCav1 (opt1)
gggagacuccugucgggcggaaguaggaggaguagaguuuaaaaacaguacucuuuuuccgguucgggacguaguugaagcaacgacaagccggauaaccgcucuugagacaggaagcuuaccauggagcugcucauccugaaggccaacgccaucaccaccauccugacggcggugaccuucugcuucgccagcggccagaacaucaccgaggaguucuaccaguccacgugcagcgccgucuccaagggguaccucagcgcccugcgcaccggcugguacaccuccgugaucaccaucgagcugagcaacaucaaggagaacaagugcaacgggaccgacgccaaggugaagcucaucaagcaggagcuggacaaguacaagaacgcggucacggagcugcagcuccugaugcaguccacccccgccaccaacaaccgggcccgccgggagcugccgcgcuucaugaacuacacccucaacaacgccaagaagacgaacgugacccugagcaagaagcggaagcgccgguuccugggcuuccuccugggggugggcuccgcgaucgccagcggcgucgccgugugcaaggugcugcaccucgagggggaggucaacaagaucaaguccgcccugcugagcaccaacaaggccguggugucccucagcaacggcgucuccgugcugaccuucaaggugcuggaccucaagaacuacaucgacaagcagcugcugcccauccucaacaagcagagcugcuccaucagcaacaucgagacggucaucgaguuccagcagaagaacaaccgccugcuggagaucacccgggaguucuccgugaacgcgggggugaccacccccgucagcacguacaugcucaccaacagcgagcugcugucccucaucaacgacaugcccaucaccaacgaccagaagaagcugaugagcaacaacgugcagaucgugcgccagcaguccuacagcaucaugugcaucaucaaggaggagguccuggccuacguggugcagcucccgcuguacggcgucaucgacacccccugcuggaagcugcacacgagcccccucugcaccaccaacaccaaggaggggagcaacaucugccugacgcggaccgaccgcggcugguacugcgacaacgccggcuccgugagcuucuucccccaggccgagaccugcaagguccaguccaaccggguguucugcgacaccaugaacagccugacgcucccguccgaggugaaccugugcaacgucgacaucuucaaccccaaguacgacugcaagaucaugaccagcaagaccgacguguccagcuccgugaucaccagccugggggccaucgucuccugcuacggcaagacgaagugcaccgcgagcaacaagaaccgcgggaucaucaagaccuucuccaacggcugcgacuacgugagcaacaagggcguggacaccgucagcguggggaacacccucuacuacgugaacaagcaggagggcaagucccuguacgucaagggggagcccaucaucaacuucuacgacccccugguguucccgagcgacgaguucgacgccuccaucagccaggugaacgagaagaucaaccagucccucgccuucauccggaaguccgacgagcugcugcacaacgucaacgccggcaaguccacgaccaacaucaugaucaccaccaucaucaucgugaucaucgugauccugcucagccugaucgccgucgggcugcuccuguacugcaaggcgcgcugaggacuaguggaagcauuuuccuggcugauuaaaagaaauuacucagcuauggucaucuguuccuguuagaaggcuaugcagcauauuauauacuaugcgcauguuaugaaaugcauaauaaaaaauuuuaaaaaaucuaaaagaucuaaaaaaaaaaaaaaaaaaaaaaaaaaaaaaaaaaaaaaaaaaaaaaaaaaaaaaaaaaaaaaaaugcaucccccccccccccccccccccccccccccccaaaggcucuuuucagagccaccagaauu

SEQ ID NO: 1366 - RNA, 2060 nt, Artificial Sequence
  mRNA product Design c-2 comprising derived and/or modified sequence from HRSV(A2)__F-del_DSCav1 (opt2)
gggagacuccugucgggcggaaguaggaggaguagaguuuaaaaacaguacucuuuuuccgguucgggacguaguugaagcaacgacaagccggauaaccgcucuugagacaggaagcuuaccauggagcuccucauccucaaggccaacgccaucaccaccauccucaccgccgucaccuucugcuucgccuccggccagaacaucaccgaggaguucuaccaguccaccugcuccgccgucuccaagggcuaccucuccgcccuccgcaccggcugguacaccuccgucaucaccaucgagcucuccaacaucaaggagaacaagugcaacggcaccgacgccaaggucaagcucaucaagcaggagcucgacaaguacaagaacgccgucaccgagcuccagcuccucaugcaguccacccccgccaccaacaaccgcgcccgccgcgagcucccccgcuucaugaacuacacccucaacaacgccaagaagaccaacgucacccucuccaagaagcgcaagcgccgcuuccucggcuuccuccucggcgucggcuccgccaucgccuccggcgucgccgucugcaagguccuccaccucgagggcgaggucaacaagaucaaguccgcccuccucuccaccaacaaggccgucgucucccucuccaacggcgucuccguccucaccuucaagguccucgaccucaagaacuacaucgacaagcagcuccuccccauccucaacaagcaguccugcuccaucuccaacaucgagaccgucaucgaguuccagcagaagaacaaccgccuccucgagaucacccgcgaguucuccgucaacgccggcgucaccacccccgucuccaccuacaugcucaccaacuccgagcuccucucccucaucaacgacaugcccaucaccaacgaccagaagaagcucauguccaacaacguccagaucguccgccagcaguccuacuccaucaugugcaucaucaaggaggagguccucgccuacgucguccagcucccccucuacggcgucaucgacacccccugcuggaagcuccacaccuccccccucugcaccaccaacaccaaggagggcuccaacaucugccucacccgcaccgaccgcggcugguacugcgacaacgccggcuccgucuccuucuucccccaggccgagaccugcaagguccaguccaaccgcgucuucugcgacaccaugaacucccucacccuccccuccgaggucaaccucugcaacgucgacaucuucaaccccaaguacgacugcaagaucaugaccuccaagaccgacgucuccuccuccgucaucaccucccucggcgccaucgucuccugcuacggcaagaccaagugcaccgccuccaacaagaaccgcggcaucaucaagaccuucuccaacggcugcgacuacgucuccaacaagggcgucgacaccgucuccgucggcaacacccucuacuacgucaacaagcaggagggcaagucccucuacgucaagggcgagcccaucaucaacuucuacgacccccucgucuuccccuccgacgaguucgacgccuccaucucccaggucaacgagaagaucaaccagucccucgccuucauccgcaaguccgacgagcuccuccacaacgucaacgccggcaaguccaccaccaacaucaugaucaccaccaucaucaucgucaucaucgucauccuccucucccucaucgccgucggccuccuccucuacugcaaggcccgcugaggacuaguggaagcauuuuccuggcugauuaaaagaaauuacucagcuauggucaucuguuccuguuagaaggcuaugcagcauauuauauacuaugcgcauguuaugaaaugcauaauaaaaaauuuuaaaaaaucuaaaagaucuaaaaaaaaaaaaaaaaaaaaaaaaaaaaaaaaaaaaaaaaaaaaaaaaaaaaaaaaaaaaaaaaugcaucccccccccccccccccccccccccccccccaaaggcucuuuucagagccaccagaauu

SEQ ID NO: 1367 - RNA, 2060 nt, Artificial Sequence
  mRNA product Design c-2 comprising derived and/or modified sequence from HRSV(A2)__F-del_DSCav1 (opt3)
gggagacuccugucgggcggaaguaggaggaguagaguuuaaaaacaguacucuuuuuccgguucgggacguaguugaagcaacgacaagccggauaaccgcucuugagacaggaagcuuaccauggagcugcucauccuuaaggccaacgcuauuaccacaauacugacugcagugacguucugcuuugccagcggccagaauaucaccgaagaguucuaccaauccacauguucugcggucucaaaaggguauuugagugcuuuaagaacuggaugguacaccagcguuauuacaaucgaacuguccaacauuaaggagaauaaaugcaacgguaccgacgccaaggugaaacuaaucaagcaggaacucgauaaguauaaaaaugcaguaacugagcugcagcuucugaugcagucuacacccgccaccaacaauagggcucggcgcgaguugccucgauuuaugaacuacacgcucaauaacgcaaagaaaacuaaugugacccugucgaagaaacguaagagaagguuccugggcuuucucuuaggggucggaucagccauagcuagcggcguggccguuuguaaggugcugcaccuugaaggugaggucaacaaaaucaagagugcguugcuguccacaaauaaagcagugguaucucuaagcaacgggguuuccgugcucacuuucaagguccuggaccuuaaaaauuauauugauaagcaacuguugccaauccucaacaaacagucaugcaguauuagcaacaucgaaaccgugauagaguuucagcagaagaauaaccggcuguuagagauuacacgcgaguucucugugaaugccggagucaccacgccgguuuccacuuacaugcugacaaacucagaacuccuuagccugaucaaugacaugcccauuaccaacgaucaaaagaaauugaugaguaauaacgugcagaucguaagacagcagucuuauuccaucauguguauuauaaaggaagaggugcuagcuuacgucgugcaacugccucucuacggcguuaucgacacuccaugcuggaaacugcauacaagcccccuuuguaccacgaauaccaaggaaggcucgaacauuugccugacaaggacugaucgggggugguauugugacaaugccggaucuguguccuuuuucccucaggcagagaccugcaaaguccagucaaaccgcguguuuugugauacaaugaauaguuugacucucccaagcgagguaaaccugugcaauguugacaucuucaaccccaaguacgauugcaagauaaugaccuccaaaacagacgugucuagcucagucauuaccaguuuaggugcuaucguguccuguuauggcaagacuaaaugcacggccagcaacaagaaucgagggaucauuaaaacauuuucuaacggaugugauuacgucucaaauaagggcguggacaccguuaguguggguaacacucuguauuacguaaauaagcaagaagggaaaagccuauaugucaagggagagccuaucauuaacuucuacgacccacucguguucccguccgaugaauuugacgcgucuauaucgcagguuaaugagaaaaucaaccagagccuggccuucauuagaaaguccgaugaacuuuugcacaaugugaacgcaggcaaaucaaccacaaauaucaugaucaccacuauuauaaucgucauuaucgugauucugcucagucugaucgcuguaggccuucuguuguacugcaaggccaggugaggacuaguggaagcauuuuccuggcugauuaaaagaaauuacucagcuauggucaucuguuccuguuagaaggcuaugcagcauauuauauacuaugcgcauguuaugaaaugcauaauaaaaaauuuuaaaaaaucuaaaagaucuaaaaaaaaaaaaaaaaaaaaaaaaaaaaaaaaaaaaaaaaaaaaaaaaaaaaaaaaaaaaaaaaugcaucccccccccccccccccccccccccccccccaaaggcucuuuucagagccaccagaauu

SEQ ID NO: 1368 - RNA, 2060 nt, Artificial Sequence
  mRNA product Design c-2 comprising derived and/or modified sequence from HRSV(A2)__F-del_DSCav1 (opt4)
gggagacuccugucgggcggaaguaggaggaguagaguuuaaaaacaguacucuuuuuccgguucgggacguaguugaagcaacgacaagccggauaaccgcucuugagacaggaagcuuaccauggagcugcugauccugaaggccaacgccaucaccaccauccugaccgccgugaccuucugcuucgccagcggccagaacaucaccgaggaguucuaccagagcaccugcagcgccgugagcaagggcuaccugagcgcccugagaaccggcugguacaccagcgugaucaccaucgagcugagcaacaucaaggagaacaagugcaacggcaccgacgccaaggugaagcugaucaagcaggagcuggacaaguacaagaacgccgugaccgagcugcagcugcugaugcagagcacccccgccaccaacaacagagccagaagagagcugcccagauucaugaacuacacccugaacaacgccaagaagaccaacgugacccugagcaagaagagaaagagaagauuccugggcuuccugcugggcgugggcagcgccaucgccagcggcguggccgugugcaaggugcugcaccuggagggcgaggugaacaagaucaagagcgcccugcugagcaccaacaaggccguggugagccugagcaacggcgugagcgugcugaccuucaaggugcuggaccugaagaacuacaucgacaagcagcugcugcccauccugaacaagcagagcugcagcaucagcaacaucgagaccgugaucgaguuccagcagaagaacaacagacugcuggagaucaccagagaguucagcgugaacgccggcgugaccacccccgugagcaccuacaugcugaccaacagcgagcugcugagccugaucaacgacaugcccaucaccaacgaccagaagaagcugaugagcaacaacgugcagaucgugagacagcagagcuacagcaucaugugcaucaucaaggaggaggugcuggccuacguggugcagcugccccuguacggcgugaucgacacccccugcuggaagcugcacaccagcccccugugcaccaccaacaccaaggagggcagcaacaucugccugaccagaaccgacagaggcugguacugcgacaacgccggcagcgugagcuucuucccccaggccgagaccugcaaggugcagagcaacagaguguucugcgacaccaugaacagccugacccugcccagcgaggugaaccugugcaacguggacaucuucaaccccaaguacgacugcaagaucaugaccagcaagaccgacgugagcagcagcgugaucaccagccugggcgccaucgugagcugcuacggcaagaccaagugcaccgccagcaacaagaacagaggcaucaucaagaccuucagcaacggcugcgacuacgugagcaacaagggcguggacaccgugagcgugggcaacacccuguacuacgugaacaagcaggagggcaagagccuguacgugaagggcgagcccaucaucaacuucuacgacccccugguguuccccagcgacgaguucgacgccagcaucagccaggugaacgagaagaucaaccagagccuggccuucaucagaaagagcgacgagcugcugcacaacgugaacgccggcaagagcaccaccaacaucaugaucaccaccaucaucaucgugaucaucgugauccugcugagccugaucgccgugggccugcugcuguacugcaaggccagaugaggacuaguggaagcauuuuccuggcugauuaaaagaaauuacucagcuauggucaucuguuccuguuagaaggcuaugcagcauauuauauacuaugcgcauguuaugaaaugcauaauaaaaaauuuuaaaaaaucuaaaagaucuaaaaaaaaaaaaaaaaaaaaaaaaaaaaaaaaaaaaaaaaaaaaaaaaaaaaaaaaaaaaaaaaugcaucccccccccccccccccccccccccccccccaaaggcucuuuucagagccaccagaauu

SEQ ID NO: 1369 - RNA, 2060 nt, Artificial Sequence
  mRNA product Design c-2 comprising derived and/or modified sequence from HRSV(A2)__F-del_DSCav1 (opt5)
gggagacuccugucgggcggaaguaggaggaguagaguuuaaaaacaguacucuuuuuccgguucgggacguaguugaagcaacgacaagccggauaaccgcucuugagacaggaagcuuaccauggagcugcucauccugaaggccaacgcuauuaccacaauccuuacggccgugaccuucugcuuugcgagcggccagaauauuacagaagaguucuaccaauccaccuguucugcugucagcaaaggguaucuguccgcccucagaacaggaugguacaccucuguuaucacaauugaacugagcaacaucaaggagaauaaaugcaacggcaccgacgccaaggugaaacuuaucaagcaggaacuggauaaguauaaaaaugcugugacggagcuccagcugcugaugcaguccacccccgccacaaacaaucgggcucgcagagagcucccucgguuuaugaacuacacccugaauaacgccaagaaaacaaaugucacccuuucuaagaaacgcaagagacgguuccugggguuucuccugggagugggcagcgcgauugccuccgggguugcuguguguaagguccuucaccuggaaggagaggugaacaaaaucaagagcgcccuccugucuacgaauaaagcuguugugucccugagcaacggcgucucugugcucacauucaaggugcuggaccuuaaaaauuauauugauaagcaacugcucccgauccugaacaaacaguccugcagcauuucuaacaucgaaaccgucauugaguuucagcagaagaauaaccgccuucuggagaucacaagagaauuuuccguuaaugccggcgugaccacccccgugagcacauacaugcucacgaacuccgagcugcugucucucaucaaugacaugccuauuaccaacgaucaaaagaaacugaugagcaauaacguccagaucgugcggcagcaguccuauagcauuauguguaucauuaaggaagagguucuugcguacgugguccaacugccccucuacggggugaucgacacaccuugcuggaaacugcauaccucuccccuuuguacaaccaauacgaaggaaggauccaacaucugccugacacgcaccgauagaggcugguauugugacaaugccgggagcguuucuuucuucccucaggcugagaccugcaaagugcagagcaaccgggucuuuugugauacaaugaacucccucacccugccgucugaggugaaucugugcaaugucgacauuuucaaccccaaguacgauugcaagaucaugacaagcaaaacggacguguccagcucuguuauuaccucccucggagccaucgugagcuguuauggcaagacaaaaugcaccgcuucuaacaagaaucgcgggauuaucaaaacauuuuccaacggaugugauuacgucagcaauaagggcguggacaccguuuccgugggcaacacgcuguauuacgucaauaagcaagaagggaaaucucuuuaugugaagggagagccuaucauuaacuucuacgacccccugguguucccuagcgaugaauuugacgccuccaucucucagguuaaugagaaaauuaaccagagccucgccuucaucagaaaguccgaugaacugcugcacaaugucaacgcuggcaaaagcaccacaaauauuaugaucaccacaauuaucaucgugauuaucgugauucuucucucucugaucgcggucgggcugcuccuguacugcaaggcccggugaggacuaguggaagcauuuuccuggcugauuaaaagaaauuacucagcuauggucaucuguuccuguuagaaggcuaugcagcauauuauauacuaugcgcauguuaugaaaugcauaauaaaaaauuuuaaaaaaucuaaaagaucuaaaaaaaaaaaaaaaaaaaaaaaaaaaaaaaaaaaaaaaaaaaaaaaaaaaaaaaaaaaaaaaaugcaucccccccccccccccccccccccccccccccaaaggcucuuuucagagccaccagaauu

SEQ ID NO: 1370 - RNA, 2060 nt, Artificial Sequence
  mRNA product Design c-2 comprising derived and/or modified sequence from HRSV(A2)__F-del_DSCav1 (opt6)
gggagacuccugucgggcggaaguaggaggaguagaguuuaaaaacaguacucuuuuuccgguucgggacguaguugaagcaacgacaagccggauaaccgcucuugagacaggaagcuuaccauggaacuauuaauauuaaaagcaaaugcuauuaccacaauacuuacugcuguaaccuucugcuuugccucuggccaaaacauaacagaagaauuuuaucaaucaacuugcuccgcuguaagcaaaggcuaccuaucagcauuacgcaccggcugguacacaucaguaauaacaauagaacuauccaacauaaaagaaaauaaaugcaacggaacagacgcaaaaguaaaauuaauaaaacaagaacucgacaaauacaaaaacgcaguaacagaauuacaacuacuaaugcaaaguacuccagccaccaacaacagagcaagaagagaauuaccacgauuuaugaacuacacacuaaacaaugcaaaaaaaacaaacguaacacuaucaaaaaaacguaaacgcagauucuuaggcuuccuccuagguguaggcucagcaaucgccucaggaguggcaguuuguaaaguacuacaccuagaaggagaaguaaacaaaaucaaaucugcccuuuuaucgacaaacaaagcaguaguaucguuauccaauggagucucaguauugacauucaaaguauuagaccuaaaaaauuauauagauaaacaacucuuaccuaucuuaaauaaacaaagcugcucaauaaguaacauagaaaccguaauagaauuucaacaaaaaaacaauagacuccuugagaucacucgagaauuuucaguaaacgcagguguaacaacaccaguaagcacauacaugcuaacaaauagugaacuauuaucucuaauuaacgauaugcccauaaccaacgaucaaaaaaaacucaugaguaacaacguacaaauaguaagacaacaauccuauagcauaaugugcauuauaaaagaagaaguacuagcauauguaguccaacuaccacuauacggcguaauagacacaccaugcuggaaacuacacaccucaccccuaugcacaacaaauacaaaagaaggaucaaacauaugcuuaaccaggacagacagaggcugguacugcgauaacgcaggaucuguuucauucuucccccaagcagaaacaugcaaaguacaaucaaacagaguauuuugugauaccaugaacucacucacauuaccauccgaagucaaccucugcaacguagacauauucaaccccaaauacgacugcaaaauaaugaccucaaaaacagauguaucaucaucaguaaucacaucacuaggagcuaucguaucuuguuauggaaaaacaaaaugcacagcauccaacaaaaacagaggaauuaucaaaacauucucaaauggaugugacuauguaucaaacaaaggaguagacaccguaagcguaggcaauacacuauauuacguaaauaaacaagaaggaaaaucacuauacguaaaaggugaaccaauaauaaacuucuaugacccccuaguauucccaucagaugaauuugacgcaagcauaucacaagucaacgaaaaaauaaaccaaucacuggcauucauucgcaaaucagaugaacuucuccacaacguaaacgcugguaaaagcacuacaaacauaaugauaacaacaaucaucauugucauaauaguuauucuauuaucacuaaucgcaguaggauuacuacuauacuguaaagcgagguaaggacuaguggaagcauuuuccuggcugauuaaaagaaauuacucagcuauggucaucuguuccuguuagaaggcuaugcagcauauuauauacuaugcgcauguuaugaaaugcauaauaaaaaauuuuaaaaaaucuaaaagaucuaaaaaaaaaaaaaaaaaaaaaaaaaaaaaaaaaaaaaaaaaaaaaaaaaaaaaaaaaaaaaaaaugcaucccccccccccccccccccccccccccccccaaaggcucuuuucagagccaccagaauu

SEQ ID NO: 1371 - RNA, 2060 nt, Artificial Sequence
  mRNA product Design c-2 comprising derived and/or modified sequence from HRSV(A2)__F-del_DSCav1 (opt11)
gggagacuccugucgggcggaaguaggaggaguagaguuuaaaaacaguacucuuuuuccgguucgggacguaguugaagcaacgacaagccggauaaccgcucuugagacaggaagcuuaccauggagcugcucauccugaaggccaacgccaucaccacaauccugacggcggugaccuucugcuucgccagcggccagaacaucaccgaggaguucuaccaguccacgugcagcgccgucuccaagggguaccucagcgcccugcgaaccggcugguacaccuccgugaucaccaucgagcugucaaacaucaaggagaacaagugcaacgggaccgaugccaagguuaagcucaucaagcaggagcuggacaaguacaagaacgcggucacggagcugcagcuccugaugcaguccacuccggcaaccaacaaccgcgccaggcgcgagcugccccgguucaugaacuacacccucaacaacgccaagaagacgaaugugacccugagcaagaagcgcaagcggcgcuuccugggcuuccuccuaggggugggcuccgccaucgcgagcggcgucgccgugugcaagguguugcaccucgagggggaggucaacaagaucaagagcgcccugcuguccaccaacaaggccgugguaagccucuccaacggcgucagcguucugaccuucaaggugcuggaccucaagaacuauaucgacaagcagcugcugcccauccugaacaagcagagcugcuccaucucaaacaucgaaacggugauugaguuccagcagaagaacaaccggcuccuggaaaucacccgcgaguucagcgugaacgccggggucaccacccccguguccacguacaugcugaccaacagcgagcuccuaucccugaucaacgacaugccgaucaccaacgaccagaagaagcucaugagcaacaacgugcagaucguccggcagcaguccuacagcaucaugugcaucaucaaggaagaggugcuggcguacgugguccagcugccccucuacggcgugaucgacacccccugcuggaagcugcacacgagcccccugugcacaaccaacaccaaggagggguccaacaucugccucacgcgcaccgaccggggcugguacugcgacaacgccggcagcgucuccuucuucccgcaggccgagaccugcaaggugcagagcaaccgcguguucugcgacaccaugaacucccugacgcugcccucugagguaaaccucugcaacgucgacaucuucaaccccaaguacgacugcaagaucaugaccuccaagacagacgugagcuccagcgugaucacaucccugggggccaucgucagcugcuacggcaagacuaaguguacugccagcaacaagaaccgggggaucaucaagaccuucuccaacggcugcgacuacgugagcaacaagggcguggacaccguguccgucgggaacacccuguacuacguuaauaagcaggagggcaagagccucuacgugaaaggggagcccaucauuaacuucuacgacccacugguuuuccccuccgacgaguucgacgcgagcaucucccaggugaacgagaagaucaaccagagccuggccuucauccgcaaguccgacgagcugcuccacaacgugaacgccggcaagagcacgaccaacaucaugaucaccaccaucaucaucgugaucaucgugauucugcugucccucaucgccguggggcugcugcuuuacugcaaggcccggugaggacuaguggaagcauuuuccuggcugauuaaaagaaauuacucagcuauggucaucuguuccuguuagaaggcuaugcagcauauuauauacuaugcgcauguuaugaaaugcauaauaaaaaauuuuaaaaaaucuaaaagaucuaaaaaaaaaaaaaaaaaaaaaaaaaaaaaaaaaaaaaaaaaaaaaaaaaaaaaaaaaaaaaaaaugcaucccccccccccccccccccccccccccccccaaaggcucuuuucagagccaccagaauu

SEQ ID NO: 1372 - RNA, 2037 nt, Artificial Sequence
  mRNA product Design c-3 comprising derived and/or modified sequence from HRSV(A2)__F-del_DSCav1 (opt1)
gggagaguccgcucagccagguugcagaagcggcuuagcguguguccuaaucuucucucugcguguagguaggccugugccgcaaacaagcuuaccauggagcugcucauccugaaggccaacgccaucaccaccauccugacggcggugaccuucugcuucgccagcggccagaacaucaccgaggaguucuaccaguccacgugcagcgccgucuccaagggguaccucagcgcccugcggaccggcugguacaccuccgugaucaccaucgagcugagcaacaucaaggagaacaagugcaacgggaccgacgccaaggugaagcucaucaagcaggagcuggacaaguacaagaacgcggucacggagcugcagcuccugaugcaguccaccccggcaaccaacaaccgcgcccggcgcgagcugccccgguucaugaacuacacccucaacaacgccaagaagacgaacgugacccugagcaagaagcgcaagcggcgcuuccugggcuuccuccugggggugggcuccgccaucgcgagcggcgucgccgugugcaaggugcugcaccucgagggggaggucaacaagaucaagagcgcccugcuguccaccaacaaggccguggugagccucuccaacggcgucagcgugcugaccuucaaggugcuggaccucaagaacuacaucgacaagcagcugcugcccauccugaacaagcagagcugcuccaucagcaacaucgagacggugaucgaguuccagcagaagaacaaccggcuccuggagaucacccgcgaguucagcgugaacgccggggucaccacccccguguccacguacaugcugaccaacagcgagcuccugucccugaucaacgacaugccgaucaccaacgaccagaagaagcucaugagcaacaacgugcagaucguccggcagcaguccuacagcaucaugugcaucaucaaggaggaggugcuggcguacgugguccagcugccccucuacggcgugaucgacacccccugcuggaagcugcacacgagcccccugugcaccaccaacaccaaggagggguccaacaucugccucacgcgcaccgaccggggcugguacugcgacaacgccggcagcgucuccuucuucccgcaggccgagaccugcaaggugcagagcaaccgcguguucugcgacaccaugaacucccugacgcugcccagcgagguaaaccucugcaacgucgacaucuucaaccccaaguacgacugcaagaucaugaccuccaagaccgacgugagcuccagcgugaucaccucccugggggccaucgucagcugcuacggcaagacgaagugcaccgccagcaacaagaaccgggggaucaucaagaccuucuccaacggcugcgacuacgugagcaacaagggcguggacaccguguccgucgggaacacccuguacuacgugaacaagcaggagggcaagagccucuacgugaagggggagcccaucaucaacuucuacgacccgcuggucuuccccuccgacgaguucgacgcgagcaucucccaggugaacgagaagaucaaccagagccuggccuucauccgcaaguccgacgagcugcuccacaacgugaacgccggcaagagcacgaccaacaucaugaucaccaccaucaucaucgucaucaucgugauccugcugucccucaucgccguggggcugcugcucuacugcaaggcccggugaggacuaguacuggcugcaucucccuuuccucuguccuccauccuucucccaggauggugaagggggaccugguacccagugauccccaccccaggauccuaaaucaugacuuaccugcuaauaaaaacucauuggaaaagugagaagaucuaaaaaaaaaaaaaaaaaaaaaaaaaaaaaaaaaaaaaaaaaaaaaaaaaaaaaaaaaaaaaaaaugcaucccccccccccccccccccccccccccccccaaaggcucuuuucagagccaccagaauu

SEQ ID NO: 1373 - RNA, 2037 nt, Artificial Sequence
  mRNA product Design c-3 comprising derived and/or modified sequence from HRSV(A2)__F-del_DSCav1 (opt1)
gggagaguccgcucagccagguugcagaagcggcuuagcguguguccuaaucuucucucugcguguagguaggccugugccgcaaacaagcuuaccauggagcugcucauccugaaggccaacgccaucaccaccauccugacggcggugaccuucugcuucgccagcggccagaacaucaccgaggaguucuaccaguccacgugcagcgccgucuccaagggguaccucagcgcccugcgcaccggcugguacaccuccgugaucaccaucgagcugagcaacaucaaggagaacaagugcaacgggaccgacgccaaggugaagcucaucaagcaggagcuggacaaguacaagaacgcggucacggagcugcagcuccugaugcaguccacccccgccaccaacaaccgggcccgccgggagcugccgcgcuucaugaacuacacccucaacaacgccaagaagacgaacgugacccugagcaagaagcggaagcgccgguuccugggcuuccuccugggggugggcuccgcgaucgccagcggcgucgccgugugcaaggugcugcaccucgagggggaggucaacaagaucaaguccgcccugcugagcaccaacaaggccguggugucccucagcaacggcgucuccgugcugaccuucaaggugcuggaccucaagaacuacaucgacaagcagcugcugcccauccucaacaagcagagcugcuccaucagcaacaucgagacggucaucgaguuccagcagaagaacaaccgccugcuggagaucacccgggaguucuccgugaacgcgggggugaccacccccgucagcacguacaugcucaccaacagcgagcugcugucccucaucaacgacaugcccaucaccaacgaccagaagaagcugaugagcaacaacgugcagaucgugcgccagcaguccuacagcaucaugugcaucaucaaggaggagguccuggccuacguggugcagcucccgcuguacggcgucaucgacacccccugcuggaagcugcacacgagcccccucugcaccaccaacaccaaggaggggagcaacaucugccugacgcggaccgaccgcggcugguacugcgacaacgccggcuccgugagcuucuucccccaggccgagaccugcaagguccaguccaaccggguguucugcgacaccaugaacagccugacgcucccguccgaggugaaccugugcaacgucgacaucuucaaccccaaguacgacugcaagaucaugaccagcaagaccgacguguccagcuccgugaucaccagccugggggccaucgucuccugcuacggcaagacgaagugcaccgcgagcaacaagaaccgcgggaucaucaagaccuucuccaacggcugcgacuacgugagcaacaagggcguggacaccgucagcguggggaacacccucuacuacgugaacaagcaggagggcaagucccuguacgucaagggggagcccaucaucaacuucuacgacccccugguguucccgagcgacgaguucgacgccuccaucagccaggugaacgagaagaucaaccagucccucgccuucauccggaaguccgacgagcugcugcacaacgucaacgccggcaaguccacgaccaacaucaugaucaccaccaucaucaucgugaucaucgugauccugcucagccugaucgccgucgggcugcuccuguacugcaaggcgcgcugaggacuaguacuggcugcaucucccuuuccucuguccuccauccuucucccaggauggugaagggggaccugguacccagugauccccaccccaggauccuaaaucaugacuuaccugcuaauaaaaacucauuggaaaagugagaagaucuaaaaaaaaaaaaaaaaaaaaaaaaaaaaaaaaaaaaaaaaaaaaaaaaaaaaaaaaaaaaaaaaugcaucccccccccccccccccccccccccccccccaaaggcucuuuucagagccaccagaauu

SEQ ID NO: 1374 - RNA, 2037 nt, Artificial Sequence
  mRNA product Design c-3 comprising derived and/or modified sequence from HRSV(A2)__F-del_DSCav1 (opt2)
gggagaguccgcucagccagguugcagaagcggcuuagcguguguccuaaucuucucucugcguguagguaggccugugccgcaaacaagcuuaccauggagcuccucauccucaaggccaacgccaucaccaccauccucaccgccgucaccuucugcuucgccuccggccagaacaucaccgaggaguucuaccaguccaccugcuccgccgucuccaagggcuaccucuccgcccuccgcaccggcugguacaccuccgucaucaccaucgagcucuccaacaucaaggagaacaagugcaacggcaccgacgccaaggucaagcucaucaagcaggagcucgacaaguacaagaacgccgucaccgagcuccagcuccucaugcaguccacccccgccaccaacaaccgcgcccgccgcgagcucccccgcuucaugaacuacacccucaacaacgccaagaagaccaacgucacccucuccaagaagcgcaagcgccgcuuccucggcuuccuccucggcgucggcuccgccaucgccuccggcgucgccgucugcaagguccuccaccucgagggcgaggucaacaagaucaaguccgcccuccucuccaccaacaaggccgucgucucccucuccaacggcgucuccguccucaccuucaagguccucgaccucaagaacuacaucgacaagcagcuccuccccauccucaacaagcaguccugcuccaucuccaacaucgagaccgucaucgaguuccagcagaagaacaaccgccuccucgagaucacccgcgaguucuccgucaacgccggcgucaccacccccgucuccaccuacaugcucaccaacuccgagcuccucucccucaucaacgacaugcccaucaccaacgaccagaagaagcucauguccaacaacguccagaucguccgccagcaguccuacuccaucaugugcaucaucaaggaggagguccucgccuacgucguccagcucccccucuacggcgucaucgacacccccugcuggaagcuccacaccuccccccucugcaccaccaacaccaaggagggcuccaacaucugccucacccgcaccgaccgcggcugguacugcgacaacgccggcuccgucuccuucuucccccaggccgagaccugcaagguccaguccaaccgcgucuucugcgacaccaugaacucccucacccuccccuccgaggucaaccucugcaacgucgacaucuucaaccccaaguacgacugcaagaucaugaccuccaagaccgacgucuccuccuccgucaucaccucccucggcgccaucgucuccugcuacggcaagaccaagugcaccgccuccaacaagaaccgcggcaucaucaagaccuucuccaacggcugcgacuacgucuccaacaagggcgucgacaccgucuccgucggcaacacccucuacuacgucaacaagcaggagggcaagucccucuacgucaagggcgagcccaucaucaacuucuacgacccccucgucuuccccuccgacgaguucgacgccuccaucucccaggucaacgagaagaucaaccagucccucgccuucauccgcaaguccgacgagcuccuccacaacgucaacgccggcaaguccaccaccaacaucaugaucaccaccaucaucaucgucaucaucgucauccuccucucccucaucgccgucggccuccuccucuacugcaaggcccgcugaggacuaguacuggcugcaucucccuuuccucuguccuccauccuucucccaggauggugaagggggaccugguacccagugauccccaccccaggauccuaaaucaugacuuaccugcuaauaaaaacucauuggaaaagugagaagaucuaaaaaaaaaaaaaaaaaaaaaaaaaaaaaaaaaaaaaaaaaaaaaaaaaaaaaaaaaaaaaaaaugcaucccccccccccccccccccccccccccccccaaaggcucuuuucagagccaccagaauu

SEQ ID NO: 1375 - RNA, 2037 nt, Artificial Sequence
  mRNA product Design c-3 comprising derived and/or modified sequence from HRSV(A2)__F-del_DSCav1 (opt3)
gggagaguccgcucagccagguugcagaagcggcuuagcguguguccuaaucuucucucugcguguagguaggccugugccgcaaacaagcuuaccauggagcugcucauccuuaaggccaacgcuauuaccacaauacugacugcagugacguucugcuuugccagcggccagaauaucaccgaagaguucuaccaauccacauguucugcggucucaaaaggguauuugagugcuuuaagaacuggaugguacaccagcguuauuacaaucgaacuguccaacauuaaggagaauaaaugcaacgguaccgacgccaaggugaaacuaaucaagcaggaacucgauaaguauaaaaaugcaguaacugagcugcagcuucugaugcagucuacacccgccaccaacaauagggcucggcgcgaguugccucgauuuaugaacuacacgcucaauaacgcaaagaaaacuaaugugacccugucgaagaaacguaagagaagguuccugggcuuucucuuaggggucggaucagccauagcuagcggcguggccguuuguaaggugcugcaccuugaaggugaggucaacaaaaucaagagugcguugcuguccacaaauaaagcagugguaucucuaagcaacgggguuuccgugcucacuuucaagguccuggaccuuaaaaauuauauugauaagcaacuguugccaauccucaacaaacagucaugcaguauuagcaacaucgaaaccgugauagaguuucagcagaagaauaaccggcuguuagagauuacacgcgaguucucugugaaugccggagucaccacgccgguuuccacuuacaugcugacaaacucagaacuccuuagccugaucaaugacaugcccauuaccaacgaucaaaagaaauugaugaguaauaacgugcagaucguaagacagcagucuuauuccaucauguguauuauaaaggaagaggugcuagcuuacgucgugcaacugccucucuacggcguuaucgacacuccaugcuggaaacugcauacaagcccccuuuguaccacgaauaccaaggaaggcucgaacauuugccugacaaggacugaucgggggugguauugugacaaugccggaucuguguccuuuuucccucaggcagagaccugcaaaguccagucaaaccgcguguuuugugauacaaugaauaguuugacucucccaagcgagguaaaccugugcaauguugacaucuucaaccccaaguacgauugcaagauaaugaccuccaaaacagacgugucuagcucagucauuaccaguuuaggugcuaucguguccuguuauggcaagacuaaaugcacggccagcaacaagaaucgagggaucauuaaaacauuuucuaacggaugugauuacgucucaaauaagggcguggacaccguuaguguggguaacacucuguauuacguaaauaagcaagaagggaaaagccuauaugucaagggagagccuaucauuaacuucuacgacccacucguguucccguccgaugaauuugacgcgucuauaucgcagguuaaugagaaaaucaaccagagccuggccuucauuagaaaguccgaugaacuuuugcacaaugugaacgcaggcaaaucaaccacaaauaucaugaucaccacuauuauaaucgucauuaucgugauucugcucagucugaucgcuguaggccuucuguuguacugcaaggccaggugaggacuaguacuggcugcaucucccuuuccucuguccuccauccuucucccaggauggugaagggggaccugguacccagugauccccaccccaggauccuaaaucaugacuuaccugcuaauaaaaacucauuggaaaagugagaagaucuaaaaaaaaaaaaaaaaaaaaaaaaaaaaaaaaaaaaaaaaaaaaaaaaaaaaaaaaaaaaaaaaugcaucccccccccccccccccccccccccccccccaaaggcucuuuucagagccaccagaauu

SEQ ID NO: 1376 - RNA, 2037 nt, Artificial Sequence
  mRNA product Design c-3 comprising derived and/or modified sequence from HRSV(A2)__F-del_DSCav1 (opt4)
gggagaguccgcucagccagguugcagaagcggcuuagcguguguccuaaucuucucucugcguguagguaggccugugccgcaaacaagcuuaccauggagcugcugauccugaaggccaacgccaucaccaccauccugaccgccgugaccuucugcuucgccagcggccagaacaucaccgaggaguucuaccagagcaccugcagcgccgugagcaagggcuaccugagcgcccugagaaccggcugguacaccagcgugaucaccaucgagcugagcaacaucaaggagaacaagugcaacggcaccgacgccaaggugaagcugaucaagcaggagcuggacaaguacaagaacgccgugaccgagcugcagcugcugaugcagagcacccccgccaccaacaacagagccagaagagagcugcccagauucaugaacuacacccugaacaacgccaagaagaccaacgugacccugagcaagaagagaaagagaagauuccugggcuuccugcugggcgugggcagcgccaucgccagcggcguggccgugugcaaggugcugcaccuggagggcgaggugaacaagaucaagagcgcccugcugagcaccaacaaggccguggugagccugagcaacggcgugagcgugcugaccuucaaggugcuggaccugaagaacuacaucgacaagcagcugcugcccauccugaacaagcagagcugcagcaucagcaacaucgagaccgugaucgaguuccagcagaagaacaacagacugcuggagaucaccagagaguucagcgugaacgccggcgugaccacccccgugagcaccuacaugcugaccaacagcgagcugcugagccugaucaacgacaugcccaucaccaacgaccagaagaagcugaugagcaacaacgugcagaucgugagacagcagagcuacagcaucaugugcaucaucaaggaggaggugcuggccuacguggugcagcugccccuguacggcgugaucgacacccccugcuggaagcugcacaccagcccccugugcaccaccaacaccaaggagggcagcaacaucugccugaccagaaccgacagaggcugguacugcgacaacgccggcagcgugagcuucuucccccaggccgagaccugcaaggugcagagcaacagaguguucugcgacaccaugaacagccugacccugcccagcgaggugaaccugugcaacguggacaucuucaaccccaaguacgacugcaagaucaugaccagcaagaccgacgugagcagcagcgugaucaccagccugggcgccaucgugagcugcuacggcaagaccaagugcaccgccagcaacaagaacagaggcaucaucaagaccuucagcaacggcugcgacuacgugagcaacaagggcguggacaccgugagcgugggcaacacccuguacuacgugaacaagcaggagggcaagagccuguacgugaagggcgagcccaucaucaacuucuacgacccccugguguuccccagcgacgaguucgacgccagcaucagccaggugaacgagaagaucaaccagagccuggccuucaucagaaagagcgacgagcugcugcacaacgugaacgccggcaagagcaccaccaacaucaugaucaccaccaucaucaucgugaucaucgugauccugcugagccugaucgccgugggccugcugcuguacugcaaggccagaugaggacuaguacuggcugcaucucccuuuccucuguccuccauccuucucccaggauggugaagggggaccugguacccagugauccccaccccaggauccuaaaucaugacuuaccugcuaauaaaaacucauuggaaaagugagaagaucuaaaaaaaaaaaaaaaaaaaaaaaaaaaaaaaaaaaaaaaaaaaaaaaaaaaaaaaaaaaaaaaaugcaucccccccccccccccccccccccccccccccaaaggcucuuuucagagccaccagaauu

SEQ ID NO: 1377 - RNA, 2037 nt, Artificial Sequence
  mRNA product Design c-3 comprising derived and/or modified sequence from HRSV(A2)__F-del_DSCav1 (opt5)
gggagaguccgcucagccagguugcagaagcggcuuagcguguguccuaaucuucucucugcguguagguaggccugugccgcaaacaagcuuaccauggagcugcucauccugaaggccaacgcuauuaccacaauccuuacggccgugaccuucugcuuugcgagcggccagaauauuacagaagaguucuaccaauccaccuguucugcugucagcaaaggguaucuguccgcccucagaacaggaugguacaccucuguuaucacaauugaacugagcaacaucaaggagaauaaaugcaacggcaccgacgccaaggugaaacuuaucaagcaggaacuggauaaguauaaaaaugcugugacggagcuccagcugcugaugcaguccacccccgccacaaacaaucgggcucgcagagagcucccucgguuuaugaacuacacccugaauaacgccaagaaaacaaaugucacccuuucuaagaaacgcaagagacgguuccugggguuucuccugggagugggcagcgcgauugccuccgggguugcuguguguaagguccuucaccuggaaggagaggugaacaaaaucaagagcgcccuccugucuacgaauaaagcuguugugucccugagcaacggcgucucugugcucacauucaaggugcuggaccuuaaaaauuauauugauaagcaacugcucccgauccugaacaaacaguccugcagcauuucuaacaucgaaaccgucauugaguuucagcagaagaauaaccgccuucuggagaucacaagagaauuuuccguuaaugccggcgugaccacccccgugagcacauacaugcucacgaacuccgagcugcugucucucaucaaugacaugccuauuaccaacgaucaaaagaaacugaugagcaauaacguccagaucgugcggcagcaguccuauagcauuauguguaucauuaaggaagagguucuugcguacgugguccaacugccccucuacggggugaucgacacaccuugcuggaaacugcauaccucuccccuuuguacaaccaauacgaaggaaggauccaacaucugccugacacgcaccgauagaggcugguauugugacaaugccgggagcguuucuuucuucccucaggcugagaccugcaaagugcagagcaaccgggucuuuugugauacaaugaacucccucacccugccgucugaggugaaucugugcaaugucgacauuuucaaccccaaguacgauugcaagaucaugacaagcaaaacggacguguccagcucuguuauuaccucccucggagccaucgugagcuguuauggcaagacaaaaugcaccgcuucuaacaagaaucgcgggauuaucaaaacauuuuccaacggaugugauuacgucagcaauaagggcguggacaccguuuccgugggcaacacgcuguauuacgucaauaagcaagaagggaaaucucuuuaugugaagggagagccuaucauuaacuucuacgacccccugguguucccuagcgaugaauuugacgccuccaucucucagguuaaugagaaaauuaaccagagccucgccuucaucagaaaguccgaugaacugcugcacaaugucaacgcuggcaaaagcaccacaaauauuaugaucaccacaauuaucaucgugauuaucgugauucuucucucucugaucgcggucgggcugcuccuguacugcaaggcccggugaggacuaguacuggcugcaucucccuuuccucuguccuccauccuucucccaggauggugaagggggaccugguacccagugauccccaccccaggauccuaaaucaugacuuaccugcuaauaaaaacucauuggaaaagugagaagaucuaaaaaaaaaaaaaaaaaaaaaaaaaaaaaaaaaaaaaaaaaaaaaaaaaaaaaaaaaaaaaaaaugcaucccccccccccccccccccccccccccccccaaaggcucuuuucagagccaccagaauu

SEQ ID NO: 1378 - RNA, 2037 nt, Artificial Sequence
  mRNA product Design c-3 comprising derived and/or modified sequence from HRSV(A2)__F-del_DSCav1 (opt6)
gggagaguccgcucagccagguugcagaagcggcuuagcguguguccuaaucuucucucugcguguagguaggccugugccgcaaacaagcuuaccauggaacuauuaauauuaaaagcaaaugcuauuaccacaauacuuacugcuguaaccuucugcuuugccucuggccaaaacauaacagaagaauuuuaucaaucaacuugcuccgcuguaagcaaaggcuaccuaucagcauuacgcaccggcugguacacaucaguaauaacaauagaacuauccaacauaaaagaaaauaaaugcaacggaacagacgcaaaaguaaaauuaauaaaacaagaacucgacaaauacaaaaacgcaguaacagaauuacaacuacuaaugcaaaguacuccagccaccaacaacagagcaagaagagaauuaccacgauuuaugaacuacacacuaaacaaugcaaaaaaaacaaacguaacacuaucaaaaaaacguaaacgcagauucuuaggcuuccuccuagguguaggcucagcaaucgccucaggaguggcaguuuguaaaguacuacaccuagaaggagaaguaaacaaaaucaaaucugcccuuuuaucgacaaacaaagcaguaguaucguuauccaauggagucucaguauugacauucaaaguauuagaccuaaaaaauuauauagauaaacaacucuuaccuaucuuaaauaaacaaagcugcucaauaaguaacauagaaaccguaauagaauuucaacaaaaaaacaauagacuccuugagaucacucgagaauuuucaguaaacgcagguguaacaacaccaguaagcacauacaugcuaacaaauagugaacuauuaucucuaauuaacgauaugcccauaaccaacgaucaaaaaaaacucaugaguaacaacguacaaauaguaagacaacaauccuauagcauaaugugcauuauaaaagaagaaguacuagcauauguaguccaacuaccacuauacggcguaauagacacaccaugcuggaaacuacacaccucaccccuaugcacaacaaauacaaaagaaggaucaaacauaugcuuaaccaggacagacagaggcugguacugcgauaacgcaggaucuguuucauucuucccccaagcagaaacaugcaaaguacaaucaaacagaguauuuugugauaccaugaacucacucacauuaccauccgaagucaaccucugcaacguagacauauucaaccccaaauacgacugcaaaauaaugaccucaaaaacagauguaucaucaucaguaaucacaucacuaggagcuaucguaucuuguuauggaaaaacaaaaugcacagcauccaacaaaaacagaggaauuaucaaaacauucucaaauggaugugacuauguaucaaacaaaggaguagacaccguaagcguaggcaauacacuauauuacguaaauaaacaagaaggaaaaucacuauacguaaaaggugaaccaauaauaaacuucuaugacccccuaguauucccaucagaugaauuugacgcaagcauaucacaagucaacgaaaaaauaaaccaaucacuggcauucauucgcaaaucagaugaacuucuccacaacguaaacgcugguaaaagcacuacaaacauaaugauaacaacaaucaucauugucauaauaguuauucuauuaucacuaaucgcaguaggauuacuacuauacuguaaagcgagguaaggacuaguacuggcugcaucucccuuuccucuguccuccauccuucucccaggauggugaagggggaccugguacccagugauccccaccccaggauccuaaaucaugacuuaccugcuaauaaaaacucauuggaaaagugagaagaucuaaaaaaaaaaaaaaaaaaaaaaaaaaaaaaaaaaaaaaaaaaaaaaaaaaaaaaaaaaaaaaaaugcaucccccccccccccccccccccccccccccccaaaggcucuuuucagagccaccagaauu

SEQ ID NO: 1379 - RNA, 2037 nt, Artificial Sequence
  mRNA product Design c-3 comprising derived and/or modified sequence from HRSV(A2)__F-del_DSCav1 (opt11)
gggagaguccgcucagccagguugcagaagcggcuuagcguguguccuaaucuucucucugcguguagguaggccugugccgcaaacaagcuuaccauggagcugcucauccugaaggccaacgccaucaccacaauccugacggcggugaccuucugcuucgccagcggccagaacaucaccgaggaguucuaccaguccacgugcagcgccgucuccaagggguaccucagcgcccugcgaaccggcugguacaccuccgugaucaccaucgagcugucaaacaucaaggagaacaagugcaacgggaccgaugccaagguuaagcucaucaagcaggagcuggacaaguacaagaacgcggucacggagcugcagcuccugaugcaguccacuccggcaaccaacaaccgcgccaggcgcgagcugccccgguucaugaacuacacccucaacaacgccaagaagacgaaugugacccugagcaagaagcgcaagcggcgcuuccugggcuuccuccuaggggugggcuccgccaucgcgagcggcgucgccgugugcaagguguugcaccucgagggggaggucaacaagaucaagagcgcccugcuguccaccaacaaggccgugguaagccucuccaacggcgucagcguucugaccuucaaggugcuggaccucaagaacuauaucgacaagcagcugcugcccauccugaacaagcagagcugcuccaucucaaacaucgaaacggugauugaguuccagcagaagaacaaccggcuccuggaaaucacccgcgaguucagcgugaacgccggggucaccacccccguguccacguacaugcugaccaacagcgagcuccuaucccugaucaacgacaugccgaucaccaacgaccagaagaagcucaugagcaacaacgugcagaucguccggcagcaguccuacagcaucaugugcaucaucaaggaagaggugcuggcguacgugguccagcugccccucuacggcgugaucgacacccccugcuggaagcugcacacgagcccccugugcacaaccaacaccaaggagggguccaacaucugccucacgcgcaccgaccggggcugguacugcgacaacgccggcagcgucuccuucuucccgcaggccgagaccugcaaggugcagagcaaccgcguguucugcgacaccaugaacucccugacgcugcccucugagguaaaccucugcaacgucgacaucuucaaccccaaguacgacugcaagaucaugaccuccaagacagacgugagcuccagcgugaucacaucccugggggccaucgucagcugcuacggcaagacuaaguguacugccagcaacaagaaccgggggaucaucaagaccuucuccaacggcugcgacuacgugagcaacaagggcguggacaccguguccgucgggaacacccuguacuacguuaauaagcaggagggcaagagccucuacgugaaaggggagcccaucauuaacuucuacgacccacugguuuuccccuccgacgaguucgacgcgagcaucucccaggugaacgagaagaucaaccagagccuggccuucauccgcaaguccgacgagcugcuccacaacgugaacgccggcaagagcacgaccaacaucaugaucaccaccaucaucaucgugaucaucgugauucugcugucccucaucgccguggggcugcugcuuuacugcaaggcccggugaggacuaguacuggcugcaucucccuuuccucuguccuccauccuucucccaggauggugaagggggaccugguacccagugauccccaccccaggauccuaaaucaugacuuaccugcuaauaaaaacucauuggaaaagugagaagaucuaaaaaaaaaaaaaaaaaaaaaaaaaaaaaaaaaaaaaaaaaaaaaaaaaaaaaaaaaaaaaaaaugcaucccccccccccccccccccccccccccccccaaaggcucuuuucagagccaccagaauu

SEQ ID NO: 1380 - RNA, 2033 nt, Artificial Sequence
  mRNA product Design c-4 comprising derived and/or modified sequence from HRSV(A2)__F-del_DSCav1 (opt1)
gggagaguccgcucagccagguugcagaagcggcuuagcguguguccuaaucuucucucugcguguagguaggccugugccgcaaacaagcuuaccauggagcugcucauccugaaggccaacgccaucaccaccauccugacggcggugaccuucugcuucgccagcggccagaacaucaccgaggaguucuaccaguccacgugcagcgccgucuccaagggguaccucagcgcccugcggaccggcugguacaccuccgugaucaccaucgagcugagcaacaucaaggagaacaagugcaacgggaccgacgccaaggugaagcucaucaagcaggagcuggacaaguacaagaacgcggucacggagcugcagcuccugaugcaguccaccccggcaaccaacaaccgcgcccggcgcgagcugccccgguucaugaacuacacccucaacaacgccaagaagacgaacgugacccugagcaagaagcgcaagcggcgcuuccugggcuuccuccugggggugggcuccgccaucgcgagcggcgucgccgugugcaaggugcugcaccucgagggggaggucaacaagaucaagagcgcccugcuguccaccaacaaggccguggugagccucuccaacggcgucagcgugcugaccuucaaggugcuggaccucaagaacuacaucgacaagcagcugcugcccauccugaacaagcagagcugcuccaucagcaacaucgagacggugaucgaguuccagcagaagaacaaccggcuccuggagaucacccgcgaguucagcgugaacgccggggucaccacccccguguccacguacaugcugaccaacagcgagcuccugucccugaucaacgacaugccgaucaccaacgaccagaagaagcucaugagcaacaacgugcagaucguccggcagcaguccuacagcaucaugugcaucaucaaggaggaggugcuggcguacgugguccagcugccccucuacggcgugaucgacacccccugcuggaagcugcacacgagcccccugugcaccaccaacaccaaggagggguccaacaucugccucacgcgcaccgaccggggcugguacugcgacaacgccggcagcgucuccuucuucccgcaggccgagaccugcaaggugcagagcaaccgcguguucugcgacaccaugaacucccugacgcugcccagcgagguaaaccucugcaacgucgacaucuucaaccccaaguacgacugcaagaucaugaccuccaagaccgacgugagcuccagcgugaucaccucccugggggccaucgucagcugcuacggcaagacgaagugcaccgccagcaacaagaaccgggggaucaucaagaccuucuccaacggcugcgacuacgugagcaacaagggcguggacaccguguccgucgggaacacccuguacuacgugaacaagcaggagggcaagagccucuacgugaagggggagcccaucaucaacuucuacgacccgcuggucuuccccuccgacgaguucgacgcgagcaucucccaggugaacgagaagaucaaccagagccuggccuucauccgcaaguccgacgagcugcuccacaacgugaacgccggcaagagcacgaccaacaucaugaucaccaccaucaucaucgucaucaucgugauccugcugucccucaucgccguggggcugcugcucuacugcaaggcccggugaggacuaguggaagcauuuuccuggcugauuaaaagaaauuacucagcuauggucaucuguuccuguuagaaggcuaugcagcauauuauauacuaugcgcauguuaugaaaugcauaauaaaaaauuuuaaaaaaucuaaaagaucuaaaaaaaaaaaaaaaaaaaaaaaaaaaaaaaaaaaaaaaaaaaaaaaaaaaaaaaaaaaaaaaaugcaucccccccccccccccccccccccccccccccaaaggcucuuuucagagccaccagaauu

SEQ ID NO: 1381 - RNA, 2033 nt, Artificial Sequence
  mRNA product Design c-4 comprising derived and/or modified sequence from HRSV(A2)__F-del_DSCav1 (opt1)
gggagaguccgcucagccagguugcagaagcggcuuagcguguguccuaaucuucucucugcguguagguaggccugugccgcaaacaagcuuaccauggagcugcucauccugaaggccaacgccaucaccaccauccugacggcggugaccuucugcuucgccagcggccagaacaucaccgaggaguucuaccaguccacgugcagcgccgucuccaagggguaccucagcgcccugcgcaccggcugguacaccuccgugaucaccaucgagcugagcaacaucaaggagaacaagugcaacgggaccgacgccaaggugaagcucaucaagcaggagcuggacaaguacaagaacgcggucacggagcugcagcuccugaugcaguccacccccgccaccaacaaccgggcccgccgggagcugccgcgcuucaugaacuacacccucaacaacgccaagaagacgaacgugacccugagcaagaagcggaagcgccgguuccugggcuuccuccugggggugggcuccgcgaucgccagcggcgucgccgugugcaaggugcugcaccucgagggggaggucaacaagaucaaguccgcccugcugagcaccaacaaggccguggugucccucagcaacggcgucuccgugcugaccuucaaggugcuggaccucaagaacuacaucgacaagcagcugcugcccauccucaacaagcagagcugcuccaucagcaacaucgagacggucaucgaguuccagcagaagaacaaccgccugcuggagaucacccgggaguucuccgugaacgcgggggugaccacccccgucagcacguacaugcucaccaacagcgagcugcugucccucaucaacgacaugcccaucaccaacgaccagaagaagcugaugagcaacaacgugcagaucgugcgccagcaguccuacagcaucaugugcaucaucaaggaggagguccuggccuacguggugcagcucccgcuguacggcgucaucgacacccccugcuggaagcugcacacgagcccccucugcaccaccaacaccaaggaggggagcaacaucugccugacgcggaccgaccgcggcugguacugcgacaacgccggcuccgugagcuucuucccccaggccgagaccugcaagguccaguccaaccggguguucugcgacaccaugaacagccugacgcucccguccgaggugaaccugugcaacgucgacaucuucaaccccaaguacgacugcaagaucaugaccagcaagaccgacguguccagcuccgugaucaccagccugggggccaucgucuccugcuacggcaagacgaagugcaccgcgagcaacaagaaccgcgggaucaucaagaccuucuccaacggcugcgacuacgugagcaacaagggcguggacaccgucagcguggggaacacccucuacuacgugaacaagcaggagggcaagucccuguacgucaagggggagcccaucaucaacuucuacgacccccugguguucccgagcgacgaguucgacgccuccaucagccaggugaacgagaagaucaaccagucccucgccuucauccggaaguccgacgagcugcugcacaacgucaacgccggcaaguccacgaccaacaucaugaucaccaccaucaucaucgugaucaucgugauccugcucagccugaucgccgucgggcugcuccuguacugcaaggcgcgcugaggacuaguggaagcauuuuccuggcugauuaaaagaaauuacucagcuauggucaucuguuccuguuagaaggcuaugcagcauauuauauacuaugcgcauguuaugaaaugcauaauaaaaaauuuuaaaaaaucuaaaagaucuaaaaaaaaaaaaaaaaaaaaaaaaaaaaaaaaaaaaaaaaaaaaaaaaaaaaaaaaaaaaaaaaugcaucccccccccccccccccccccccccccccccaaaggcucuuuucagagccaccagaauu

SEQ ID NO: 1382 - RNA, 2033 nt, Artificial Sequence
  mRNA product Design c-4 comprising derived and/or modified sequence from HRSV(A2)__F-del_DSCav1 (opt2)
gggagaguccgcucagccagguugcagaagcggcuuagcguguguccuaaucuucucucugcguguagguaggccugugccgcaaacaagcuuaccauggagcuccucauccucaaggccaacgccaucaccaccauccucaccgccgucaccuucugcuucgccuccggccagaacaucaccgaggaguucuaccaguccaccugcuccgccgucuccaagggcuaccucuccgcccuccgcaccggcugguacaccuccgucaucaccaucgagcucuccaacaucaaggagaacaagugcaacggcaccgacgccaaggucaagcucaucaagcaggagcucgacaaguacaagaacgccgucaccgagcuccagcuccucaugcaguccacccccgccaccaacaaccgcgcccgccgcgagcucccccgcuucaugaacuacacccucaacaacgccaagaagaccaacgucacccucuccaagaagcgcaagcgccgcuuccucggcuuccuccucggcgucggcuccgccaucgccuccggcgucgccgucugcaagguccuccaccucgagggcgaggucaacaagaucaaguccgcccuccucuccaccaacaaggccgucgucucccucuccaacggcgucuccguccucaccuucaagguccucgaccucaagaacuacaucgacaagcagcuccuccccauccucaacaagcaguccugcuccaucuccaacaucgagaccgucaucgaguuccagcagaagaacaaccgccuccucgagaucacccgcgaguucuccgucaacgccggcgucaccacccccgucuccaccuacaugcucaccaacuccgagcuccucucccucaucaacgacaugcccaucaccaacgaccagaagaagcucauguccaacaacguccagaucguccgccagcaguccuacuccaucaugugcaucaucaaggaggagguccucgccuacgucguccagcucccccucuacggcgucaucgacacccccugcuggaagcuccacaccuccccccucugcaccaccaacaccaaggagggcuccaacaucugccucacccgcaccgaccgcggcugguacugcgacaacgccggcuccgucuccuucuucccccaggccgagaccugcaagguccaguccaaccgcgucuucugcgacaccaugaacucccucacccuccccuccgaggucaaccucugcaacgucgacaucuucaaccccaaguacgacugcaagaucaugaccuccaagaccgacgucuccuccuccgucaucaccucccucggcgccaucgucuccugcuacggcaagaccaagugcaccgccuccaacaagaaccgcggcaucaucaagaccuucuccaacggcugcgacuacgucuccaacaagggcgucgacaccgucuccgucggcaacacccucuacuacgucaacaagcaggagggcaagucccucuacgucaagggcgagcccaucaucaacuucuacgacccccucgucuuccccuccgacgaguucgacgccuccaucucccaggucaacgagaagaucaaccagucccucgccuucauccgcaaguccgacgagcuccuccacaacgucaacgccggcaaguccaccaccaacaucaugaucaccaccaucaucaucgucaucaucgucauccuccucucccucaucgccgucggccuccuccucuacugcaaggcccgcugaggacuaguggaagcauuuuccuggcugauuaaaagaaauuacucagcuauggucaucuguuccuguuagaaggcuaugcagcauauuauauacuaugcgcauguuaugaaaugcauaauaaaaaauuuuaaaaaaucuaaaagaucuaaaaaaaaaaaaaaaaaaaaaaaaaaaaaaaaaaaaaaaaaaaaaaaaaaaaaaaaaaaaaaaaugcaucccccccccccccccccccccccccccccccaaaggcucuuuucagagccaccagaauu

SEQ ID NO: 1383 - RNA, 2033 nt, Artificial Sequence
  mRNA product Design c-4 comprising derived and/or modified sequence from HRSV(A2)__F-del_DSCav1 (opt3)
gggagaguccgcucagccagguugcagaagcggcuuagcguguguccuaaucuucucucugcguguagguaggccugugccgcaaacaagcuuaccauggagcugcucauccuuaaggccaacgcuauuaccacaauacugacugcagugacguucugcuuugccagcggccagaauaucaccgaagaguucuaccaauccacauguucugcggucucaaaaggguauuugagugcuuuaagaacuggaugguacaccagcguuauuacaaucgaacuguccaacauuaaggagaauaaaugcaacgguaccgacgccaaggugaaacuaaucaagcaggaacucgauaaguauaaaaaugcaguaacugagcugcagcuucugaugcagucuacacccgccaccaacaauagggcucggcgcgaguugccucgauuuaugaacuacacgcucaauaacgcaaagaaaacuaaugugacccugucgaagaaacguaagagaagguuccugggcuuucucuuaggggucggaucagccauagcuagcggcguggccguuuguaaggugcugcaccuugaaggugaggucaacaaaaucaagagugcguugcuguccacaaauaaagcagugguaucucuaagcaacgggguuuccgugcucacuuucaagguccuggaccuuaaaaauuauauugauaagcaacuguugccaauccucaacaaacagucaugcaguauuagcaacaucgaaaccgugauagaguuucagcagaagaauaaccggcuguuagagauuacacgcgaguucucugugaaugccggagucaccacgccgguuuccacuuacaugcugacaaacucagaacuccuuagccugaucaaugacaugcccauuaccaacgaucaaaagaaauugaugaguaauaacgugcagaucguaagacagcagucuuauuccaucauguguauuauaaaggaagaggugcuagcuuacgucgugcaacugccucucuacggcguuaucgacacuccaugcuggaaacugcauacaagcccccuuuguaccacgaauaccaaggaaggcucgaacauuugccugacaaggacugaucgggggugguauugugacaaugccggaucuguguccuuuuucccucaggcagagaccugcaaaguccagucaaaccgcguguuuugugauacaaugaauaguuugacucucccaagcgagguaaaccugugcaauguugacaucuucaaccccaaguacgauugcaagauaaugaccuccaaaacagacgugucuagcucagucauuaccaguuuaggugcuaucguguccuguuauggcaagacuaaaugcacggccagcaacaagaaucgagggaucauuaaaacauuuucuaacggaugugauuacgucucaaauaagggcguggacaccguuaguguggguaacacucuguauuacguaaauaagcaagaagggaaaagccuauaugucaagggagagccuaucauuaacuucuacgacccacucguguucccguccgaugaauuugacgcgucuauaucgcagguuaaugagaaaaucaaccagagccuggccuucauuagaaaguccgaugaacuuuugcacaaugugaacgcaggcaaaucaaccacaaauaucaugaucaccacuauuauaaucgucauuaucgugauucugcucagucugaucgcuguaggccuucuguuguacugcaaggccaggugaggacuaguggaagcauuuuccuggcugauuaaaagaaauuacucagcuauggucaucuguuccuguuagaaggcuaugcagcauauuauauacuaugcgcauguuaugaaaugcauaauaaaaaauuuuaaaaaaucuaaaagaucuaaaaaaaaaaaaaaaaaaaaaaaaaaaaaaaaaaaaaaaaaaaaaaaaaaaaaaaaaaaaaaaaugcaucccccccccccccccccccccccccccccccaaaggcucuuuucagagccaccagaauu

SEQ ID NO: 1384 - RNA, 2033 nt, Artificial Sequence
  mRNA product Design c-4 comprising derived and/or modified sequence from HRSV(A2)__F-del_DSCav1 (opt4)
gggagaguccgcucagccagguugcagaagcggcuuagcguguguccuaaucuucucucugcguguagguaggccugugccgcaaacaagcuuaccauggagcugcugauccugaaggccaacgccaucaccaccauccugaccgccgugaccuucugcuucgccagcggccagaacaucaccgaggaguucuaccagagcaccugcagcgccgugagcaagggcuaccugagcgcccugagaaccggcugguacaccagcgugaucaccaucgagcugagcaacaucaaggagaacaagugcaacggcaccgacgccaaggugaagcugaucaagcaggagcuggacaaguacaagaacgccgugaccgagcugcagcugcugaugcagagcacccccgccaccaacaacagagccagaagagagcugcccagauucaugaacuacacccugaacaacgccaagaagaccaacgugacccugagcaagaagagaaagagaagauuccugggcuuccugcugggcgugggcagcgccaucgccagcggcguggccgugugcaaggugcugcaccuggagggcgaggugaacaagaucaagagcgcccugcugagcaccaacaaggccguggugagccugagcaacggcgugagcgugcugaccuucaaggugcuggaccugaagaacuacaucgacaagcagcugcugcccauccugaacaagcagagcugcagcaucagcaacaucgagaccgugaucgaguuccagcagaagaacaacagacugcuggagaucaccagagaguucagcgugaacgccggcgugaccacccccgugagcaccuacaugcugaccaacagcgagcugcugagccugaucaacgacaugcccaucaccaacgaccagaagaagcugaugagcaacaacgugcagaucgugagacagcagagcuacagcaucaugugcaucaucaaggaggaggugcuggccuacguggugcagcugccccuguacggcgugaucgacacccccugcuggaagcugcacaccagcccccugugcaccaccaacaccaaggagggcagcaacaucugccugaccagaaccgacagaggcugguacugcgacaacgccggcagcgugagcuucuucccccaggccgagaccugcaaggugcagagcaacagaguguucugcgacaccaugaacagccugacccugcccagcgaggugaaccugugcaacguggacaucuucaaccccaaguacgacugcaagaucaugaccagcaagaccgacgugagcagcagcgugaucaccagccugggcgccaucgugagcugcuacggcaagaccaagugcaccgccagcaacaagaacagaggcaucaucaagaccuucagcaacggcugcgacuacgugagcaacaagggcguggacaccgugagcgugggcaacacccuguacuacgugaacaagcaggagggcaagagccuguacgugaagggcgagcccaucaucaacuucuacgacccccugguguuccccagcgacgaguucgacgccagcaucagccaggugaacgagaagaucaaccagagccuggccuucaucagaaagagcgacgagcugcugcacaacgugaacgccggcaagagcaccaccaacaucaugaucaccaccaucaucaucgugaucaucgugauccugcugagccugaucgccgugggccugcugcuguacugcaaggccagaugaggacuaguggaagcauuuuccuggcugauuaaaagaaauuacucagcuauggucaucuguuccuguuagaaggcuaugcagcauauuauauacuaugcgcauguuaugaaaugcauaauaaaaaauuuuaaaaaaucuaaaagaucuaaaaaaaaaaaaaaaaaaaaaaaaaaaaaaaaaaaaaaaaaaaaaaaaaaaaaaaaaaaaaaaaugcaucccccccccccccccccccccccccccccccaaaggcucuuuucagagccaccagaauu

SEQ ID NO: 1385 - RNA, 2033 nt, Artificial Sequence
  mRNA product Design c-4 comprising derived and/or modified sequence from HRSV(A2)__F-del_DSCav1 (opt5)
gggagaguccgcucagccagguugcagaagcggcuuagcguguguccuaaucuucucucugcguguagguaggccugugccgcaaacaagcuuaccauggagcugcucauccugaaggccaacgcuauuaccacaauccuuacggccgugaccuucugcuuugcgagcggccagaauauuacagaagaguucuaccaauccaccuguucugcugucagcaaaggguaucuguccgcccucagaacaggaugguacaccucuguuaucacaauugaacugagcaacaucaaggagaauaaaugcaacggcaccgacgccaaggugaaacuuaucaagcaggaacuggauaaguauaaaaaugcugugacggagcuccagcugcugaugcaguccacccccgccacaaacaaucgggcucgcagagagcucccucgguuuaugaacuacacccugaauaacgccaagaaaacaaaugucacccuuucuaagaaacgcaagagacgguuccugggguuucuccugggagugggcagcgcgauugccuccgggguugcuguguguaagguccuucaccuggaaggagaggugaacaaaaucaagagcgcccuccugucuacgaauaaagcuguugugucccugagcaacggcgucucugugcucacauucaaggugcuggaccuuaaaaauuauauugauaagcaacugcucccgauccugaacaaacaguccugcagcauuucuaacaucgaaaccgucauugaguuucagcagaagaauaaccgccuucuggagaucacaagagaauuuuccguuaaugccggcgugaccacccccgugagcacauacaugcucacgaacuccgagcugcugucucucaucaaugacaugccuauuaccaacgaucaaaagaaacugaugagcaauaacguccagaucgugcggcagcaguccuauagcauuauguguaucauuaaggaagagguucuugcguacgugguccaacugccccucuacggggugaucgacacaccuugcuggaaacugcauaccucuccccuuuguacaaccaauacgaaggaaggauccaacaucugccugacacgcaccgauagaggcugguauugugacaaugccgggagcguuucuuucuucccucaggcugagaccugcaaagugcagagcaaccgggucuuuugugauacaaugaacucccucacccugccgucugaggugaaucugugcaaugucgacauuuucaaccccaaguacgauugcaagaucaugacaagcaaaacggacguguccagcucuguuauuaccucccucggagccaucgugagcuguuauggcaagacaaaaugcaccgcuucuaacaagaaucgcgggauuaucaaaacauuuuccaacggaugugauuacgucagcaauaagggcguggacaccguuuccgugggcaacacgcuguauuacgucaauaagcaagaagggaaaucucuuuaugugaagggagagccuaucauuaacuucuacgacccccugguguucccuagcgaugaauuugacgccuccaucucucagguuaaugagaaaauuaaccagagccucgccuucaucagaaaguccgaugaacugcugcacaaugucaacgcuggcaaaagcaccacaaauauuaugaucaccacaauuaucaucgugauuaucgugauucuucucucucugaucgcggucgggcugcuccuguacugcaaggcccggugaggacuaguggaagcauuuuccuggcugauuaaaagaaauuacucagcuauggucaucuguuccuguuagaaggcuaugcagcauauuauauacuaugcgcauguuaugaaaugcauaauaaaaaauuuuaaaaaaucuaaaagaucuaaaaaaaaaaaaaaaaaaaaaaaaaaaaaaaaaaaaaaaaaaaaaaaaaaaaaaaaaaaaaaaaugcaucccccccccccccccccccccccccccccccaaaggcucuuuucagagccaccagaauu

SEQ ID NO: 1386 - RNA, 2033 nt, Artificial Sequence
  mRNA product Design c-4 comprising derived and/or modified sequence from HRSV(A2)__F-del_DSCav1 (opt6)
gggagaguccgcucagccagguugcagaagcggcuuagcguguguccuaaucuucucucugcguguagguaggccugugccgcaaacaagcuuaccauggaacuauuaauauuaaaagcaaaugcuauuaccacaauacuuacugcuguaaccuucugcuuugccucuggccaaaacauaacagaagaauuuuaucaaucaacuugcuccgcuguaagcaaaggcuaccuaucagcauuacgcaccggcugguacacaucaguaauaacaauagaacuauccaacauaaaagaaaauaaaugcaacggaacagacgcaaaaguaaaauuaauaaaacaagaacucgacaaauacaaaaacgcaguaacagaauuacaacuacuaaugcaaaguacuccagccaccaacaacagagcaagaagagaauuaccacgauuuaugaacuacacacuaaacaaugcaaaaaaaacaaacguaacacuaucaaaaaaacguaaacgcagauucuuaggcuuccuccuagguguaggcucagcaaucgccucaggaguggcaguuuguaaaguacuacaccuagaaggagaaguaaacaaaaucaaaucugcccuuuuaucgacaaacaaagcaguaguaucguuauccaauggagucucaguauugacauucaaaguauuagaccuaaaaaauuauauagauaaacaacucuuaccuaucuuaaauaaacaaagcugcucaauaaguaacauagaaaccguaauagaauuucaacaaaaaaacaauagacuccuugagaucacucgagaauuuucaguaaacgcagguguaacaacaccaguaagcacauacaugcuaacaaauagugaacuauuaucucuaauuaacgauaugcccauaaccaacgaucaaaaaaaacucaugaguaacaacguacaaauaguaagacaacaauccuauagcauaaugugcauuauaaaagaagaaguacuagcauauguaguccaacuaccacuauacggcguaauagacacaccaugcuggaaacuacacaccucaccccuaugcacaacaaauacaaaagaaggaucaaacauaugcuuaaccaggacagacagaggcugguacugcgauaacgcaggaucuguuucauucuucccccaagcagaaacaugcaaaguacaaucaaacagaguauuuugugauaccaugaacucacucacauuaccauccgaagucaaccucugcaacguagacauauucaaccccaaauacgacugcaaaauaaugaccucaaaaacagauguaucaucaucaguaaucacaucacuaggagcuaucguaucuuguuauggaaaaacaaaaugcacagcauccaacaaaaacagaggaauuaucaaaacauucucaaauggaugugacuauguaucaaacaaaggaguagacaccguaagcguaggcaauacacuauauuacguaaauaaacaagaaggaaaaucacuauacguaaaaggugaaccaauaauaaacuucuaugacccccuaguauucccaucagaugaauuugacgcaagcauaucacaagucaacgaaaaaauaaaccaaucacuggcauucauucgcaaaucagaugaacuucuccacaacguaaacgcugguaaaagcacuacaaacauaaugauaacaacaaucaucauugucauaauaguuauucuauuaucacuaaucgcaguaggauuacuacuauacuguaaagcgagguaaggacuaguggaagcauuuuccuggcugauuaaaagaaauuacucagcuauggucaucuguuccuguuagaaggcuaugcagcauauuauauacuaugcgcauguuaugaaaugcauaauaaaaaauuuuaaaaaaucuaaaagaucuaaaaaaaaaaaaaaaaaaaaaaaaaaaaaaaaaaaaaaaaaaaaaaaaaaaaaaaaaaaaaaaaugcaucccccccccccccccccccccccccccccccaaaggcucuuuucagagccaccagaauu

SEQ ID NO: 1387 - RNA, 2033 nt, Artificial Sequence
  mRNA product Design c-4 comprising derived and/or modified sequence from HRSV(A2)__F-del_DSCav1 (opt11)
gggagaguccgcucagccagguugcagaagcggcuuagcguguguccuaaucuucucucugcguguagguaggccugugccgcaaacaagcuuaccauggagcugcucauccugaaggccaacgccaucaccacaauccugacggcggugaccuucugcuucgccagcggccagaacaucaccgaggaguucuaccaguccacgugcagcgccgucuccaagggguaccucagcgcccugcgaaccggcugguacaccuccgugaucaccaucgagcugucaaacaucaaggagaacaagugcaacgggaccgaugccaagguuaagcucaucaagcaggagcuggacaaguacaagaacgcggucacggagcugcagcuccugaugcaguccacuccggcaaccaacaaccgcgccaggcgcgagcugccccgguucaugaacuacacccucaacaacgccaagaagacgaaugugacccugagcaagaagcgcaagcggcgcuuccugggcuuccuccuaggggugggcuccgccaucgcgagcggcgucgccgugugcaagguguugcaccucgagggggaggucaacaagaucaagagcgcccugcuguccaccaacaaggccgugguaagccucuccaacggcgucagcguucugaccuucaaggugcuggaccucaagaacuauaucgacaagcagcugcugcccauccugaacaagcagagcugcuccaucucaaacaucgaaacggugauugaguuccagcagaagaacaaccggcuccuggaaaucacccgcgaguucagcgugaacgccggggucaccacccccguguccacguacaugcugaccaacagcgagcuccuaucccugaucaacgacaugccgaucaccaacgaccagaagaagcucaugagcaacaacgugcagaucguccggcagcaguccuacagcaucaugugcaucaucaaggaagaggugcuggcguacgugguccagcugccccucuacggcgugaucgacacccccugcuggaagcugcacacgagcccccugugcacaaccaacaccaaggagggguccaacaucugccucacgcgcaccgaccggggcugguacugcgacaacgccggcagcgucuccuucuucccgcaggccgagaccugcaaggugcagagcaaccgcguguucugcgacaccaugaacucccugacgcugcccucugagguaaaccucugcaacgucgacaucuucaaccccaaguacgacugcaagaucaugaccuccaagacagacgugagcuccagcgugaucacaucccugggggccaucgucagcugcuacggcaagacuaaguguacugccagcaacaagaaccgggggaucaucaagaccuucuccaacggcugcgacuacgugagcaacaagggcguggacaccguguccgucgggaacacccuguacuacguuaauaagcaggagggcaagagccucuacgugaaaggggagcccaucauuaacuucuacgacccacugguuuuccccuccgacgaguucgacgcgagcaucucccaggugaacgagaagaucaaccagagccuggccuucauccgcaaguccgacgagcugcuccacaacgugaacgccggcaagagcacgaccaacaucaugaucaccaccaucaucaucgugaucaucgugauucugcugucccucaucgccguggggcugcugcuuuacugcaaggcccggugaggacuaguggaagcauuuuccuggcugauuaaaagaaauuacucagcuauggucaucuguuccuguuagaaggcuaugcagcauauuauauacuaugcgcauguuaugaaaugcauaauaaaaaauuuuaaaaaaucuaaaagaucuaaaaaaaaaaaaaaaaaaaaaaaaaaaaaaaaaaaaaaaaaaaaaaaaaaaaaaaaaaaaaaaaugcaucccccccccccccccccccccccccccccccaaaggcucuuuucagagccaccagaauu

SEQ ID NO: 1388 - RNA, 1951 nt, Artificial Sequence
  mRNA product Design c-5 comprising derived and/or modified sequence from HRSV(A2)__F-del_DSCav1 (opt1)
gggagagcggcucggccauuuugucccagucaguccggaggcugcggcugcagaaguaccgccugcggaguaacugcaaagaagcuuaccauggagcugcucauccugaaggccaacgccaucaccaccauccugacggcggugaccuucugcuucgccagcggccagaacaucaccgaggaguucuaccaguccacgugcagcgccgucuccaagggguaccucagcgcccugcggaccggcugguacaccuccgugaucaccaucgagcugagcaacaucaaggagaacaagugcaacgggaccgacgccaaggugaagcucaucaagcaggagcuggacaaguacaagaacgcggucacggagcugcagcuccugaugcaguccaccccggcaaccaacaaccgcgcccggcgcgagcugccccgguucaugaacuacacccucaacaacgccaagaagacgaacgugacccugagcaagaagcgcaagcggcgcuuccugggcuuccuccugggggugggcuccgccaucgcgagcggcgucgccgugugcaaggugcugcaccucgagggggaggucaacaagaucaagagcgcccugcuguccaccaacaaggccguggugagccucuccaacggcgucagcgugcugaccuucaaggugcuggaccucaagaacuacaucgacaagcagcugcugcccauccugaacaagcagagcugcuccaucagcaacaucgagacggugaucgaguuccagcagaagaacaaccggcuccuggagaucacccgcgaguucagcgugaacgccggggucaccacccccguguccacguacaugcugaccaacagcgagcuccugucccugaucaacgacaugccgaucaccaacgaccagaagaagcucaugagcaacaacgugcagaucguccggcagcaguccuacagcaucaugugcaucaucaaggaggaggugcuggcguacgugguccagcugccccucuacggcgugaucgacacccccugcuggaagcugcacacgagcccccugugcaccaccaacaccaaggagggguccaacaucugccucacgcgcaccgaccggggcugguacugcgacaacgccggcagcgucuccuucuucccgcaggccgagaccugcaaggugcagagcaaccgcguguucugcgacaccaugaacucccugacgcugcccagcgagguaaaccucugcaacgucgacaucuucaaccccaaguacgacugcaagaucaugaccuccaagaccgacgugagcuccagcgugaucaccucccugggggccaucgucagcugcuacggcaagacgaagugcaccgccagcaacaagaaccgggggaucaucaagaccuucuccaacggcugcgacuacgugagcaacaagggcguggacaccguguccgucgggaacacccuguacuacgugaacaagcaggagggcaagagccucuacgugaagggggagcccaucaucaacuucuacgacccgcuggucuuccccuccgacgaguucgacgcgagcaucucccaggugaacgagaagaucaaccagagccuggccuucauccgcaaguccgacgagcugcuccacaacgugaacgccggcaagagcacgaccaacaucaugaucaccaccaucaucaucgucaucaucgugauccugcugucccucaucgccguggggcugcugcucuacugcaaggcccggugaggacuagucccuguucccagagcccacuuuuuuuucuuuuuuugaaauaaaauagccugucuuucagaucuaaaaaaaaaaaaaaaaaaaaaaaaaaaaaaaaaaaaaaaaaaaaaaaaaaaaaaaaaaaaaaaaugcaucccccccccccccccccccccccccccccccaaaggcucuuuucagagccaccagaauu

SEQ ID NO: 1389 - RNA, 1951 nt, Artificial Sequence
  mRNA product Design c-5 comprising derived and/or modified sequence from HRSV(A2)__F-del_DSCav1 (opt1)
gggagagcggcucggccauuuugucccagucaguccggaggcugcggcugcagaaguaccgccugcggaguaacugcaaagaagcuuaccauggagcugcucauccugaaggccaacgccaucaccaccauccugacggcggugaccuucugcuucgccagcggccagaacaucaccgaggaguucuaccaguccacgugcagcgccgucuccaagggguaccucagcgcccugcgcaccggcugguacaccuccgugaucaccaucgagcugagcaacaucaaggagaacaagugcaacgggaccgacgccaaggugaagcucaucaagcaggagcuggacaaguacaagaacgcggucacggagcugcagcuccugaugcaguccacccccgccaccaacaaccgggcccgccgggagcugccgcgcuucaugaacuacacccucaacaacgccaagaagacgaacgugacccugagcaagaagcggaagcgccgguuccugggcuuccuccugggggugggcuccgcgaucgccagcggcgucgccgugugcaaggugcugcaccucgagggggaggucaacaagaucaaguccgcccugcugagcaccaacaaggccguggugucccucagcaacggcgucuccgugcugaccuucaaggugcuggaccucaagaacuacaucgacaagcagcugcugcccauccucaacaagcagagcugcuccaucagcaacaucgagacggucaucgaguuccagcagaagaacaaccgccugcuggagaucacccgggaguucuccgugaacgcgggggugaccacccccgucagcacguacaugcucaccaacagcgagcugcugucccucaucaacgacaugcccaucaccaacgaccagaagaagcugaugagcaacaacgugcagaucgugcgccagcaguccuacagcaucaugugcaucaucaaggaggagguccuggccuacguggugcagcucccgcuguacggcgucaucgacacccccugcuggaagcugcacacgagcccccucugcaccaccaacaccaaggaggggagcaacaucugccugacgcggaccgaccgcggcugguacugcgacaacgccggcuccgugagcuucuucccccaggccgagaccugcaagguccaguccaaccggguguucugcgacaccaugaacagccugacgcucccguccgaggugaaccugugcaacgucgacaucuucaaccccaaguacgacugcaagaucaugaccagcaagaccgacguguccagcuccgugaucaccagccugggggccaucgucuccugcuacggcaagacgaagugcaccgcgagcaacaagaaccgcgggaucaucaagaccuucuccaacggcugcgacuacgugagcaacaagggcguggacaccgucagcguggggaacacccucuacuacgugaacaagcaggagggcaagucccuguacgucaagggggagcccaucaucaacuucuacgacccccugguguucccgagcgacgaguucgacgccuccaucagccaggugaacgagaagaucaaccagucccucgccuucauccggaaguccgacgagcugcugcacaacgucaacgccggcaaguccacgaccaacaucaugaucaccaccaucaucaucgugaucaucgugauccugcucagccugaucgccgucgggcugcuccuguacugcaaggcgcgcugaggacuagucccuguucccagagcccacuuuuuuuucuuuuuuugaaauaaaauagccugucuuucagaucuaaaaaaaaaaaaaaaaaaaaaaaaaaaaaaaaaaaaaaaaaaaaaaaaaaaaaaaaaaaaaaaaugcaucccccccccccccccccccccccccccccccaaaggcucuuuucagagccaccagaauu

SEQ ID NO: 1390 - RNA, 1951 nt, Artificial Sequence
  mRNA product Design c-5 comprising derived and/or modified sequence from HRSV(A2)__F-del_DSCav1 (opt2)
gggagagcggcucggccauuuugucccagucaguccggaggcugcggcugcagaaguaccgccugcggaguaacugcaaagaagcuuaccauggagcuccucauccucaaggccaacgccaucaccaccauccucaccgccgucaccuucugcuucgccuccggccagaacaucaccgaggaguucuaccaguccaccugcuccgccgucuccaagggcuaccucuccgcccuccgcaccggcugguacaccuccgucaucaccaucgagcucuccaacaucaaggagaacaagugcaacggcaccgacgccaaggucaagcucaucaagcaggagcucgacaaguacaagaacgccgucaccgagcuccagcuccucaugcaguccacccccgccaccaacaaccgcgcccgccgcgagcucccccgcuucaugaacuacacccucaacaacgccaagaagaccaacgucacccucuccaagaagcgcaagcgccgcuuccucggcuuccuccucggcgucggcuccgccaucgccuccggcgucgccgucugcaagguccuccaccucgagggcgaggucaacaagaucaaguccgcccuccucuccaccaacaaggccgucgucucccucuccaacggcgucuccguccucaccuucaagguccucgaccucaagaacuacaucgacaagcagcuccuccccauccucaacaagcaguccugcuccaucuccaacaucgagaccgucaucgaguuccagcagaagaacaaccgccuccucgagaucacccgcgaguucuccgucaacgccggcgucaccacccccgucuccaccuacaugcucaccaacuccgagcuccucucccucaucaacgacaugcccaucaccaacgaccagaagaagcucauguccaacaacguccagaucguccgccagcaguccuacuccaucaugugcaucaucaaggaggagguccucgccuacgucguccagcucccccucuacggcgucaucgacacccccugcuggaagcuccacaccuccccccucugcaccaccaacaccaaggagggcuccaacaucugccucacccgcaccgaccgcggcugguacugcgacaacgccggcuccgucuccuucuucccccaggccgagaccugcaagguccaguccaaccgcgucuucugcgacaccaugaacucccucacccuccccuccgaggucaaccucugcaacgucgacaucuucaaccccaaguacgacugcaagaucaugaccuccaagaccgacgucuccuccuccgucaucaccucccucggcgccaucgucuccugcuacggcaagaccaagugcaccgccuccaacaagaaccgcggcaucaucaagaccuucuccaacggcugcgacuacgucuccaacaagggcgucgacaccgucuccgucggcaacacccucuacuacgucaacaagcaggagggcaagucccucuacgucaagggcgagcccaucaucaacuucuacgacccccucgucuuccccuccgacgaguucgacgccuccaucucccaggucaacgagaagaucaaccagucccucgccuucauccgcaaguccgacgagcuccuccacaacgucaacgccggcaaguccaccaccaacaucaugaucaccaccaucaucaucgucaucaucgucauccuccucucccucaucgccgucggccuccuccucuacugcaaggcccgcugaggacuagucccuguucccagagcccacuuuuuuuucuuuuuuugaaauaaaauagccugucuuucagaucuaaaaaaaaaaaaaaaaaaaaaaaaaaaaaaaaaaaaaaaaaaaaaaaaaaaaaaaaaaaaaaaaugcaucccccccccccccccccccccccccccccccaaaggcucuuuucagagccaccagaauu

SEQ ID NO: 1391 - RNA, 1951 nt, Artificial Sequence
  mRNA product Design c-5 comprising derived and/or modified sequence from HRSV(A2)__F-del_DSCav1 (opt3)
gggagagcggcucggccauuuugucccagucaguccggaggcugcggcugcagaaguaccgccugcggaguaacugcaaagaagcuuaccauggagcugcucauccuuaaggccaacgcuauuaccacaauacugacugcagugacguucugcuuugccagcggccagaauaucaccgaagaguucuaccaauccacauguucugcggucucaaaaggguauuugagugcuuuaagaacuggaugguacaccagcguuauuacaaucgaacuguccaacauuaaggagaauaaaugcaacgguaccgacgccaaggugaaacuaaucaagcaggaacucgauaaguauaaaaaugcaguaacugagcugcagcuucugaugcagucuacacccgccaccaacaauagggcucggcgcgaguugccucgauuuaugaacuacacgcucaauaacgcaaagaaaacuaaugugacccugucgaagaaacguaagagaagguuccugggcuuucucuuaggggucggaucagccauagcuagcggcguggccguuuguaaggugcugcaccuugaaggugaggucaacaaaaucaagagugcguugcuguccacaaauaaagcagugguaucucuaagcaacgggguuuccgugcucacuuucaagguccuggaccuuaaaaauuauauugauaagcaacuguugccaauccucaacaaacagucaugcaguauuagcaacaucgaaaccgugauagaguuucagcagaagaauaaccggcuguuagagauuacacgcgaguucucugugaaugccggagucaccacgccgguuuccacuuacaugcugacaaacucagaacuccuuagccugaucaaugacaugcccauuaccaacgaucaaaagaaauugaugaguaauaacgugcagaucguaagacagcagucuuauuccaucauguguauuauaaaggaagaggugcuagcuuacgucgugcaacugccucucuacggcguuaucgacacuccaugcuggaaacugcauacaagcccccuuuguaccacgaauaccaaggaaggcucgaacauuugccugacaaggacugaucgggggugguauugugacaaugccggaucuguguccuuuuucccucaggcagagaccugcaaaguccagucaaaccgcguguuuugugauacaaugaauaguuugacucucccaagcgagguaaaccugugcaauguugacaucuucaaccccaaguacgauugcaagauaaugaccuccaaaacagacgugucuagcucagucauuaccaguuuaggugcuaucguguccuguuauggcaagacuaaaugcacggccagcaacaagaaucgagggaucauuaaaacauuuucuaacggaugugauuacgucucaaauaagggcguggacaccguuaguguggguaacacucuguauuacguaaauaagcaagaagggaaaagccuauaugucaagggagagccuaucauuaacuucuacgacccacucguguucccguccgaugaauuugacgcgucuauaucgcagguuaaugagaaaaucaaccagagccuggccuucauuagaaaguccgaugaacuuuugcacaaugugaacgcaggcaaaucaaccacaaauaucaugaucaccacuauuauaaucgucauuaucgugauucugcucagucugaucgcuguaggccuucuguuguacugcaaggccaggugaggacuagucccuguucccagagcccacuuuuuuuucuuuuuuugaaauaaaauagccugucuuucagaucuaaaaaaaaaaaaaaaaaaaaaaaaaaaaaaaaaaaaaaaaaaaaaaaaaaaaaaaaaaaaaaaaugcaucccccccccccccccccccccccccccccccaaaggcucuuuucagagccaccagaauu

SEQ ID NO: 1392 - RNA, 1951 nt, Artificial Sequence
  mRNA product Design c-5 comprising derived and/or modified sequence from HRSV(A2)__F-del_DSCav1 (opt4)
gggagagcggcucggccauuuugucccagucaguccggaggcugcggcugcagaaguaccgccugcggaguaacugcaaagaagcuuaccauggagcugcugauccugaaggccaacgccaucaccaccauccugaccgccgugaccuucugcuucgccagcggccagaacaucaccgaggaguucuaccagagcaccugcagcgccgugagcaagggcuaccugagcgcccugagaaccggcugguacaccagcgugaucaccaucgagcugagcaacaucaaggagaacaagugcaacggcaccgacgccaaggugaagcugaucaagcaggagcuggacaaguacaagaacgccgugaccgagcugcagcugcugaugcagagcacccccgccaccaacaacagagccagaagagagcugcccagauucaugaacuacacccugaacaacgccaagaagaccaacgugacccugagcaagaagagaaagagaagauuccugggcuuccugcugggcgugggcagcgccaucgccagcggcguggccgugugcaaggugcugcaccuggagggcgaggugaacaagaucaagagcgcccugcugagcaccaacaaggccguggugagccugagcaacggcgugagcgugcugaccuucaaggugcuggaccugaagaacuacaucgacaagcagcugcugcccauccugaacaagcagagcugcagcaucagcaacaucgagaccgugaucgaguuccagcagaagaacaacagacugcuggagaucaccagagaguucagcgugaacgccggcgugaccacccccgugagcaccuacaugcugaccaacagcgagcugcugagccugaucaacgacaugcccaucaccaacgaccagaagaagcugaugagcaacaacgugcagaucgugagacagcagagcuacagcaucaugugcaucaucaaggaggaggugcuggccuacguggugcagcugccccuguacggcgugaucgacacccccugcuggaagcugcacaccagcccccugugcaccaccaacaccaaggagggcagcaacaucugccugaccagaaccgacagaggcugguacugcgacaacgccggcagcgugagcuucuucccccaggccgagaccugcaaggugcagagcaacagaguguucugcgacaccaugaacagccugacccugcccagcgaggugaaccugugcaacguggacaucuucaaccccaaguacgacugcaagaucaugaccagcaagaccgacgugagcagcagcgugaucaccagccugggcgccaucgugagcugcuacggcaagaccaagugcaccgccagcaacaagaacagaggcaucaucaagaccuucagcaacggcugcgacuacgugagcaacaagggcguggacaccgugagcgugggcaacacccuguacuacgugaacaagcaggagggcaagagccuguacgugaagggcgagcccaucaucaacuucuacgacccccugguguuccccagcgacgaguucgacgccagcaucagccaggugaacgagaagaucaaccagagccuggccuucaucagaaagagcgacgagcugcugcacaacgugaacgccggcaagagcaccaccaacaucaugaucaccaccaucaucaucgugaucaucgugauccugcugagccugaucgccgugggccugcugcuguacugcaaggccagaugaggacuagucccuguucccagagcccacuuuuuuuucuuuuuuugaaauaaaauagccugucuuucagaucuaaaaaaaaaaaaaaaaaaaaaaaaaaaaaaaaaaaaaaaaaaaaaaaaaaaaaaaaaaaaaaaaugcaucccccccccccccccccccccccccccccccaaaggcucuuuucagagccaccagaauu

SEQ ID NO: 1393 - RNA, 1951 nt, Artificial Sequence
  mRNA product Design c-5 comprising derived and/or modified sequence from HRSV(A2)__F-del_DSCav1 (opt5)
gggagagcggcucggccauuuugucccagucaguccggaggcugcggcugcagaaguaccgccugcggaguaacugcaaagaagcuuaccauggagcugcucauccugaaggccaacgcuauuaccacaauccuuacggccgugaccuucugcuuugcgagcggccagaauauuacagaagaguucuaccaauccaccuguucugcugucagcaaaggguaucuguccgcccucagaacaggaugguacaccucuguuaucacaauugaacugagcaacaucaaggagaauaaaugcaacggcaccgacgccaaggugaaacuuaucaagcaggaacuggauaaguauaaaaaugcugugacggagcuccagcugcugaugcaguccacccccgccacaaacaaucgggcucgcagagagcucccucgguuuaugaacuacacccugaauaacgccaagaaaacaaaugucacccuuucuaagaaacgcaagagacgguuccugggguuucuccugggagugggcagcgcgauugccuccgggguugcuguguguaagguccuucaccuggaaggagaggugaacaaaaucaagagcgcccuccugucuacgaauaaagcuguugugucccugagcaacggcgucucugugcucacauucaaggugcuggaccuuaaaaauuauauugauaagcaacugcucccgauccugaacaaacaguccugcagcauuucuaacaucgaaaccgucauugaguuucagcagaagaauaaccgccuucuggagaucacaagagaauuuuccguuaaugccggcgugaccacccccgugagcacauacaugcucacgaacuccgagcugcugucucucaucaaugacaugccuauuaccaacgaucaaaagaaacugaugagcaauaacguccagaucgugcggcagcaguccuauagcauuauguguaucauuaaggaagagguucuugcguacgugguccaacugccccucuacggggugaucgacacaccuugcuggaaacugcauaccucuccccuuuguacaaccaauacgaaggaaggauccaacaucugccugacacgcaccgauagaggcugguauugugacaaugccgggagcguuucuuucuucccucaggcugagaccugcaaagugcagagcaaccgggucuuuugugauacaaugaacucccucacccugccgucugaggugaaucugugcaaugucgacauuuucaaccccaaguacgauugcaagaucaugacaagcaaaacggacguguccagcucuguuauuaccucccucggagccaucgugagcuguuauggcaagacaaaaugcaccgcuucuaacaagaaucgcgggauuaucaaaacauuuuccaacggaugugauuacgucagcaauaagggcguggacaccguuuccgugggcaacacgcuguauuacgucaauaagcaagaagggaaaucucuuuaugugaagggagagccuaucauuaacuucuacgacccccugguguucccuagcgaugaauuugacgccuccaucucucagguuaaugagaaaauuaaccagagccucgccuucaucagaaaguccgaugaacugcugcacaaugucaacgcuggcaaaagcaccacaaauauuaugaucaccacaauuaucaucgugauuaucgugauucuucucucucugaucgcggucgggcugcuccuguacugcaaggcccggugaggacuagucccuguucccagagcccacuuuuuuuucuuuuuuugaaauaaaauagccugucuuucagaucuaaaaaaaaaaaaaaaaaaaaaaaaaaaaaaaaaaaaaaaaaaaaaaaaaaaaaaaaaaaaaaaaugcaucccccccccccccccccccccccccccccccaaaggcucuuuucagagccaccagaauu

SEQ ID NO: 1394 - RNA, 1951 nt, Artificial Sequence
  mRNA product Design c-5 comprising derived and/or modified sequence from HRSV(A2)__F-del_DSCav1 (opt6)
gggagagcggcucggccauuuugucccagucaguccggaggcugcggcugcagaaguaccgccugcggaguaacugcaaagaagcuuaccauggaacuauuaauauuaaaagcaaaugcuauuaccacaauacuuacugcuguaaccuucugcuuugccucuggccaaaacauaacagaagaauuuuaucaaucaacuugcuccgcuguaagcaaaggcuaccuaucagcauuacgcaccggcugguacacaucaguaauaacaauagaacuauccaacauaaaagaaaauaaaugcaacggaacagacgcaaaaguaaaauuaauaaaacaagaacucgacaaauacaaaaacgcaguaacagaauuacaacuacuaaugcaaaguacuccagccaccaacaacagagcaagaagagaauuaccacgauuuaugaacuacacacuaaacaaugcaaaaaaaacaaacguaacacuaucaaaaaaacguaaacgcagauucuuaggcuuccuccuagguguaggcucagcaaucgccucaggaguggcaguuuguaaaguacuacaccuagaaggagaaguaaacaaaaucaaaucugcccuuuuaucgacaaacaaagcaguaguaucguuauccaauggagucucaguauugacauucaaaguauuagaccuaaaaaauuauauagauaaacaacucuuaccuaucuuaaauaaacaaagcugcucaauaaguaacauagaaaccguaauagaauuucaacaaaaaaacaauagacuccuugagaucacucgagaauuuucaguaaacgcagguguaacaacaccaguaagcacauacaugcuaacaaauagugaacuauuaucucuaauuaacgauaugcccauaaccaacgaucaaaaaaaacucaugaguaacaacguacaaauaguaagacaacaauccuauagcauaaugugcauuauaaaagaagaaguacuagcauauguaguccaacuaccacuauacggcguaauagacacaccaugcuggaaacuacacaccucaccccuaugcacaacaaauacaaaagaaggaucaaacauaugcuuaaccaggacagacagaggcugguacugcgauaacgcaggaucuguuucauucuucccccaagcagaaacaugcaaaguacaaucaaacagaguauuuugugauaccaugaacucacucacauuaccauccgaagucaaccucugcaacguagacauauucaaccccaaauacgacugcaaaauaaugaccucaaaaacagauguaucaucaucaguaaucacaucacuaggagcuaucguaucuuguuauggaaaaacaaaaugcacagcauccaacaaaaacagaggaauuaucaaaacauucucaaauggaugugacuauguaucaaacaaaggaguagacaccguaagcguaggcaauacacuauauuacguaaauaaacaagaaggaaaaucacuauacguaaaaggugaaccaauaauaaacuucuaugacccccuaguauucccaucagaugaauuugacgcaagcauaucacaagucaacgaaaaaauaaaccaaucacuggcauucauucgcaaaucagaugaacuucuccacaacguaaacgcugguaaaagcacuacaaacauaaugauaacaacaaucaucauugucauaauaguuauucuauuaucacuaaucgcaguaggauuacuacuauacuguaaagcgagguaaggacuagucccuguucccagagcccacuuuuuuuucuuuuuuugaaauaaaauagccugucuuucagaucuaaaaaaaaaaaaaaaaaaaaaaaaaaaaaaaaaaaaaaaaaaaaaaaaaaaaaaaaaaaaaaaaugcaucccccccccccccccccccccccccccccccaaaggcucuuuucagagccaccagaauu

SEQ ID NO: 1395 - RNA, 1951 nt, Artificial Sequence
  mRNA product Design c-5 comprising derived and/or modified sequence from HRSV(A2)__F-del_DSCav1 (opt11)
gggagagcggcucggccauuuugucccagucaguccggaggcugcggcugcagaaguaccgccugcggaguaacugcaaagaagcuuaccauggagcugcucauccugaaggccaacgccaucaccacaauccugacggcggugaccuucugcuucgccagcggccagaacaucaccgaggaguucuaccaguccacgugcagcgccgucuccaagggguaccucagcgcccugcgaaccggcugguacaccuccgugaucaccaucgagcugucaaacaucaaggagaacaagugcaacgggaccgaugccaagguuaagcucaucaagcaggagcuggacaaguacaagaacgcggucacggagcugcagcuccugaugcaguccacuccggcaaccaacaaccgcgccaggcgcgagcugccccgguucaugaacuacacccucaacaacgccaagaagacgaaugugacccugagcaagaagcgcaagcggcgcuuccugggcuuccuccuaggggugggcuccgccaucgcgagcggcgucgccgugugcaagguguugcaccucgagggggaggucaacaagaucaagagcgcccugcuguccaccaacaaggccgugguaagccucuccaacggcgucagcguucugaccuucaaggugcuggaccucaagaacuauaucgacaagcagcugcugcccauccugaacaagcagagcugcuccaucucaaacaucgaaacggugauugaguuccagcagaagaacaaccggcuccuggaaaucacccgcgaguucagcgugaacgccggggucaccacccccguguccacguacaugcugaccaacagcgagcuccuaucccugaucaacgacaugccgaucaccaacgaccagaagaagcucaugagcaacaacgugcagaucguccggcagcaguccuacagcaucaugugcaucaucaaggaagaggugcuggcguacgugguccagcugccccucuacggcgugaucgacacccccugcuggaagcugcacacgagcccccugugcacaaccaacaccaaggagggguccaacaucugccucacgcgcaccgaccggggcugguacugcgacaacgccggcagcgucuccuucuucccgcaggccgagaccugcaaggugcagagcaaccgcguguucugcgacaccaugaacucccugacgcugcccucugagguaaaccucugcaacgucgacaucuucaaccccaaguacgacugcaagaucaugaccuccaagacagacgugagcuccagcgugaucacaucccugggggccaucgucagcugcuacggcaagacuaaguguacugccagcaacaagaaccgggggaucaucaagaccuucuccaacggcugcgacuacgugagcaacaagggcguggacaccguguccgucgggaacacccuguacuacguuaauaagcaggagggcaagagccucuacgugaaaggggagcccaucauuaacuucuacgacccacugguuuuccccuccgacgaguucgacgcgagcaucucccaggugaacgagaagaucaaccagagccuggccuucauccgcaaguccgacgagcugcuccacaacgugaacgccggcaagagcacgaccaacaucaugaucaccaccaucaucaucgugaucaucgugauucugcugucccucaucgccguggggcugcugcuuuacugcaaggcccggugaggacuagucccuguucccagagcccacuuuuuuuucuuuuuuugaaauaaaauagccugucuuucagaucuaaaaaaaaaaaaaaaaaaaaaaaaaaaaaaaaaaaaaaaaaaaaaaaaaaaaaaaaaaaaaaaaugcaucccccccccccccccccccccccccccccccaaaggcucuuuucagagccaccagaauu

SEQ ID NO: 1396 - RNA, 1960 nt, Artificial Sequence
  mRNA product Design d-1 comprising derived and/or modified sequence from HRSV(A2)__F-del_DSCav1 (opt1)
gggagacccgugacccggaaguuguacggcuacgcgacuuucccucccacaaacccucgcgcccuuccuuuccuacuugggcccggcagaaagcuuaccauggagcugcucauccugaaggccaacgccaucaccaccauccugacggcggugaccuucugcuucgccagcggccagaacaucaccgaggaguucuaccaguccacgugcagcgccgucuccaagggguaccucagcgcccugcggaccggcugguacaccuccgugaucaccaucgagcugagcaacaucaaggagaacaagugcaacgggaccgacgccaaggugaagcucaucaagcaggagcuggacaaguacaagaacgcggucacggagcugcagcuccugaugcaguccaccccggcaaccaacaaccgcgcccggcgcgagcugccccgguucaugaacuacacccucaacaacgccaagaagacgaacgugacccugagcaagaagcgcaagcggcgcuuccugggcuuccuccugggggugggcuccgccaucgcgagcggcgucgccgugugcaaggugcugcaccucgagggggaggucaacaagaucaagagcgcccugcuguccaccaacaaggccguggugagccucuccaacggcgucagcgugcugaccuucaaggugcuggaccucaagaacuacaucgacaagcagcugcugcccauccugaacaagcagagcugcuccaucagcaacaucgagacggugaucgaguuccagcagaagaacaaccggcuccuggagaucacccgcgaguucagcgugaacgccggggucaccacccccguguccacguacaugcugaccaacagcgagcuccugucccugaucaacgacaugccgaucaccaacgaccagaagaagcucaugagcaacaacgugcagaucguccggcagcaguccuacagcaucaugugcaucaucaaggaggaggugcuggcguacgugguccagcugccccucuacggcgugaucgacacccccugcuggaagcugcacacgagcccccugugcaccaccaacaccaaggagggguccaacaucugccucacgcgcaccgaccggggcugguacugcgacaacgccggcagcgucuccuucuucccgcaggccgagaccugcaaggugcagagcaaccgcguguucugcgacaccaugaacucccugacgcugcccagcgagguaaaccucugcaacgucgacaucuucaaccccaaguacgacugcaagaucaugaccuccaagaccgacgugagcuccagcgugaucaccucccugggggccaucgucagcugcuacggcaagacgaagugcaccgccagcaacaagaaccgggggaucaucaagaccuucuccaacggcugcgacuacgugagcaacaagggcguggacaccguguccgucgggaacacccuguacuacgugaacaagcaggagggcaagagccucuacgugaagggggagcccaucaucaacuucuacgacccgcuggucuuccccuccgacgaguucgacgcgagcaucucccaggugaacgagaagaucaaccagagccuggccuucauccgcaaguccgacgagcugcuccacaacgugaacgccggcaagagcacgaccaacaucaugaucaccaccaucaucaucgucaucaucgugauccugcugucccucaucgccguggggcugcugcucuacugcaaggcccggugaggacuagucccuguucccagagcccacuuuuuuuucuuuuuuugaaauaaaauagccugucuuucagaucuaaaaaaaaaaaaaaaaaaaaaaaaaaaaaaaaaaaaaaaaaaaaaaaaaaaaaaaaaaaaaaaaugcaucccccccccccccccccccccccccccccccaaaggcucuuuucagagccaccagaauu

SEQ ID NO: 1397 - RNA, 1960 nt, Artificial Sequence
  mRNA product Design d-1 comprising derived and/or modified sequence from HRSV(A2)__F-del_DSCav1 (opt1)
gggagacccgugacccggaaguuguacggcuacgcgacuuucccucccacaaacccucgcgcccuuccuuuccuacuugggcccggcagaaagcuuaccauggagcugcucauccugaaggccaacgccaucaccaccauccugacggcggugaccuucugcuucgccagcggccagaacaucaccgaggaguucuaccaguccacgugcagcgccgucuccaagggguaccucagcgcccugcgcaccggcugguacaccuccgugaucaccaucgagcugagcaacaucaaggagaacaagugcaacgggaccgacgccaaggugaagcucaucaagcaggagcuggacaaguacaagaacgcggucacggagcugcagcuccugaugcaguccacccccgccaccaacaaccgggcccgccgggagcugccgcgcuucaugaacuacacccucaacaacgccaagaagacgaacgugacccugagcaagaagcggaagcgccgguuccugggcuuccuccugggggugggcuccgcgaucgccagcggcgucgccgugugcaaggugcugcaccucgagggggaggucaacaagaucaaguccgcccugcugagcaccaacaaggccguggugucccucagcaacggcgucuccgugcugaccuucaaggugcuggaccucaagaacuacaucgacaagcagcugcugcccauccucaacaagcagagcugcuccaucagcaacaucgagacggucaucgaguuccagcagaagaacaaccgccugcuggagaucacccgggaguucuccgugaacgcgggggugaccacccccgucagcacguacaugcucaccaacagcgagcugcugucccucaucaacgacaugcccaucaccaacgaccagaagaagcugaugagcaacaacgugcagaucgugcgccagcaguccuacagcaucaugugcaucaucaaggaggagguccuggccuacguggugcagcucccgcuguacggcgucaucgacacccccugcuggaagcugcacacgagcccccucugcaccaccaacaccaaggaggggagcaacaucugccugacgcggaccgaccgcggcugguacugcgacaacgccggcuccgugagcuucuucccccaggccgagaccugcaagguccaguccaaccggguguucugcgacaccaugaacagccugacgcucccguccgaggugaaccugugcaacgucgacaucuucaaccccaaguacgacugcaagaucaugaccagcaagaccgacguguccagcuccgugaucaccagccugggggccaucgucuccugcuacggcaagacgaagugcaccgcgagcaacaagaaccgcgggaucaucaagaccuucuccaacggcugcgacuacgugagcaacaagggcguggacaccgucagcguggggaacacccucuacuacgugaacaagcaggagggcaagucccuguacgucaagggggagcccaucaucaacuucuacgacccccugguguucccgagcgacgaguucgacgccuccaucagccaggugaacgagaagaucaaccagucccucgccuucauccggaaguccgacgagcugcugcacaacgucaacgccggcaaguccacgaccaacaucaugaucaccaccaucaucaucgugaucaucgugauccugcucagccugaucgccgucgggcugcuccuguacugcaaggcgcgcugaggacuagucccuguucccagagcccacuuuuuuuucuuuuuuugaaauaaaauagccugucuuucagaucuaaaaaaaaaaaaaaaaaaaaaaaaaaaaaaaaaaaaaaaaaaaaaaaaaaaaaaaaaaaaaaaaugcaucccccccccccccccccccccccccccccccaaaggcucuuuucagagccaccagaauu

SEQ ID NO: 1398 - RNA, 1960 nt, Artificial Sequence
  mRNA product Design d-1 comprising derived and/or modified sequence from HRSV(A2)__F-del_DSCav1 (opt2)
gggagacccgugacccggaaguuguacggcuacgcgacuuucccucccacaaacccucgcgcccuuccuuuccuacuugggcccggcagaaagcuuaccauggagcuccucauccucaaggccaacgccaucaccaccauccucaccgccgucaccuucugcuucgccuccggccagaacaucaccgaggaguucuaccaguccaccugcuccgccgucuccaagggcuaccucuccgcccuccgcaccggcugguacaccuccgucaucaccaucgagcucuccaacaucaaggagaacaagugcaacggcaccgacgccaaggucaagcucaucaagcaggagcucgacaaguacaagaacgccgucaccgagcuccagcuccucaugcaguccacccccgccaccaacaaccgcgcccgccgcgagcucccccgcuucaugaacuacacccucaacaacgccaagaagaccaacgucacccucuccaagaagcgcaagcgccgcuuccucggcuuccuccucggcgucggcuccgccaucgccuccggcgucgccgucugcaagguccuccaccucgagggcgaggucaacaagaucaaguccgcccuccucuccaccaacaaggccgucgucucccucuccaacggcgucuccguccucaccuucaagguccucgaccucaagaacuacaucgacaagcagcuccuccccauccucaacaagcaguccugcuccaucuccaacaucgagaccgucaucgaguuccagcagaagaacaaccgccuccucgagaucacccgcgaguucuccgucaacgccggcgucaccacccccgucuccaccuacaugcucaccaacuccgagcuccucucccucaucaacgacaugcccaucaccaacgaccagaagaagcucauguccaacaacguccagaucguccgccagcaguccuacuccaucaugugcaucaucaaggaggagguccucgccuacgucguccagcucccccucuacggcgucaucgacacccccugcuggaagcuccacaccuccccccucugcaccaccaacaccaaggagggcuccaacaucugccucacccgcaccgaccgcggcugguacugcgacaacgccggcuccgucuccuucuucccccaggccgagaccugcaagguccaguccaaccgcgucuucugcgacaccaugaacucccucacccuccccuccgaggucaaccucugcaacgucgacaucuucaaccccaaguacgacugcaagaucaugaccuccaagaccgacgucuccuccuccgucaucaccucccucggcgccaucgucuccugcuacggcaagaccaagugcaccgccuccaacaagaaccgcggcaucaucaagaccuucuccaacggcugcgacuacgucuccaacaagggcgucgacaccgucuccgucggcaacacccucuacuacgucaacaagcaggagggcaagucccucuacgucaagggcgagcccaucaucaacuucuacgacccccucgucuuccccuccgacgaguucgacgccuccaucucccaggucaacgagaagaucaaccagucccucgccuucauccgcaaguccgacgagcuccuccacaacgucaacgccggcaaguccaccaccaacaucaugaucaccaccaucaucaucgucaucaucgucauccuccucucccucaucgccgucggccuccuccucuacugcaaggcccgcugaggacuagucccuguucccagagcccacuuuuuuuucuuuuuuugaaauaaaauagccugucuuucagaucuaaaaaaaaaaaaaaaaaaaaaaaaaaaaaaaaaaaaaaaaaaaaaaaaaaaaaaaaaaaaaaaaugcaucccccccccccccccccccccccccccccccaaaggcucuuuucagagccaccagaauu

SEQ ID NO: 1399 - RNA, 1960 nt, Artificial Sequence
  mRNA product Design d-1 comprising derived and/or modified sequence from HRSV(A2)__F-del_DSCav1 (opt3)
gggagacccgugacccggaaguuguacggcuacgcgacuuucccucccacaaacccucgcgcccuuccuuuccuacuugggcccggcagaaagcuuaccauggagcugcucauccuuaaggccaacgcuauuaccacaauacugacugcagugacguucugcuuugccagcggccagaauaucaccgaagaguucuaccaauccacauguucugcggucucaaaaggguauuugagugcuuuaagaacuggaugguacaccagcguuauuacaaucgaacuguccaacauuaaggagaauaaaugcaacgguaccgacgccaaggugaaacuaaucaagcaggaacucgauaaguauaaaaaugcaguaacugagcugcagcuucugaugcagucuacacccgccaccaacaauagggcucggcgcgaguugccucgauuuaugaacuacacgcucaauaacgcaaagaaaacuaaugugacccugucgaagaaacguaagagaagguuccugggcuuucucuuaggggucggaucagccauagcuagcggcguggccguuuguaaggugcugcaccuugaaggugaggucaacaaaaucaagagugcguugcuguccacaaauaaagcagugguaucucuaagcaacgggguuuccgugcucacuuucaagguccuggaccuuaaaaauuauauugauaagcaacuguugccaauccucaacaaacagucaugcaguauuagcaacaucgaaaccgugauagaguuucagcagaagaauaaccggcuguuagagauuacacgcgaguucucugugaaugccggagucaccacgccgguuuccacuuacaugcugacaaacucagaacuccuuagccugaucaaugacaugcccauuaccaacgaucaaaagaaauugaugaguaauaacgugcagaucguaagacagcagucuuauuccaucauguguauuauaaaggaagaggugcuagcuuacgucgugcaacugccucucuacggcguuaucgacacuccaugcuggaaacugcauacaagcccccuuuguaccacgaauaccaaggaaggcucgaacauuugccugacaaggacugaucgggggugguauugugacaaugccggaucuguguccuuuuucccucaggcagagaccugcaaaguccagucaaaccgcguguuuugugauacaaugaauaguuugacucucccaagcgagguaaaccugugcaauguugacaucuucaaccccaaguacgauugcaagauaaugaccuccaaaacagacgugucuagcucagucauuaccaguuuaggugcuaucguguccuguuauggcaagacuaaaugcacggccagcaacaagaaucgagggaucauuaaaacauuuucuaacggaugugauuacgucucaaauaagggcguggacaccguuaguguggguaacacucuguauuacguaaauaagcaagaagggaaaagccuauaugucaagggagagccuaucauuaacuucuacgacccacucguguucccguccgaugaauuugacgcgucuauaucgcagguuaaugagaaaaucaaccagagccuggccuucauuagaaaguccgaugaacuuuugcacaaugugaacgcaggcaaaucaaccacaaauaucaugaucaccacuauuauaaucgucauuaucgugauucugcucagucugaucgcuguaggccuucuguuguacugcaaggccaggugaggacuagucccuguucccagagcccacuuuuuuuucuuuuuuugaaauaaaauagccugucuuucagaucuaaaaaaaaaaaaaaaaaaaaaaaaaaaaaaaaaaaaaaaaaaaaaaaaaaaaaaaaaaaaaaaaugcaucccccccccccccccccccccccccccccccaaaggcucuuuucagagccaccagaauu

SEQ ID NO: 1400 - RNA, 1960 nt, Artificial Sequence
  mRNA product Design d-1 comprising derived and/or modified sequence from HRSV(A2)__F-del_DSCav1 (opt4)
gggagacccgugacccggaaguuguacggcuacgcgacuuucccucccacaaacccucgcgcccuuccuuuccuacuugggcccggcagaaagcuuaccauggagcugcugauccugaaggccaacgccaucaccaccauccugaccgccgugaccuucugcuucgccagcggccagaacaucaccgaggaguucuaccagagcaccugcagcgccgugagcaagggcuaccugagcgcccugagaaccggcugguacaccagcgugaucaccaucgagcugagcaacaucaaggagaacaagugcaacggcaccgacgccaaggugaagcugaucaagcaggagcuggacaaguacaagaacgccgugaccgagcugcagcugcugaugcagagcacccccgccaccaacaacagagccagaagagagcugcccagauucaugaacuacacccugaacaacgccaagaagaccaacgugacccugagcaagaagagaaagagaagauuccugggcuuccugcugggcgugggcagcgccaucgccagcggcguggccgugugcaaggugcugcaccuggagggcgaggugaacaagaucaagagcgcccugcugagcaccaacaaggccguggugagccugagcaacggcgugagcgugcugaccuucaaggugcuggaccugaagaacuacaucgacaagcagcugcugcccauccugaacaagcagagcugcagcaucagcaacaucgagaccgugaucgaguuccagcagaagaacaacagacugcuggagaucaccagagaguucagcgugaacgccggcgugaccacccccgugagcaccuacaugcugaccaacagcgagcugcugagccugaucaacgacaugcccaucaccaacgaccagaagaagcugaugagcaacaacgugcagaucgugagacagcagagcuacagcaucaugugcaucaucaaggaggaggugcuggccuacguggugcagcugccccuguacggcgugaucgacacccccugcuggaagcugcacaccagcccccugugcaccaccaacaccaaggagggcagcaacaucugccugaccagaaccgacagaggcugguacugcgacaacgccggcagcgugagcuucuucccccaggccgagaccugcaaggugcagagcaacagaguguucugcgacaccaugaacagccugacccugcccagcgaggugaaccugugcaacguggacaucuucaaccccaaguacgacugcaagaucaugaccagcaagaccgacgugagcagcagcgugaucaccagccugggcgccaucgugagcugcuacggcaagaccaagugcaccgccagcaacaagaacagaggcaucaucaagaccuucagcaacggcugcgacuacgugagcaacaagggcguggacaccgugagcgugggcaacacccuguacuacgugaacaagcaggagggcaagagccuguacgugaagggcgagcccaucaucaacuucuacgacccccugguguuccccagcgacgaguucgacgccagcaucagccaggugaacgagaagaucaaccagagccuggccuucaucagaaagagcgacgagcugcugcacaacgugaacgccggcaagagcaccaccaacaucaugaucaccaccaucaucaucgugaucaucgugauccugcugagccugaucgccgugggccugcugcuguacugcaaggccagaugaggacuagucccuguucccagagcccacuuuuuuuucuuuuuuugaaauaaaauagccugucuuucagaucuaaaaaaaaaaaaaaaaaaaaaaaaaaaaaaaaaaaaaaaaaaaaaaaaaaaaaaaaaaaaaaaaugcaucccccccccccccccccccccccccccccccaaaggcucuuuucagagccaccagaauu

SEQ ID NO: 1401 - RNA, 1960 nt, Artificial Sequence
  mRNA product Design d-1 comprising derived and/or modified sequence from HRSV(A2)__F-del_DSCav1 (opt5)
gggagacccgugacccggaaguuguacggcuacgcgacuuucccucccacaaacccucgcgcccuuccuuuccuacuugggcccggcagaaagcuuaccauggagcugcucauccugaaggccaacgcuauuaccacaauccuuacggccgugaccuucugcuuugcgagcggccagaauauuacagaagaguucuaccaauccaccuguucugcugucagcaaaggguaucuguccgcccucagaacaggaugguacaccucuguuaucacaauugaacugagcaacaucaaggagaauaaaugcaacggcaccgacgccaaggugaaacuuaucaagcaggaacuggauaaguauaaaaaugcugugacggagcuccagcugcugaugcaguccacccccgccacaaacaaucgggcucgcagagagcucccucgguuuaugaacuacacccugaauaacgccaagaaaacaaaugucacccuuucuaagaaacgcaagagacgguuccugggguuucuccugggagugggcagcgcgauugccuccgggguugcuguguguaagguccuucaccuggaaggagaggugaacaaaaucaagagcgcccuccugucuacgaauaaagcuguugugucccugagcaacggcgucucugugcucacauucaaggugcuggaccuuaaaaauuauauugauaagcaacugcucccgauccugaacaaacaguccugcagcauuucuaacaucgaaaccgucauugaguuucagcagaagaauaaccgccuucuggagaucacaagagaauuuuccguuaaugccggcgugaccacccccgugagcacauacaugcucacgaacuccgagcugcugucucucaucaaugacaugccuauuaccaacgaucaaaagaaacugaugagcaauaacguccagaucgugcggcagcaguccuauagcauuauguguaucauuaaggaagagguucuugcguacgugguccaacugccccucuacggggugaucgacacaccuugcuggaaacugcauaccucuccccuuuguacaaccaauacgaaggaaggauccaacaucugccugacacgcaccgauagaggcugguauugugacaaugccgggagcguuucuuucuucccucaggcugagaccugcaaagugcagagcaaccgggucuuuugugauacaaugaacucccucacccugccgucugaggugaaucugugcaaugucgacauuuucaaccccaaguacgauugcaagaucaugacaagcaaaacggacguguccagcucuguuauuaccucccucggagccaucgugagcuguuauggcaagacaaaaugcaccgcuucuaacaagaaucgcgggauuaucaaaacauuuuccaacggaugugauuacgucagcaauaagggcguggacaccguuuccgugggcaacacgcuguauuacgucaauaagcaagaagggaaaucucuuuaugugaagggagagccuaucauuaacuucuacgacccccugguguucccuagcgaugaauuugacgccuccaucucucagguuaaugagaaaauuaaccagagccucgccuucaucagaaaguccgaugaacugcugcacaaugucaacgcuggcaaaagcaccacaaauauuaugaucaccacaauuaucaucgugauuaucgugauucuucucucucugaucgcggucgggcugcuccuguacugcaaggcccggugaggacuagucccuguucccagagcccacuuuuuuuucuuuuuuugaaauaaaauagccugucuuucagaucuaaaaaaaaaaaaaaaaaaaaaaaaaaaaaaaaaaaaaaaaaaaaaaaaaaaaaaaaaaaaaaaaugcaucccccccccccccccccccccccccccccccaaaggcucuuuucagagccaccagaauu

SEQ ID NO: 1402 - RNA, 1960 nt, Artificial Sequence
  mRNA product Design d-1 comprising derived and/or modified sequence from HRSV(A2)__F-del_DSCav1 (opt6)
gggagacccgugacccggaaguuguacggcuacgcgacuuucccucccacaaacccucgcgcccuuccuuuccuacuugggcccggcagaaagcuuaccauggaacuauuaauauuaaaagcaaaugcuauuaccacaauacuuacugcuguaaccuucugcuuugccucuggccaaaacauaacagaagaauuuuaucaaucaacuugcuccgcuguaagcaaaggcuaccuaucagcauuacgcaccggcugguacacaucaguaauaacaauagaacuauccaacauaaaagaaaauaaaugcaacggaacagacgcaaaaguaaaauuaauaaaacaagaacucgacaaauacaaaaacgcaguaacagaauuacaacuacuaaugcaaaguacuccagccaccaacaacagagcaagaagagaauuaccacgauuuaugaacuacacacuaaacaaugcaaaaaaaacaaacguaacacuaucaaaaaaacguaaacgcagauucuuaggcuuccuccuagguguaggcucagcaaucgccucaggaguggcaguuuguaaaguacuacaccuagaaggagaaguaaacaaaaucaaaucugcccuuuuaucgacaaacaaagcaguaguaucguuauccaauggagucucaguauugacauucaaaguauuagaccuaaaaaauuauauagauaaacaacucuuaccuaucuuaaauaaacaaagcugcucaauaaguaacauagaaaccguaauagaauuucaacaaaaaaacaauagacuccuugagaucacucgagaauuuucaguaaacgcagguguaacaacaccaguaagcacauacaugcuaacaaauagugaacuauuaucucuaauuaacgauaugcccauaaccaacgaucaaaaaaaacucaugaguaacaacguacaaauaguaagacaacaauccuauagcauaaugugcauuauaaaagaagaaguacuagcauauguaguccaacuaccacuauacggcguaauagacacaccaugcuggaaacuacacaccucaccccuaugcacaacaaauacaaaagaaggaucaaacauaugcuuaaccaggacagacagaggcugguacugcgauaacgcaggaucuguuucauucuucccccaagcagaaacaugcaaaguacaaucaaacagaguauuuugugauaccaugaacucacucacauuaccauccgaagucaaccucugcaacguagacauauucaaccccaaauacgacugcaaaauaaugaccucaaaaacagauguaucaucaucaguaaucacaucacuaggagcuaucguaucuuguuauggaaaaacaaaaugcacagcauccaacaaaaacagaggaauuaucaaaacauucucaaauggaugugacuauguaucaaacaaaggaguagacaccguaagcguaggcaauacacuauauuacguaaauaaacaagaaggaaaaucacuauacguaaaaggugaaccaauaauaaacuucuaugacccccuaguauucccaucagaugaauuugacgcaagcauaucacaagucaacgaaaaaauaaaccaaucacuggcauucauucgcaaaucagaugaacuucuccacaacguaaacgcugguaaaagcacuacaaacauaaugauaacaacaaucaucauugucauaauaguuauucuauuaucacuaaucgcaguaggauuacuacuauacuguaaagcgagguaaggacuagucccuguucccagagcccacuuuuuuuucuuuuuuugaaauaaaauagccugucuuucagaucuaaaaaaaaaaaaaaaaaaaaaaaaaaaaaaaaaaaaaaaaaaaaaaaaaaaaaaaaaaaaaaaaugcaucccccccccccccccccccccccccccccccaaaggcucuuuucagagccaccagaauu

SEQ ID NO: 1403 - RNA, 1960 nt, Artificial Sequence
  mRNA product Design d-1 comprising derived and/or modified sequence from HRSV(A2)__F-del_DSCav1 (opt11)
gggagacccgugacccggaaguuguacggcuacgcgacuuucccucccacaaacccucgcgcccuuccuuuccuacuugggcccggcagaaagcuuaccauggagcugcucauccugaaggccaacgccaucaccacaauccugacggcggugaccuucugcuucgccagcggccagaacaucaccgaggaguucuaccaguccacgugcagcgccgucuccaagggguaccucagcgcccugcgaaccggcugguacaccuccgugaucaccaucgagcugucaaacaucaaggagaacaagugcaacgggaccgaugccaagguuaagcucaucaagcaggagcuggacaaguacaagaacgcggucacggagcugcagcuccugaugcaguccacuccggcaaccaacaaccgcgccaggcgcgagcugccccgguucaugaacuacacccucaacaacgccaagaagacgaaugugacccugagcaagaagcgcaagcggcgcuuccugggcuuccuccuaggggugggcuccgccaucgcgagcggcgucgccgugugcaagguguugcaccucgagggggaggucaacaagaucaagagcgcccugcuguccaccaacaaggccgugguaagccucuccaacggcgucagcguucugaccuucaaggugcuggaccucaagaacuauaucgacaagcagcugcugcccauccugaacaagcagagcugcuccaucucaaacaucgaaacggugauugaguuccagcagaagaacaaccggcuccuggaaaucacccgcgaguucagcgugaacgccggggucaccacccccguguccacguacaugcugaccaacagcgagcuccuaucccugaucaacgacaugccgaucaccaacgaccagaagaagcucaugagcaacaacgugcagaucguccggcagcaguccuacagcaucaugugcaucaucaaggaagaggugcuggcguacgugguccagcugccccucuacggcgugaucgacacccccugcuggaagcugcacacgagcccccugugcacaaccaacaccaaggagggguccaacaucugccucacgcgcaccgaccggggcugguacugcgacaacgccggcagcgucuccuucuucccgcaggccgagaccugcaaggugcagagcaaccgcguguucugcgacaccaugaacucccugacgcugcccucugagguaaaccucugcaacgucgacaucuucaaccccaaguacgacugcaagaucaugaccuccaagacagacgugagcuccagcgugaucacaucccugggggccaucgucagcugcuacggcaagacuaaguguacugccagcaacaagaaccgggggaucaucaagaccuucuccaacggcugcgacuacgugagcaacaagggcguggacaccguguccgucgggaacacccuguacuacguuaauaagcaggagggcaagagccucuacgugaaaggggagcccaucauuaacuucuacgacccacugguuuuccccuccgacgaguucgacgcgagcaucucccaggugaacgagaagaucaaccagagccuggccuucauccgcaaguccgacgagcugcuccacaacgugaacgccggcaagagcacgaccaacaucaugaucaccaccaucaucaucgugaucaucgugauucugcugucccucaucgccguggggcugcugcuuuacugcaaggcccggugaggacuagucccuguucccagagcccacuuuuuuuucuuuuuuugaaauaaaauagccugucuuucagaucuaaaaaaaaaaaaaaaaaaaaaaaaaaaaaaaaaaaaaaaaaaaaaaaaaaaaaaaaaaaaaaaaugcaucccccccccccccccccccccccccccccccaaaggcucuuuucagagccaccagaauu

SEQ ID NO: 1404 - RNA, 2015 nt, Artificial Sequence
  mRNA product Design d-2 comprising derived and/or modified sequence from HRSV(A2)__F-del_DSCav1 (opt1)
gggagagcggcucggccauuuugucccagucaguccggaggcugcggcugcagaaguaccgccugcggaguaacugcaaagaagcuuaccauggagcugcucauccugaaggccaacgccaucaccaccauccugacggcggugaccuucugcuucgccagcggccagaacaucaccgaggaguucuaccaguccacgugcagcgccgucuccaagggguaccucagcgcccugcggaccggcugguacaccuccgugaucaccaucgagcugagcaacaucaaggagaacaagugcaacgggaccgacgccaaggugaagcucaucaagcaggagcuggacaaguacaagaacgcggucacggagcugcagcuccugaugcaguccaccccggcaaccaacaaccgcgcccggcgcgagcugccccgguucaugaacuacacccucaacaacgccaagaagacgaacgugacccugagcaagaagcgcaagcggcgcuuccugggcuuccuccugggggugggcuccgccaucgcgagcggcgucgccgugugcaaggugcugcaccucgagggggaggucaacaagaucaagagcgcccugcuguccaccaacaaggccguggugagccucuccaacggcgucagcgugcugaccuucaaggugcuggaccucaagaacuacaucgacaagcagcugcugcccauccugaacaagcagagcugcuccaucagcaacaucgagacggugaucgaguuccagcagaagaacaaccggcuccuggagaucacccgcgaguucagcgugaacgccggggucaccacccccguguccacguacaugcugaccaacagcgagcuccugucccugaucaacgacaugccgaucaccaacgaccagaagaagcucaugagcaacaacgugcagaucguccggcagcaguccuacagcaucaugugcaucaucaaggaggaggugcuggcguacgugguccagcugccccucuacggcgugaucgacacccccugcuggaagcugcacacgagcccccugugcaccaccaacaccaaggagggguccaacaucugccucacgcgcaccgaccggggcugguacugcgacaacgccggcagcgucuccuucuucccgcaggccgagaccugcaaggugcagagcaaccgcguguucugcgacaccaugaacucccugacgcugcccagcgagguaaaccucugcaacgucgacaucuucaaccccaaguacgacugcaagaucaugaccuccaagaccgacgugagcuccagcgugaucaccucccugggggccaucgucagcugcuacggcaagacgaagugcaccgccagcaacaagaaccgggggaucaucaagaccuucuccaacggcugcgacuacgugagcaacaagggcguggacaccguguccgucgggaacacccuguacuacgugaacaagcaggagggcaagagccucuacgugaagggggagcccaucaucaacuucuacgacccgcuggucuuccccuccgacgaguucgacgcgagcaucucccaggugaacgagaagaucaaccagagccuggccuucauccgcaaguccgacgagcugcuccacaacgugaacgccggcaagagcacgaccaacaucaugaucaccaccaucaucaucgucaucaucgugauccugcugucccucaucgccguggggcugcugcucuacugcaaggcccggugaggacuaguaauaaggaaacuguaugaaugucugugggcaggaagugaagagauccuucuguaaagguuuuuggaauuaugucugcugaauaauaaacuuuuuugaaauaauaaaucugguagaaaaaugagaucuaaaaaaaaaaaaaaaaaaaaaaaaaaaaaaaaaaaaaaaaaaaaaaaaaaaaaaaaaaaaaaaaugcaucccccccccccccccccccccccccccccccaaaggcucuuuucagagccaccagaauu

SEQ ID NO: 1405 - RNA, 2015 nt, Artificial Sequence
  mRNA product Design d-2 comprising derived and/or modified sequence from HRSV(A2)__F-del_DSCav1 (opt1)
gggagagcggcucggccauuuugucccagucaguccggaggcugcggcugcagaaguaccgccugcggaguaacugcaaagaagcuuaccauggagcugcucauccugaaggccaacgccaucaccaccauccugacggcggugaccuucugcuucgccagcggccagaacaucaccgaggaguucuaccaguccacgugcagcgccgucuccaagggguaccucagcgcccugcgcaccggcugguacaccuccgugaucaccaucgagcugagcaacaucaaggagaacaagugcaacgggaccgacgccaaggugaagcucaucaagcaggagcuggacaaguacaagaacgcggucacggagcugcagcuccugaugcaguccacccccgccaccaacaaccgggcccgccgggagcugccgcgcuucaugaacuacacccucaacaacgccaagaagacgaacgugacccugagcaagaagcggaagcgccgguuccugggcuuccuccugggggugggcuccgcgaucgccagcggcgucgccgugugcaaggugcugcaccucgagggggaggucaacaagaucaaguccgcccugcugagcaccaacaaggccguggugucccucagcaacggcgucuccgugcugaccuucaaggugcuggaccucaagaacuacaucgacaagcagcugcugcccauccucaacaagcagagcugcuccaucagcaacaucgagacggucaucgaguuccagcagaagaacaaccgccugcuggagaucacccgggaguucuccgugaacgcgggggugaccacccccgucagcacguacaugcucaccaacagcgagcugcugucccucaucaacgacaugcccaucaccaacgaccagaagaagcugaugagcaacaacgugcagaucgugcgccagcaguccuacagcaucaugugcaucaucaaggaggagguccuggccuacguggugcagcucccgcuguacggcgucaucgacacccccugcuggaagcugcacacgagcccccucugcaccaccaacaccaaggaggggagcaacaucugccugacgcggaccgaccgcggcugguacugcgacaacgccggcuccgugagcuucuucccccaggccgagaccugcaagguccaguccaaccggguguucugcgacaccaugaacagccugacgcucccguccgaggugaaccugugcaacgucgacaucuucaaccccaaguacgacugcaagaucaugaccagcaagaccgacguguccagcuccgugaucaccagccugggggccaucgucuccugcuacggcaagacgaagugcaccgcgagcaacaagaaccgcgggaucaucaagaccuucuccaacggcugcgacuacgugagcaacaagggcguggacaccgucagcguggggaacacccucuacuacgugaacaagcaggagggcaagucccuguacgucaagggggagcccaucaucaacuucuacgacccccugguguucccgagcgacgaguucgacgccuccaucagccaggugaacgagaagaucaaccagucccucgccuucauccggaaguccgacgagcugcugcacaacgucaacgccggcaaguccacgaccaacaucaugaucaccaccaucaucaucgugaucaucgugauccugcucagccugaucgccgucgggcugcuccuguacugcaaggcgcgcugaggacuaguaauaaggaaacuguaugaaugucugugggcaggaagugaagagauccuucuguaaagguuuuuggaauuaugucugcugaauaauaaacuuuuuugaaauaauaaaucugguagaaaaaugagaucuaaaaaaaaaaaaaaaaaaaaaaaaaaaaaaaaaaaaaaaaaaaaaaaaaaaaaaaaaaaaaaaaugcaucccccccccccccccccccccccccccccccaaaggcucuuuucagagccaccagaauu

SEQ ID NO: 1406 - RNA, 2015 nt, Artificial Sequence
  mRNA product Design d-2 comprising derived and/or modified sequence from HRSV(A2)__F-del_DSCav1 (opt2)
gggagagcggcucggccauuuugucccagucaguccggaggcugcggcugcagaaguaccgccugcggaguaacugcaaagaagcuuaccauggagcuccucauccucaaggccaacgccaucaccaccauccucaccgccgucaccuucugcuucgccuccggccagaacaucaccgaggaguucuaccaguccaccugcuccgccgucuccaagggcuaccucuccgcccuccgcaccggcugguacaccuccgucaucaccaucgagcucuccaacaucaaggagaacaagugcaacggcaccgacgccaaggucaagcucaucaagcaggagcucgacaaguacaagaacgccgucaccgagcuccagcuccucaugcaguccacccccgccaccaacaaccgcgcccgccgcgagcucccccgcuucaugaacuacacccucaacaacgccaagaagaccaacgucacccucuccaagaagcgcaagcgccgcuuccucggcuuccuccucggcgucggcuccgccaucgccuccggcgucgccgucugcaagguccuccaccucgagggcgaggucaacaagaucaaguccgcccuccucuccaccaacaaggccgucgucucccucuccaacggcgucuccguccucaccuucaagguccucgaccucaagaacuacaucgacaagcagcuccuccccauccucaacaagcaguccugcuccaucuccaacaucgagaccgucaucgaguuccagcagaagaacaaccgccuccucgagaucacccgcgaguucuccgucaacgccggcgucaccacccccgucuccaccuacaugcucaccaacuccgagcuccucucccucaucaacgacaugcccaucaccaacgaccagaagaagcucauguccaacaacguccagaucguccgccagcaguccuacuccaucaugugcaucaucaaggaggagguccucgccuacgucguccagcucccccucuacggcgucaucgacacccccugcuggaagcuccacaccuccccccucugcaccaccaacaccaaggagggcuccaacaucugccucacccgcaccgaccgcggcugguacugcgacaacgccggcuccgucuccuucuucccccaggccgagaccugcaagguccaguccaaccgcgucuucugcgacaccaugaacucccucacccuccccuccgaggucaaccucugcaacgucgacaucuucaaccccaaguacgacugcaagaucaugaccuccaagaccgacgucuccuccuccgucaucaccucccucggcgccaucgucuccugcuacggcaagaccaagugcaccgccuccaacaagaaccgcggcaucaucaagaccuucuccaacggcugcgacuacgucuccaacaagggcgucgacaccgucuccgucggcaacacccucuacuacgucaacaagcaggagggcaagucccucuacgucaagggcgagcccaucaucaacuucuacgacccccucgucuuccccuccgacgaguucgacgccuccaucucccaggucaacgagaagaucaaccagucccucgccuucauccgcaaguccgacgagcuccuccacaacgucaacgccggcaaguccaccaccaacaucaugaucaccaccaucaucaucgucaucaucgucauccuccucucccucaucgccgucggccuccuccucuacugcaaggcccgcugaggacuaguaauaaggaaacuguaugaaugucugugggcaggaagugaagagauccuucuguaaagguuuuuggaauuaugucugcugaauaauaaacuuuuuugaaauaauaaaucugguagaaaaaugagaucuaaaaaaaaaaaaaaaaaaaaaaaaaaaaaaaaaaaaaaaaaaaaaaaaaaaaaaaaaaaaaaaaugcaucccccccccccccccccccccccccccccccaaaggcucuuuucagagccaccagaauu

SEQ ID NO: 1407 - RNA, 2015 nt, Artificial Sequence
  mRNA product Design d-2 comprising derived and/or modified sequence from HRSV(A2)__F-del_DSCav1 (opt3)
gggagagcggcucggccauuuugucccagucaguccggaggcugcggcugcagaaguaccgccugcggaguaacugcaaagaagcuuaccauggagcugcucauccuuaaggccaacgcuauuaccacaauacugacugcagugacguucugcuuugccagcggccagaauaucaccgaagaguucuaccaauccacauguucugcggucucaaaaggguauuugagugcuuuaagaacuggaugguacaccagcguuauuacaaucgaacuguccaacauuaaggagaauaaaugcaacgguaccgacgccaaggugaaacuaaucaagcaggaacucgauaaguauaaaaaugcaguaacugagcugcagcuucugaugcagucuacacccgccaccaacaauagggcucggcgcgaguugccucgauuuaugaacuacacgcucaauaacgcaaagaaaacuaaugugacccugucgaagaaacguaagagaagguuccugggcuuucucuuaggggucggaucagccauagcuagcggcguggccguuuguaaggugcugcaccuugaaggugaggucaacaaaaucaagagugcguugcuguccacaaauaaagcagugguaucucuaagcaacgggguuuccgugcucacuuucaagguccuggaccuuaaaaauuauauugauaagcaacuguugccaauccucaacaaacagucaugcaguauuagcaacaucgaaaccgugauagaguuucagcagaagaauaaccggcuguuagagauuacacgcgaguucucugugaaugccggagucaccacgccgguuuccacuuacaugcugacaaacucagaacuccuuagccugaucaaugacaugcccauuaccaacgaucaaaagaaauugaugaguaauaacgugcagaucguaagacagcagucuuauuccaucauguguauuauaaaggaagaggugcuagcuuacgucgugcaacugccucucuacggcguuaucgacacuccaugcuggaaacugcauacaagcccccuuuguaccacgaauaccaaggaaggcucgaacauuugccugacaaggacugaucgggggugguauugugacaaugccggaucuguguccuuuuucccucaggcagagaccugcaaaguccagucaaaccgcguguuuugugauacaaugaauaguuugacucucccaagcgagguaaaccugugcaauguugacaucuucaaccccaaguacgauugcaagauaaugaccuccaaaacagacgugucuagcucagucauuaccaguuuaggugcuaucguguccuguuauggcaagacuaaaugcacggccagcaacaagaaucgagggaucauuaaaacauuuucuaacggaugugauuacgucucaaauaagggcguggacaccguuaguguggguaacacucuguauuacguaaauaagcaagaagggaaaagccuauaugucaagggagagccuaucauuaacuucuacgacccacucguguucccguccgaugaauuugacgcgucuauaucgcagguuaaugagaaaaucaaccagagccuggccuucauuagaaaguccgaugaacuuuugcacaaugugaacgcaggcaaaucaaccacaaauaucaugaucaccacuauuauaaucgucauuaucgugauucugcucagucugaucgcuguaggccuucuguuguacugcaaggccaggugaggacuaguaauaaggaaacuguaugaaugucugugggcaggaagugaagagauccuucuguaaagguuuuuggaauuaugucugcugaauaauaaacuuuuuugaaauaauaaaucugguagaaaaaugagaucuaaaaaaaaaaaaaaaaaaaaaaaaaaaaaaaaaaaaaaaaaaaaaaaaaaaaaaaaaaaaaaaaugcaucccccccccccccccccccccccccccccccaaaggcucuuuucagagccaccagaauu

SEQ ID NO: 1408 - RNA, 2015 nt, Artificial Sequence
  mRNA product Design d-2 comprising derived and/or modified sequence from HRSV(A2)__F-del_DSCav1 (opt4)
gggagagcggcucggccauuuugucccagucaguccggaggcugcggcugcagaaguaccgccugcggaguaacugcaaagaagcuuaccauggagcugcugauccugaaggccaacgccaucaccaccauccugaccgccgugaccuucugcuucgccagcggccagaacaucaccgaggaguucuaccagagcaccugcagcgccgugagcaagggcuaccugagcgcccugagaaccggcugguacaccagcgugaucaccaucgagcugagcaacaucaaggagaacaagugcaacggcaccgacgccaaggugaagcugaucaagcaggagcuggacaaguacaagaacgccgugaccgagcugcagcugcugaugcagagcacccccgccaccaacaacagagccagaagagagcugcccagauucaugaacuacacccugaacaacgccaagaagaccaacgugacccugagcaagaagagaaagagaagauuccugggcuuccugcugggcgugggcagcgccaucgccagcggcguggccgugugcaaggugcugcaccuggagggcgaggugaacaagaucaagagcgcccugcugagcaccaacaaggccguggugagccugagcaacggcgugagcgugcugaccuucaaggugcuggaccugaagaacuacaucgacaagcagcugcugcccauccugaacaagcagagcugcagcaucagcaacaucgagaccgugaucgaguuccagcagaagaacaacagacugcuggagaucaccagagaguucagcgugaacgccggcgugaccacccccgugagcaccuacaugcugaccaacagcgagcugcugagccugaucaacgacaugcccaucaccaacgaccagaagaagcugaugagcaacaacgugcagaucgugagacagcagagcuacagcaucaugugcaucaucaaggaggaggugcuggccuacguggugcagcugccccuguacggcgugaucgacacccccugcuggaagcugcacaccagcccccugugcaccaccaacaccaaggagggcagcaacaucugccugaccagaaccgacagaggcugguacugcgacaacgccggcagcgugagcuucuucccccaggccgagaccugcaaggugcagagcaacagaguguucugcgacaccaugaacagccugacccugcccagcgaggugaaccugugcaacguggacaucuucaaccccaaguacgacugcaagaucaugaccagcaagaccgacgugagcagcagcgugaucaccagccugggcgccaucgugagcugcuacggcaagaccaagugcaccgccagcaacaagaacagaggcaucaucaagaccuucagcaacggcugcgacuacgugagcaacaagggcguggacaccgugagcgugggcaacacccuguacuacgugaacaagcaggagggcaagagccuguacgugaagggcgagcccaucaucaacuucuacgacccccugguguuccccagcgacgaguucgacgccagcaucagccaggugaacgagaagaucaaccagagccuggccuucaucagaaagagcgacgagcugcugcacaacgugaacgccggcaagagcaccaccaacaucaugaucaccaccaucaucaucgugaucaucgugauccugcugagccugaucgccgugggccugcugcuguacugcaaggccagaugaggacuaguaauaaggaaacuguaugaaugucugugggcaggaagugaagagauccuucuguaaagguuuuuggaauuaugucugcugaauaauaaacuuuuuugaaauaauaaaucugguagaaaaaugagaucuaaaaaaaaaaaaaaaaaaaaaaaaaaaaaaaaaaaaaaaaaaaaaaaaaaaaaaaaaaaaaaaaugcaucccccccccccccccccccccccccccccccaaaggcucuuuucagagccaccagaauu

SEQ ID NO: 1409 - RNA, 2015 nt, Artificial Sequence
  mRNA product Design d-2 comprising derived and/or modified sequence from HRSV(A2)__F-del_DSCav1 (opt5)
gggagagcggcucggccauuuugucccagucaguccggaggcugcggcugcagaaguaccgccugcggaguaacugcaaagaagcuuaccauggagcugcucauccugaaggccaacgcuauuaccacaauccuuacggccgugaccuucugcuuugcgagcggccagaauauuacagaagaguucuaccaauccaccuguucugcugucagcaaaggguaucuguccgcccucagaacaggaugguacaccucuguuaucacaauugaacugagcaacaucaaggagaauaaaugcaacggcaccgacgccaaggugaaacuuaucaagcaggaacuggauaaguauaaaaaugcugugacggagcuccagcugcugaugcaguccacccccgccacaaacaaucgggcucgcagagagcucccucgguuuaugaacuacacccugaauaacgccaagaaaacaaaugucacccuuucuaagaaacgcaagagacgguuccugggguuucuccugggagugggcagcgcgauugccuccgggguugcuguguguaagguccuucaccuggaaggagaggugaacaaaaucaagagcgcccuccugucuacgaauaaagcuguugugucccugagcaacggcgucucugugcucacauucaaggugcuggaccuuaaaaauuauauugauaagcaacugcucccgauccugaacaaacaguccugcagcauuucuaacaucgaaaccgucauugaguuucagcagaagaauaaccgccuucuggagaucacaagagaauuuuccguuaaugccggcgugaccacccccgugagcacauacaugcucacgaacuccgagcugcugucucucaucaaugacaugccuauuaccaacgaucaaaagaaacugaugagcaauaacguccagaucgugcggcagcaguccuauagcauuauguguaucauuaaggaagagguucuugcguacgugguccaacugccccucuacggggugaucgacacaccuugcuggaaacugcauaccucuccccuuuguacaaccaauacgaaggaaggauccaacaucugccugacacgcaccgauagaggcugguauugugacaaugccgggagcguuucuuucuucccucaggcugagaccugcaaagugcagagcaaccgggucuuuugugauacaaugaacucccucacccugccgucugaggugaaucugugcaaugucgacauuuucaaccccaaguacgauugcaagaucaugacaagcaaaacggacguguccagcucuguuauuaccucccucggagccaucgugagcuguuauggcaagacaaaaugcaccgcuucuaacaagaaucgcgggauuaucaaaacauuuuccaacggaugugauuacgucagcaauaagggcguggacaccguuuccgugggcaacacgcuguauuacgucaauaagcaagaagggaaaucucuuuaugugaagggagagccuaucauuaacuucuacgacccccugguguucccuagcgaugaauuugacgccuccaucucucagguuaaugagaaaauuaaccagagccucgccuucaucagaaaguccgaugaacugcugcacaaugucaacgcuggcaaaagcaccacaaauauuaugaucaccacaauuaucaucgugauuaucgugauucuucucucucugaucgcggucgggcugcuccuguacugcaaggcccggugaggacuaguaauaaggaaacuguaugaaugucugugggcaggaagugaagagauccuucuguaaagguuuuuggaauuaugucugcugaauaauaaacuuuuuugaaauaauaaaucugguagaaaaaugagaucuaaaaaaaaaaaaaaaaaaaaaaaaaaaaaaaaaaaaaaaaaaaaaaaaaaaaaaaaaaaaaaaaugcaucccccccccccccccccccccccccccccccaaaggcucuuuucagagccaccagaauu

SEQ ID NO: 1410 - RNA, 2015 nt, Artificial Sequence
  mRNA product Design d-2 comprising derived and/or modified sequence from HRSV(A2)__F-del_DSCav1 (opt6)
gggagagcggcucggccauuuugucccagucaguccggaggcugcggcugcagaaguaccgccugcggaguaacugcaaagaagcuuaccauggaacuauuaauauuaaaagcaaaugcuauuaccacaauacuuacugcuguaaccuucugcuuugccucuggccaaaacauaacagaagaauuuuaucaaucaacuugcuccgcuguaagcaaaggcuaccuaucagcauuacgcaccggcugguacacaucaguaauaacaauagaacuauccaacauaaaagaaaauaaaugcaacggaacagacgcaaaaguaaaauuaauaaaacaagaacucgacaaauacaaaaacgcaguaacagaauuacaacuacuaaugcaaaguacuccagccaccaacaacagagcaagaagagaauuaccacgauuuaugaacuacacacuaaacaaugcaaaaaaaacaaacguaacacuaucaaaaaaacguaaacgcagauucuuaggcuuccuccuagguguaggcucagcaaucgccucaggaguggcaguuuguaaaguacuacaccuagaaggagaaguaaacaaaaucaaaucugcccuuuuaucgacaaacaaagcaguaguaucguuauccaauggagucucaguauugacauucaaaguauuagaccuaaaaaauuauauagauaaacaacucuuaccuaucuuaaauaaacaaagcugcucaauaaguaacauagaaaccguaauagaauuucaacaaaaaaacaauagacuccuugagaucacucgagaauuuucaguaaacgcagguguaacaacaccaguaagcacauacaugcuaacaaauagugaacuauuaucucuaauuaacgauaugcccauaaccaacgaucaaaaaaaacucaugaguaacaacguacaaauaguaagacaacaauccuauagcauaaugugcauuauaaaagaagaaguacuagcauauguaguccaacuaccacuauacggcguaauagacacaccaugcuggaaacuacacaccucaccccuaugcacaacaaauacaaaagaaggaucaaacauaugcuuaaccaggacagacagaggcugguacugcgauaacgcaggaucuguuucauucuucccccaagcagaaacaugcaaaguacaaucaaacagaguauuuugugauaccaugaacucacucacauuaccauccgaagucaaccucugcaacguagacauauucaaccccaaauacgacugcaaaauaaugaccucaaaaacagauguaucaucaucaguaaucacaucacuaggagcuaucguaucuuguuauggaaaaacaaaaugcacagcauccaacaaaaacagaggaauuaucaaaacauucucaaauggaugugacuauguaucaaacaaaggaguagacaccguaagcguaggcaauacacuauauuacguaaauaaacaagaaggaaaaucacuauacguaaaaggugaaccaauaauaaacuucuaugacccccuaguauucccaucagaugaauuugacgcaagcauaucacaagucaacgaaaaaauaaaccaaucacuggcauucauucgcaaaucagaugaacuucuccacaacguaaacgcugguaaaagcacuacaaacauaaugauaacaacaaucaucauugucauaauaguuauucuauuaucacuaaucgcaguaggauuacuacuauacuguaaagcgagguaaggacuaguaauaaggaaacuguaugaaugucugugggcaggaagugaagagauccuucuguaaagguuuuuggaauuaugucugcugaauaauaaacuuuuuugaaauaauaaaucugguagaaaaaugagaucuaaaaaaaaaaaaaaaaaaaaaaaaaaaaaaaaaaaaaaaaaaaaaaaaaaaaaaaaaaaaaaaaugcaucccccccccccccccccccccccccccccccaaaggcucuuuucagagccaccagaauu

SEQ ID NO: 1411 - RNA, 2015 nt, Artificial Sequence
  mRNA product Design d-2 comprising derived and/or modified sequence from HRSV(A2)__F-del_DSCav1 (opt11)
gggagagcggcucggccauuuugucccagucaguccggaggcugcggcugcagaaguaccgccugcggaguaacugcaaagaagcuuaccauggagcugcucauccugaaggccaacgccaucaccacaauccugacggcggugaccuucugcuucgccagcggccagaacaucaccgaggaguucuaccaguccacgugcagcgccgucuccaagggguaccucagcgcccugcgaaccggcugguacaccuccgugaucaccaucgagcugucaaacaucaaggagaacaagugcaacgggaccgaugccaagguuaagcucaucaagcaggagcuggacaaguacaagaacgcggucacggagcugcagcuccugaugcaguccacuccggcaaccaacaaccgcgccaggcgcgagcugccccgguucaugaacuacacccucaacaacgccaagaagacgaaugugacccugagcaagaagcgcaagcggcgcuuccugggcuuccuccuaggggugggcuccgccaucgcgagcggcgucgccgugugcaagguguugcaccucgagggggaggucaacaagaucaagagcgcccugcuguccaccaacaaggccgugguaagccucuccaacggcgucagcguucugaccuucaaggugcuggaccucaagaacuauaucgacaagcagcugcugcccauccugaacaagcagagcugcuccaucucaaacaucgaaacggugauugaguuccagcagaagaacaaccggcuccuggaaaucacccgcgaguucagcgugaacgccggggucaccacccccguguccacguacaugcugaccaacagcgagcuccuaucccugaucaacgacaugccgaucaccaacgaccagaagaagcucaugagcaacaacgugcagaucguccggcagcaguccuacagcaucaugugcaucaucaaggaagaggugcuggcguacgugguccagcugccccucuacggcgugaucgacacccccugcuggaagcugcacacgagcccccugugcacaaccaacaccaaggagggguccaacaucugccucacgcgcaccgaccggggcugguacugcgacaacgccggcagcgucuccuucuucccgcaggccgagaccugcaaggugcagagcaaccgcguguucugcgacaccaugaacucccugacgcugcccucugagguaaaccucugcaacgucgacaucuucaaccccaaguacgacugcaagaucaugaccuccaagacagacgugagcuccagcgugaucacaucccugggggccaucgucagcugcuacggcaagacuaaguguacugccagcaacaagaaccgggggaucaucaagaccuucuccaacggcugcgacuacgugagcaacaagggcguggacaccguguccgucgggaacacccuguacuacguuaauaagcaggagggcaagagccucuacgugaaaggggagcccaucauuaacuucuacgacccacugguuuuccccuccgacgaguucgacgcgagcaucucccaggugaacgagaagaucaaccagagccuggccuucauccgcaaguccgacgagcugcuccacaacgugaacgccggcaagagcacgaccaacaucaugaucaccaccaucaucaucgugaucaucgugauucugcugucccucaucgccguggggcugcugcuuuacugcaaggcccggugaggacuaguaauaaggaaacuguaugaaugucugugggcaggaagugaagagauccuucuguaaagguuuuuggaauuaugucugcugaauaauaaacuuuuuugaaauaauaaaucugguagaaaaaugagaucuaaaaaaaaaaaaaaaaaaaaaaaaaaaaaaaaaaaaaaaaaaaaaaaaaaaaaaaaaaaaaaaaugcaucccccccccccccccccccccccccccccccaaaggcucuuuucagagccaccagaauu

SEQ ID NO: 1412 - RNA, 2331 nt, Artificial Sequence
  mRNA product Design d-3 comprising derived and/or modified sequence from HRSV(A2)__F-del_DSCav1 (opt1)
gggagagggcgcuuggcuugcaaggacccugagcugcggcauugaagcacacccaacccaacucgacugaagucagccucacugaaccggaucugagaaucuucucucucugggcuugccagggcucuccgaaccuagcuagcauccucuucaauuccaacuagaaagcuuaccauggagcugcucauccugaaggccaacgccaucaccaccauccugacggcggugaccuucugcuucgccagcggccagaacaucaccgaggaguucuaccaguccacgugcagcgccgucuccaagggguaccucagcgcccugcggaccggcugguacaccuccgugaucaccaucgagcugagcaacaucaaggagaacaagugcaacgggaccgacgccaaggugaagcucaucaagcaggagcuggacaaguacaagaacgcggucacggagcugcagcuccugaugcaguccaccccggcaaccaacaaccgcgcccggcgcgagcugccccgguucaugaacuacacccucaacaacgccaagaagacgaacgugacccugagcaagaagcgcaagcggcgcuuccugggcuuccuccugggggugggcuccgccaucgcgagcggcgucgccgugugcaaggugcugcaccucgagggggaggucaacaagaucaagagcgcccugcuguccaccaacaaggccguggugagccucuccaacggcgucagcgugcugaccuucaaggugcuggaccucaagaacuacaucgacaagcagcugcugcccauccugaacaagcagagcugcuccaucagcaacaucgagacggugaucgaguuccagcagaagaacaaccggcuccuggagaucacccgcgaguucagcgugaacgccggggucaccacccccguguccacguacaugcugaccaacagcgagcuccugucccugaucaacgacaugccgaucaccaacgaccagaagaagcucaugagcaacaacgugcagaucguccggcagcaguccuacagcaucaugugcaucaucaaggaggaggugcuggcguacgugguccagcugccccucuacggcgugaucgacacccccugcuggaagcugcacacgagcccccugugcaccaccaacaccaaggagggguccaacaucugccucacgcgcaccgaccggggcugguacugcgacaacgccggcagcgucuccuucuucccgcaggccgagaccugcaaggugcagagcaaccgcguguucugcgacaccaugaacucccugacgcugcccagcgagguaaaccucugcaacgucgacaucuucaaccccaaguacgacugcaagaucaugaccuccaagaccgacgugagcuccagcgugaucaccucccugggggccaucgucagcugcuacggcaagacgaagugcaccgccagcaacaagaaccgggggaucaucaagaccuucuccaacggcugcgacuacgugagcaacaagggcguggacaccguguccgucgggaacacccuguacuacgugaacaagcaggagggcaagagccucuacgugaagggggagcccaucaucaacuucuacgacccgcuggucuuccccuccgacgaguucgacgcgagcaucucccaggugaacgagaagaucaaccagagccuggccuucauccgcaaguccgacgagcugcuccacaacgugaacgccggcaagagcacgaccaacaucaugaucaccaccaucaucaucgucaucaucgugauccugcugucccucaucgccguggggcugcugcucuacugcaaggcccggugaggacuagugaagggaacacccaaauuuaauucagccuuaagcacaauuaauuaagagugaaacguaauuguacaagcaguuggucacccaccauagggcaugaucaacaccgcaaccuuuccuuuuucccccagugauucugaaaaaccccucuucccuucagcuugcuuagauguuccaaauuuaguaagcuuaaggcggccuacagaagaaaaagaaaaaaaaggccacaaaaguucccucucacuuucaguaaauaaaauaaaagcagcaacagaaauaaagaaauaaaugaaauucaaaaugaaauaaauauuguguugugcagcauuaaaaaaucaauaaaaauuaaaaaugagcaagaucuaaaaaaaaaaaaaaaaaaaaaaaaaaaaaaaaaaaaaaaaaaaaaaaaaaaaaaaaaaaaaaaaugcaucccccccccccccccccccccccccccccccaaaggcucuuuucagagccaccagaauu

SEQ ID NO: 1413 - RNA, 2331 nt, Artificial Sequence
  mRNA product Design d-3 comprising derived and/or modified sequence from HRSV(A2)__F-del_DSCav1 (opt1)
gggagagggcgcuuggcuugcaaggacccugagcugcggcauugaagcacacccaacccaacucgacugaagucagccucacugaaccggaucugagaaucuucucucucugggcuugccagggcucuccgaaccuagcuagcauccucuucaauuccaacuagaaagcuuaccauggagcugcucauccugaaggccaacgccaucaccaccauccugacggcggugaccuucugcuucgccagcggccagaacaucaccgaggaguucuaccaguccacgugcagcgccgucuccaagggguaccucagcgcccugcgcaccggcugguacaccuccgugaucaccaucgagcugagcaacaucaaggagaacaagugcaacgggaccgacgccaaggugaagcucaucaagcaggagcuggacaaguacaagaacgcggucacggagcugcagcuccugaugcaguccacccccgccaccaacaaccgggcccgccgggagcugccgcgcuucaugaacuacacccucaacaacgccaagaagacgaacgugacccugagcaagaagcggaagcgccgguuccugggcuuccuccugggggugggcuccgcgaucgccagcggcgucgccgugugcaaggugcugcaccucgagggggaggucaacaagaucaaguccgcccugcugagcaccaacaaggccguggugucccucagcaacggcgucuccgugcugaccuucaaggugcuggaccucaagaacuacaucgacaagcagcugcugcccauccucaacaagcagagcugcuccaucagcaacaucgagacggucaucgaguuccagcagaagaacaaccgccugcuggagaucacccgggaguucuccgugaacgcgggggugaccacccccgucagcacguacaugcucaccaacagcgagcugcugucccucaucaacgacaugcccaucaccaacgaccagaagaagcugaugagcaacaacgugcagaucgugcgccagcaguccuacagcaucaugugcaucaucaaggaggagguccuggccuacguggugcagcucccgcuguacggcgucaucgacacccccugcuggaagcugcacacgagcccccucugcaccaccaacaccaaggaggggagcaacaucugccugacgcggaccgaccgcggcugguacugcgacaacgccggcuccgugagcuucuucccccaggccgagaccugcaagguccaguccaaccggguguucugcgacaccaugaacagccugacgcucccguccgaggugaaccugugcaacgucgacaucuucaaccccaaguacgacugcaagaucaugaccagcaagaccgacguguccagcuccgugaucaccagccugggggccaucgucuccugcuacggcaagacgaagugcaccgcgagcaacaagaaccgcgggaucaucaagaccuucuccaacggcugcgacuacgugagcaacaagggcguggacaccgucagcguggggaacacccucuacuacgugaacaagcaggagggcaagucccuguacgucaagggggagcccaucaucaacuucuacgacccccugguguucccgagcgacgaguucgacgccuccaucagccaggugaacgagaagaucaaccagucccucgccuucauccggaaguccgacgagcugcugcacaacgucaacgccggcaaguccacgaccaacaucaugaucaccaccaucaucaucgugaucaucgugauccugcucagccugaucgccgucgggcugcuccuguacugcaaggcgcgcugaggacuagugaagggaacacccaaauuuaauucagccuuaagcacaauuaauuaagagugaaacguaauuguacaagcaguuggucacccaccauagggcaugaucaacaccgcaaccuuuccuuuuucccccagugauucugaaaaaccccucuucccuucagcuugcuuagauguuccaaauuuaguaagcuuaaggcggccuacagaagaaaaagaaaaaaaaggccacaaaaguucccucucacuuucaguaaauaaaauaaaagcagcaacagaaauaaagaaauaaaugaaauucaaaaugaaauaaauauuguguugugcagcauuaaaaaaucaauaaaaauuaaaaaugagcaagaucuaaaaaaaaaaaaaaaaaaaaaaaaaaaaaaaaaaaaaaaaaaaaaaaaaaaaaaaaaaaaaaaaugcaucccccccccccccccccccccccccccccccaaaggcucuuuucagagccaccagaauu

SEQ ID NO: 1414 - RNA, 2331 nt, Artificial Sequence
  mRNA product Design d-3 comprising derived and/or modified sequence from HRSV(A2)__F-del_DSCav1 (opt2)
gggagagggcgcuuggcuugcaaggacccugagcugcggcauugaagcacacccaacccaacucgacugaagucagccucacugaaccggaucugagaaucuucucucucugggcuugccagggcucuccgaaccuagcuagcauccucuucaauuccaacuagaaagcuuaccauggagcuccucauccucaaggccaacgccaucaccaccauccucaccgccgucaccuucugcuucgccuccggccagaacaucaccgaggaguucuaccaguccaccugcuccgccgucuccaagggcuaccucuccgcccuccgcaccggcugguacaccuccgucaucaccaucgagcucuccaacaucaaggagaacaagugcaacggcaccgacgccaaggucaagcucaucaagcaggagcucgacaaguacaagaacgccgucaccgagcuccagcuccucaugcaguccacccccgccaccaacaaccgcgcccgccgcgagcucccccgcuucaugaacuacacccucaacaacgccaagaagaccaacgucacccucuccaagaagcgcaagcgccgcuuccucggcuuccuccucggcgucggcuccgccaucgccuccggcgucgccgucugcaagguccuccaccucgagggcgaggucaacaagaucaaguccgcccuccucuccaccaacaaggccgucgucucccucuccaacggcgucuccguccucaccuucaagguccucgaccucaagaacuacaucgacaagcagcuccuccccauccucaacaagcaguccugcuccaucuccaacaucgagaccgucaucgaguuccagcagaagaacaaccgccuccucgagaucacccgcgaguucuccgucaacgccggcgucaccacccccgucuccaccuacaugcucaccaacuccgagcuccucucccucaucaacgacaugcccaucaccaacgaccagaagaagcucauguccaacaacguccagaucguccgccagcaguccuacuccaucaugugcaucaucaaggaggagguccucgccuacgucguccagcucccccucuacggcgucaucgacacccccugcuggaagcuccacaccuccccccucugcaccaccaacaccaaggagggcuccaacaucugccucacccgcaccgaccgcggcugguacugcgacaacgccggcuccgucuccuucuucccccaggccgagaccugcaagguccaguccaaccgcgucuucugcgacaccaugaacucccucacccuccccuccgaggucaaccucugcaacgucgacaucuucaaccccaaguacgacugcaagaucaugaccuccaagaccgacgucuccuccuccgucaucaccucccucggcgccaucgucuccugcuacggcaagaccaagugcaccgccuccaacaagaaccgcggcaucaucaagaccuucuccaacggcugcgacuacgucuccaacaagggcgucgacaccgucuccgucggcaacacccucuacuacgucaacaagcaggagggcaagucccucuacgucaagggcgagcccaucaucaacuucuacgacccccucgucuuccccuccgacgaguucgacgccuccaucucccaggucaacgagaagaucaaccagucccucgccuucauccgcaaguccgacgagcuccuccacaacgucaacgccggcaaguccaccaccaacaucaugaucaccaccaucaucaucgucaucaucgucauccuccucucccucaucgccgucggccuccuccucuacugcaaggcccgcugaggacuagugaagggaacacccaaauuuaauucagccuuaagcacaauuaauuaagagugaaacguaauuguacaagcaguuggucacccaccauagggcaugaucaacaccgcaaccuuuccuuuuucccccagugauucugaaaaaccccucuucccuucagcuugcuuagauguuccaaauuuaguaagcuuaaggcggccuacagaagaaaaagaaaaaaaaggccacaaaaguucccucucacuuucaguaaauaaaauaaaagcagcaacagaaauaaagaaauaaaugaaauucaaaaugaaauaaauauuguguugugcagcauuaaaaaaucaauaaaaauuaaaaaugagcaagaucuaaaaaaaaaaaaaaaaaaaaaaaaaaaaaaaaaaaaaaaaaaaaaaaaaaaaaaaaaaaaaaaaugcaucccccccccccccccccccccccccccccccaaaggcucuuuucagagccaccagaauu

SEQ ID NO: 1415 - RNA, 2331 nt, Artificial Sequence
  mRNA product Design d-3 comprising derived and/or modified sequence from HRSV(A2)__F-del_DSCav1 (opt3)
gggagagggcgcuuggcuugcaaggacccugagcugcggcauugaagcacacccaacccaacucgacugaagucagccucacugaaccggaucugagaaucuucucucucugggcuugccagggcucuccgaaccuagcuagcauccucuucaauuccaacuagaaagcuuaccauggagcugcucauccuuaaggccaacgcuauuaccacaauacugacugcagugacguucugcuuugccagcggccagaauaucaccgaagaguucuaccaauccacauguucugcggucucaaaaggguauuugagugcuuuaagaacuggaugguacaccagcguuauuacaaucgaacuguccaacauuaaggagaauaaaugcaacgguaccgacgccaaggugaaacuaaucaagcaggaacucgauaaguauaaaaaugcaguaacugagcugcagcuucugaugcagucuacacccgccaccaacaauagggcucggcgcgaguugccucgauuuaugaacuacacgcucaauaacgcaaagaaaacuaaugugacccugucgaagaaacguaagagaagguuccugggcuuucucuuaggggucggaucagccauagcuagcggcguggccguuuguaaggugcugcaccuugaaggugaggucaacaaaaucaagagugcguugcuguccacaaauaaagcagugguaucucuaagcaacgggguuuccgugcucacuuucaagguccuggaccuuaaaaauuauauugauaagcaacuguugccaauccucaacaaacagucaugcaguauuagcaacaucgaaaccgugauagaguuucagcagaagaauaaccggcuguuagagauuacacgcgaguucucugugaaugccggagucaccacgccgguuuccacuuacaugcugacaaacucagaacuccuuagccugaucaaugacaugcccauuaccaacgaucaaaagaaauugaugaguaauaacgugcagaucguaagacagcagucuuauuccaucauguguauuauaaaggaagaggugcuagcuuacgucgugcaacugccucucuacggcguuaucgacacuccaugcuggaaacugcauacaagcccccuuuguaccacgaauaccaaggaaggcucgaacauuugccugacaaggacugaucgggggugguauugugacaaugccggaucuguguccuuuuucccucaggcagagaccugcaaaguccagucaaaccgcguguuuugugauacaaugaauaguuugacucucccaagcgagguaaaccugugcaauguugacaucuucaaccccaaguacgauugcaagauaaugaccuccaaaacagacgugucuagcucagucauuaccaguuuaggugcuaucguguccuguuauggcaagacuaaaugcacggccagcaacaagaaucgagggaucauuaaaacauuuucuaacggaugugauuacgucucaaauaagggcguggacaccguuaguguggguaacacucuguauuacguaaauaagcaagaagggaaaagccuauaugucaagggagagccuaucauuaacuucuacgacccacucguguucccguccgaugaauuugacgcgucuauaucgcagguuaaugagaaaaucaaccagagccuggccuucauuagaaaguccgaugaacuuuugcacaaugugaacgcaggcaaaucaaccacaaauaucaugaucaccacuauuauaaucgucauuaucgugauucugcucagucugaucgcuguaggccuucuguuguacugcaaggccaggugaggacuagugaagggaacacccaaauuuaauucagccuuaagcacaauuaauuaagagugaaacguaauuguacaagcaguuggucacccaccauagggcaugaucaacaccgcaaccuuuccuuuuucccccagugauucugaaaaaccccucuucccuucagcuugcuuagauguuccaaauuuaguaagcuuaaggcggccuacagaagaaaaagaaaaaaaaggccacaaaaguucccucucacuuucaguaaauaaaauaaaagcagcaacagaaauaaagaaauaaaugaaauucaaaaugaaauaaauauuguguugugcagcauuaaaaaaucaauaaaaauuaaaaaugagcaagaucuaaaaaaaaaaaaaaaaaaaaaaaaaaaaaaaaaaaaaaaaaaaaaaaaaaaaaaaaaaaaaaaaugcaucccccccccccccccccccccccccccccccaaaggcucuuuucagagccaccagaauu

SEQ ID NO: 1416 - RNA, 2331 nt, Artificial Sequence
  mRNA product Design d-3 comprising derived and/or modified sequence from HRSV(A2)__F-del_DSCav1 (opt4)
gggagagggcgcuuggcuugcaaggacccugagcugcggcauugaagcacacccaacccaacucgacugaagucagccucacugaaccggaucugagaaucuucucucucugggcuugccagggcucuccgaaccuagcuagcauccucuucaauuccaacuagaaagcuuaccauggagcugcugauccugaaggccaacgccaucaccaccauccugaccgccgugaccuucugcuucgccagcggccagaacaucaccgaggaguucuaccagagcaccugcagcgccgugagcaagggcuaccugagcgcccugagaaccggcugguacaccagcgugaucaccaucgagcugagcaacaucaaggagaacaagugcaacggcaccgacgccaaggugaagcugaucaagcaggagcuggacaaguacaagaacgccgugaccgagcugcagcugcugaugcagagcacccccgccaccaacaacagagccagaagagagcugcccagauucaugaacuacacccugaacaacgccaagaagaccaacgugacccugagcaagaagagaaagagaagauuccugggcuuccugcugggcgugggcagcgccaucgccagcggcguggccgugugcaaggugcugcaccuggagggcgaggugaacaagaucaagagcgcccugcugagcaccaacaaggccguggugagccugagcaacggcgugagcgugcugaccuucaaggugcuggaccugaagaacuacaucgacaagcagcugcugcccauccugaacaagcagagcugcagcaucagcaacaucgagaccgugaucgaguuccagcagaagaacaacagacugcuggagaucaccagagaguucagcgugaacgccggcgugaccacccccgugagcaccuacaugcugaccaacagcgagcugcugagccugaucaacgacaugcccaucaccaacgaccagaagaagcugaugagcaacaacgugcagaucgugagacagcagagcuacagcaucaugugcaucaucaaggaggaggugcuggccuacguggugcagcugccccuguacggcgugaucgacacccccugcuggaagcugcacaccagcccccugugcaccaccaacaccaaggagggcagcaacaucugccugaccagaaccgacagaggcugguacugcgacaacgccggcagcgugagcuucuucccccaggccgagaccugcaaggugcagagcaacagaguguucugcgacaccaugaacagccugacccugcccagcgaggugaaccugugcaacguggacaucuucaaccccaaguacgacugcaagaucaugaccagcaagaccgacgugagcagcagcgugaucaccagccugggcgccaucgugagcugcuacggcaagaccaagugcaccgccagcaacaagaacagaggcaucaucaagaccuucagcaacggcugcgacuacgugagcaacaagggcguggacaccgugagcgugggcaacacccuguacuacgugaacaagcaggagggcaagagccuguacgugaagggcgagcccaucaucaacuucuacgacccccugguguuccccagcgacgaguucgacgccagcaucagccaggugaacgagaagaucaaccagagccuggccuucaucagaaagagcgacgagcugcugcacaacgugaacgccggcaagagcaccaccaacaucaugaucaccaccaucaucaucgugaucaucgugauccugcugagccugaucgccgugggccugcugcuguacugcaaggccagaugaggacuagugaagggaacacccaaauuuaauucagccuuaagcacaauuaauuaagagugaaacguaauuguacaagcaguuggucacccaccauagggcaugaucaacaccgcaaccuuuccuuuuucccccagugauucugaaaaaccccucuucccuucagcuugcuuagauguuccaaauuuaguaagcuuaaggcggccuacagaagaaaaagaaaaaaaaggccacaaaaguucccucucacuuucaguaaauaaaauaaaagcagcaacagaaauaaagaaauaaaugaaauucaaaaugaaauaaauauuguguugugcagcauuaaaaaaucaauaaaaauuaaaaaugagcaagaucuaaaaaaaaaaaaaaaaaaaaaaaaaaaaaaaaaaaaaaaaaaaaaaaaaaaaaaaaaaaaaaaaugcaucccccccccccccccccccccccccccccccaaaggcucuuuucagagccaccagaauu

SEQ ID NO: 1417 - RNA, 2331 nt, Artificial Sequence
  mRNA product Design d-3 comprising derived and/or modified sequence from HRSV(A2)__F-del_DSCav1 (opt5)
gggagagggcgcuuggcuugcaaggacccugagcugcggcauugaagcacacccaacccaacucgacugaagucagccucacugaaccggaucugagaaucuucucucucugggcuugccagggcucuccgaaccuagcuagcauccucuucaauuccaacuagaaagcuuaccauggagcugcucauccugaaggccaacgcuauuaccacaauccuuacggccgugaccuucugcuuugcgagcggccagaauauuacagaagaguucuaccaauccaccuguucugcugucagcaaaggguaucuguccgcccucagaacaggaugguacaccucuguuaucacaauugaacugagcaacaucaaggagaauaaaugcaacggcaccgacgccaaggugaaacuuaucaagcaggaacuggauaaguauaaaaaugcugugacggagcuccagcugcugaugcaguccacccccgccacaaacaaucgggcucgcagagagcucccucgguuuaugaacuacacccugaauaacgccaagaaaacaaaugucacccuuucuaagaaacgcaagagacgguuccugggguuucuccugggagugggcagcgcgauugccuccgggguugcuguguguaagguccuucaccuggaaggagaggugaacaaaaucaagagcgcccuccugucuacgaauaaagcuguugugucccugagcaacggcgucucugugcucacauucaaggugcuggaccuuaaaaauuauauugauaagcaacugcucccgauccugaacaaacaguccugcagcauuucuaacaucgaaaccgucauugaguuucagcagaagaauaaccgccuucuggagaucacaagagaauuuuccguuaaugccggcgugaccacccccgugagcacauacaugcucacgaacuccgagcugcugucucucaucaaugacaugccuauuaccaacgaucaaaagaaacugaugagcaauaacguccagaucgugcggcagcaguccuauagcauuauguguaucauuaaggaagagguucuugcguacgugguccaacugccccucuacggggugaucgacacaccuugcuggaaacugcauaccucuccccuuuguacaaccaauacgaaggaaggauccaacaucugccugacacgcaccgauagaggcugguauugugacaaugccgggagcguuucuuucuucccucaggcugagaccugcaaagugcagagcaaccgggucuuuugugauacaaugaacucccucacccugccgucugaggugaaucugugcaaugucgacauuuucaaccccaaguacgauugcaagaucaugacaagcaaaacggacguguccagcucuguuauuaccucccucggagccaucgugagcuguuauggcaagacaaaaugcaccgcuucuaacaagaaucgcgggauuaucaaaacauuuuccaacggaugugauuacgucagcaauaagggcguggacaccguuuccgugggcaacacgcuguauuacgucaauaagcaagaagggaaaucucuuuaugugaagggagagccuaucauuaacuucuacgacccccugguguucccuagcgaugaauuugacgccuccaucucucagguuaaugagaaaauuaaccagagccucgccuucaucagaaaguccgaugaacugcugcacaaugucaacgcuggcaaaagcaccacaaauauuaugaucaccacaauuaucaucgugauuaucgugauucuucucucucugaucgcggucgggcugcuccuguacugcaaggcccggugaggacuagugaagggaacacccaaauuuaauucagccuuaagcacaauuaauuaagagugaaacguaauuguacaagcaguuggucacccaccauagggcaugaucaacaccgcaaccuuuccuuuuucccccagugauucugaaaaaccccucuucccuucagcuugcuuagauguuccaaauuuaguaagcuuaaggcggccuacagaagaaaaagaaaaaaaaggccacaaaaguucccucucacuuucaguaaauaaaauaaaagcagcaacagaaauaaagaaauaaaugaaauucaaaaugaaauaaauauuguguugugcagcauuaaaaaaucaauaaaaauuaaaaaugagcaagaucuaaaaaaaaaaaaaaaaaaaaaaaaaaaaaaaaaaaaaaaaaaaaaaaaaaaaaaaaaaaaaaaaugcaucccccccccccccccccccccccccccccccaaaggcucuuuucagagccaccagaauu

SEQ ID NO: 1418 - RNA, 2331 nt, Artificial Sequence
  mRNA product Design d-3 comprising derived and/or modified sequence from HRSV(A2)__F-del_DSCav1 (opt6)
gggagagggcgcuuggcuugcaaggacccugagcugcggcauugaagcacacccaacccaacucgacugaagucagccucacugaaccggaucugagaaucuucucucucugggcuugccagggcucuccgaaccuagcuagcauccucuucaauuccaacuagaaagcuuaccauggaacuauuaauauuaaaagcaaaugcuauuaccacaauacuuacugcuguaaccuucugcuuugccucuggccaaaacauaacagaagaauuuuaucaaucaacuugcuccgcuguaagcaaaggcuaccuaucagcauuacgcaccggcugguacacaucaguaauaacaauagaacuauccaacauaaaagaaaauaaaugcaacggaacagacgcaaaaguaaaauuaauaaaacaagaacucgacaaauacaaaaacgcaguaacagaauuacaacuacuaaugcaaaguacuccagccaccaacaacagagcaagaagagaauuaccacgauuuaugaacuacacacuaaacaaugcaaaaaaaacaaacguaacacuaucaaaaaaacguaaacgcagauucuuaggcuuccuccuagguguaggcucagcaaucgccucaggaguggcaguuuguaaaguacuacaccuagaaggagaaguaaacaaaaucaaaucugcccuuuuaucgacaaacaaagcaguaguaucguuauccaauggagucucaguauugacauucaaaguauuagaccuaaaaaauuauauagauaaacaacucuuaccuaucuuaaauaaacaaagcugcucaauaaguaacauagaaaccguaauagaauuucaacaaaaaaacaauagacuccuugagaucacucgagaauuuucaguaaacgcagguguaacaacaccaguaagcacauacaugcuaacaaauagugaacuauuaucucuaauuaacgauaugcccauaaccaacgaucaaaaaaaacucaugaguaacaacguacaaauaguaagacaacaauccuauagcauaaugugcauuauaaaagaagaaguacuagcauauguaguccaacuaccacuauacggcguaauagacacaccaugcuggaaacuacacaccucaccccuaugcacaacaaauacaaaagaaggaucaaacauaugcuuaaccaggacagacagaggcugguacugcgauaacgcaggaucuguuucauucuucccccaagcagaaacaugcaaaguacaaucaaacagaguauuuugugauaccaugaacucacucacauuaccauccgaagucaaccucugcaacguagacauauucaaccccaaauacgacugcaaaauaaugaccucaaaaacagauguaucaucaucaguaaucacaucacuaggagcuaucguaucuuguuauggaaaaacaaaaugcacagcauccaacaaaaacagaggaauuaucaaaacauucucaaauggaugugacuauguaucaaacaaaggaguagacaccguaagcguaggcaauacacuauauuacguaaauaaacaagaaggaaaaucacuauacguaaaaggugaaccaauaauaaacuucuaugacccccuaguauucccaucagaugaauuugacgcaagcauaucacaagucaacgaaaaaauaaaccaaucacuggcauucauucgcaaaucagaugaacuucuccacaacguaaacgcugguaaaagcacuacaaacauaaugauaacaacaaucaucauugucauaauaguuauucuauuaucacuaaucgcaguaggauuacuacuauacuguaaagcgagguaaggacuagugaagggaacacccaaauuuaauucagccuuaagcacaauuaauuaagagugaaacguaauuguacaagcaguuggucacccaccauagggcaugaucaacaccgcaaccuuuccuuuuucccccagugauucugaaaaaccccucuucccuucagcuugcuuagauguuccaaauuuaguaagcuuaaggcggccuacagaagaaaaagaaaaaaaaggccacaaaaguucccucucacuuucaguaaauaaaauaaaagcagcaacagaaauaaagaaauaaaugaaauucaaaaugaaauaaauauuguguugugcagcauuaaaaaaucaauaaaaauuaaaaaugagcaagaucuaaaaaaaaaaaaaaaaaaaaaaaaaaaaaaaaaaaaaaaaaaaaaaaaaaaaaaaaaaaaaaaaugcaucccccccccccccccccccccccccccccccaaaggcucuuuucagagccaccagaauu

SEQ ID NO: 1419 - RNA, 2331 nt, Artificial Sequence
  mRNA product Design d-3 comprising derived and/or modified sequence from HRSV(A2)__F-del_DSCav1 (opt11)
gggagagggcgcuuggcuugcaaggacccugagcugcggcauugaagcacacccaacccaacucgacugaagucagccucacugaaccggaucugagaaucuucucucucugggcuugccagggcucuccgaaccuagcuagcauccucuucaauuccaacuagaaagcuuaccauggagcugcucauccugaaggccaacgccaucaccacaauccugacggcggugaccuucugcuucgccagcggccagaacaucaccgaggaguucuaccaguccacgugcagcgccgucuccaagggguaccucagcgcccugcgaaccggcugguacaccuccgugaucaccaucgagcugucaaacaucaaggagaacaagugcaacgggaccgaugccaagguuaagcucaucaagcaggagcuggacaaguacaagaacgcggucacggagcugcagcuccugaugcaguccacuccggcaaccaacaaccgcgccaggcgcgagcugccccgguucaugaacuacacccucaacaacgccaagaagacgaaugugacccugagcaagaagcgcaagcggcgcuuccugggcuuccuccuaggggugggcuccgccaucgcgagcggcgucgccgugugcaagguguugcaccucgagggggaggucaacaagaucaagagcgcccugcuguccaccaacaaggccgugguaagccucuccaacggcgucagcguucugaccuucaaggugcuggaccucaagaacuauaucgacaagcagcugcugcccauccugaacaagcagagcugcuccaucucaaacaucgaaacggugauugaguuccagcagaagaacaaccggcuccuggaaaucacccgcgaguucagcgugaacgccggggucaccacccccguguccacguacaugcugaccaacagcgagcuccuaucccugaucaacgacaugccgaucaccaacgaccagaagaagcucaugagcaacaacgugcagaucguccggcagcaguccuacagcaucaugugcaucaucaaggaagaggugcuggcguacgugguccagcugccccucuacggcgugaucgacacccccugcuggaagcugcacacgagcccccugugcacaaccaacaccaaggagggguccaacaucugccucacgcgcaccgaccggggcugguacugcgacaacgccggcagcgucuccuucuucccgcaggccgagaccugcaaggugcagagcaaccgcguguucugcgacaccaugaacucccugacgcugcccucugagguaaaccucugcaacgucgacaucuucaaccccaaguacgacugcaagaucaugaccuccaagacagacgugagcuccagcgugaucacaucccugggggccaucgucagcugcuacggcaagacuaaguguacugccagcaacaagaaccgggggaucaucaagaccuucuccaacggcugcgacuacgugagcaacaagggcguggacaccguguccgucgggaacacccuguacuacguuaauaagcaggagggcaagagccucuacgugaaaggggagcccaucauuaacuucuacgacccacugguuuuccccuccgacgaguucgacgcgagcaucucccaggugaacgagaagaucaaccagagccuggccuucauccgcaaguccgacgagcugcuccacaacgugaacgccggcaagagcacgaccaacaucaugaucaccaccaucaucaucgugaucaucgugauucugcugucccucaucgccguggggcugcugcuuuacugcaaggcccggugaggacuagugaagggaacacccaaauuuaauucagccuuaagcacaauuaauuaagagugaaacguaauuguacaagcaguuggucacccaccauagggcaugaucaacaccgcaaccuuuccuuuuucccccagugauucugaaaaaccccucuucccuucagcuugcuuagauguuccaaauuuaguaagcuuaaggcggccuacagaagaaaaagaaaaaaaaggccacaaaaguucccucucacuuucaguaaauaaaauaaaagcagcaacagaaauaaagaaauaaaugaaauucaaaaugaaauaaauauuguguugugcagcauuaaaaaaucaauaaaaauuaaaaaugagcaagaucuaaaaaaaaaaaaaaaaaaaaaaaaaaaaaaaaaaaaaaaaaaaaaaaaaaaaaaaaaaaaaaaaugcaucccccccccccccccccccccccccccccccaaaggcucuuuucagagccaccagaauu

SEQ ID NO: 1420 - RNA, 2014 nt, Artificial Sequence
  mRNA product Design d-4 comprising derived and/or modified sequence from HRSV(A2)__F-del_DSCav1 (opt1)
gggagagucccgcagucggcguccagcggcucugcuuguucgugugugugucguugcaggccuuauucaagcuuaccauggagcugcucauccugaaggccaacgccaucaccaccauccugacggcggugaccuucugcuucgccagcggccagaacaucaccgaggaguucuaccaguccacgugcagcgccgucuccaagggguaccucagcgcccugcggaccggcugguacaccuccgugaucaccaucgagcugagcaacaucaaggagaacaagugcaacgggaccgacgccaaggugaagcucaucaagcaggagcuggacaaguacaagaacgcggucacggagcugcagcuccugaugcaguccaccccggcaaccaacaaccgcgcccggcgcgagcugccccgguucaugaacuacacccucaacaacgccaagaagacgaacgugacccugagcaagaagcgcaagcggcgcuuccugggcuuccuccugggggugggcuccgccaucgcgagcggcgucgccgugugcaaggugcugcaccucgagggggaggucaacaagaucaagagcgcccugcuguccaccaacaaggccguggugagccucuccaacggcgucagcgugcugaccuucaaggugcuggaccucaagaacuacaucgacaagcagcugcugcccauccugaacaagcagagcugcuccaucagcaacaucgagacggugaucgaguuccagcagaagaacaaccggcuccuggagaucacccgcgaguucagcgugaacgccggggucaccacccccguguccacguacaugcugaccaacagcgagcuccugucccugaucaacgacaugccgaucaccaacgaccagaagaagcucaugagcaacaacgugcagaucguccggcagcaguccuacagcaucaugugcaucaucaaggaggaggugcuggcguacgugguccagcugccccucuacggcgugaucgacacccccugcuggaagcugcacacgagcccccugugcaccaccaacaccaaggagggguccaacaucugccucacgcgcaccgaccggggcugguacugcgacaacgccggcagcgucuccuucuucccgcaggccgagaccugcaaggugcagagcaaccgcguguucugcgacaccaugaacucccugacgcugcccagcgagguaaaccucugcaacgucgacaucuucaaccccaaguacgacugcaagaucaugaccuccaagaccgacgugagcuccagcgugaucaccucccugggggccaucgucagcugcuacggcaagacgaagugcaccgccagcaacaagaaccgggggaucaucaagaccuucuccaacggcugcgacuacgugagcaacaagggcguggacaccguguccgucgggaacacccuguacuacgugaacaagcaggagggcaagagccucuacgugaagggggagcccaucaucaacuucuacgacccgcuggucuuccccuccgacgaguucgacgcgagcaucucccaggugaacgagaagaucaaccagagccuggccuucauccgcaaguccgacgagcugcuccacaacgugaacgccggcaagagcacgaccaacaucaugaucaccaccaucaucaucgucaucaucgugauccugcugucccucaucgccguggggcugcugcucuacugcaaggcccggugaggacuaguggaagcauuuuccuggcugauuaaaagaaauuacucagcuauggucaucuguuccuguuagaaggcuaugcagcauauuauauacuaugcgcauguuaugaaaugcauaauaaaaaauuuuaaaaaaucuaaaagaucuaaaaaaaaaaaaaaaaaaaaaaaaaaaaaaaaaaaaaaaaaaaaaaaaaaaaaaaaaaaaaaaaugcaucccccccccccccccccccccccccccccccaaaggcucuuuucagagccaccagaauu

SEQ ID NO: 1421 - RNA, 2014 nt, Artificial Sequence
  mRNA product Design d-4 comprising derived and/or modified sequence from HRSV(A2)__F-del_DSCav1 (opt1)
gggagagucccgcagucggcguccagcggcucugcuuguucgugugugugucguugcaggccuuauucaagcuuaccauggagcugcucauccugaaggccaacgccaucaccaccauccugacggcggugaccuucugcuucgccagcggccagaacaucaccgaggaguucuaccaguccacgugcagcgccgucuccaagggguaccucagcgcccugcgcaccggcugguacaccuccgugaucaccaucgagcugagcaacaucaaggagaacaagugcaacgggaccgacgccaaggugaagcucaucaagcaggagcuggacaaguacaagaacgcggucacggagcugcagcuccugaugcaguccacccccgccaccaacaaccgggcccgccgggagcugccgcgcuucaugaacuacacccucaacaacgccaagaagacgaacgugacccugagcaagaagcggaagcgccgguuccugggcuuccuccugggggugggcuccgcgaucgccagcggcgucgccgugugcaaggugcugcaccucgagggggaggucaacaagaucaaguccgcccugcugagcaccaacaaggccguggugucccucagcaacggcgucuccgugcugaccuucaaggugcuggaccucaagaacuacaucgacaagcagcugcugcccauccucaacaagcagagcugcuccaucagcaacaucgagacggucaucgaguuccagcagaagaacaaccgccugcuggagaucacccgggaguucuccgugaacgcgggggugaccacccccgucagcacguacaugcucaccaacagcgagcugcugucccucaucaacgacaugcccaucaccaacgaccagaagaagcugaugagcaacaacgugcagaucgugcgccagcaguccuacagcaucaugugcaucaucaaggaggagguccuggccuacguggugcagcucccgcuguacggcgucaucgacacccccugcuggaagcugcacacgagcccccucugcaccaccaacaccaaggaggggagcaacaucugccugacgcggaccgaccgcggcugguacugcgacaacgccggcuccgugagcuucuucccccaggccgagaccugcaagguccaguccaaccggguguucugcgacaccaugaacagccugacgcucccguccgaggugaaccugugcaacgucgacaucuucaaccccaaguacgacugcaagaucaugaccagcaagaccgacguguccagcuccgugaucaccagccugggggccaucgucuccugcuacggcaagacgaagugcaccgcgagcaacaagaaccgcgggaucaucaagaccuucuccaacggcugcgacuacgugagcaacaagggcguggacaccgucagcguggggaacacccucuacuacgugaacaagcaggagggcaagucccuguacgucaagggggagcccaucaucaacuucuacgacccccugguguucccgagcgacgaguucgacgccuccaucagccaggugaacgagaagaucaaccagucccucgccuucauccggaaguccgacgagcugcugcacaacgucaacgccggcaaguccacgaccaacaucaugaucaccaccaucaucaucgugaucaucgugauccugcucagccugaucgccgucgggcugcuccuguacugcaaggcgcgcugaggacuaguggaagcauuuuccuggcugauuaaaagaaauuacucagcuauggucaucuguuccuguuagaaggcuaugcagcauauuauauacuaugcgcauguuaugaaaugcauaauaaaaaauuuuaaaaaaucuaaaagaucuaaaaaaaaaaaaaaaaaaaaaaaaaaaaaaaaaaaaaaaaaaaaaaaaaaaaaaaaaaaaaaaaugcaucccccccccccccccccccccccccccccccaaaggcucuuuucagagccaccagaauu

SEQ ID NO: 1422 - RNA, 2014 nt, Artificial Sequence
  mRNA product Design d-4 comprising derived and/or modified sequence from HRSV(A2)__F-del_DSCav1 (opt2)
gggagagucccgcagucggcguccagcggcucugcuuguucgugugugugucguugcaggccuuauucaagcuuaccauggagcuccucauccucaaggccaacgccaucaccaccauccucaccgccgucaccuucugcuucgccuccggccagaacaucaccgaggaguucuaccaguccaccugcuccgccgucuccaagggcuaccucuccgcccuccgcaccggcugguacaccuccgucaucaccaucgagcucuccaacaucaaggagaacaagugcaacggcaccgacgccaaggucaagcucaucaagcaggagcucgacaaguacaagaacgccgucaccgagcuccagcuccucaugcaguccacccccgccaccaacaaccgcgcccgccgcgagcucccccgcuucaugaacuacacccucaacaacgccaagaagaccaacgucacccucuccaagaagcgcaagcgccgcuuccucggcuuccuccucggcgucggcuccgccaucgccuccggcgucgccgucugcaagguccuccaccucgagggcgaggucaacaagaucaaguccgcccuccucuccaccaacaaggccgucgucucccucuccaacggcgucuccguccucaccuucaagguccucgaccucaagaacuacaucgacaagcagcuccuccccauccucaacaagcaguccugcuccaucuccaacaucgagaccgucaucgaguuccagcagaagaacaaccgccuccucgagaucacccgcgaguucuccgucaacgccggcgucaccacccccgucuccaccuacaugcucaccaacuccgagcuccucucccucaucaacgacaugcccaucaccaacgaccagaagaagcucauguccaacaacguccagaucguccgccagcaguccuacuccaucaugugcaucaucaaggaggagguccucgccuacgucguccagcucccccucuacggcgucaucgacacccccugcuggaagcuccacaccuccccccucugcaccaccaacaccaaggagggcuccaacaucugccucacccgcaccgaccgcggcugguacugcgacaacgccggcuccgucuccuucuucccccaggccgagaccugcaagguccaguccaaccgcgucuucugcgacaccaugaacucccucacccuccccuccgaggucaaccucugcaacgucgacaucuucaaccccaaguacgacugcaagaucaugaccuccaagaccgacgucuccuccuccgucaucaccucccucggcgccaucgucuccugcuacggcaagaccaagugcaccgccuccaacaagaaccgcggcaucaucaagaccuucuccaacggcugcgacuacgucuccaacaagggcgucgacaccgucuccgucggcaacacccucuacuacgucaacaagcaggagggcaagucccucuacgucaagggcgagcccaucaucaacuucuacgacccccucgucuuccccuccgacgaguucgacgccuccaucucccaggucaacgagaagaucaaccagucccucgccuucauccgcaaguccgacgagcuccuccacaacgucaacgccggcaaguccaccaccaacaucaugaucaccaccaucaucaucgucaucaucgucauccuccucucccucaucgccgucggccuccuccucuacugcaaggcccgcugaggacuaguggaagcauuuuccuggcugauuaaaagaaauuacucagcuauggucaucuguuccuguuagaaggcuaugcagcauauuauauacuaugcgcauguuaugaaaugcauaauaaaaaauuuuaaaaaaucuaaaagaucuaaaaaaaaaaaaaaaaaaaaaaaaaaaaaaaaaaaaaaaaaaaaaaaaaaaaaaaaaaaaaaaaugcaucccccccccccccccccccccccccccccccaaaggcucuuuucagagccaccagaauu

SEQ ID NO: 1423 - RNA, 2014 nt, Artificial Sequence
  mRNA product Design d-4 comprising derived and/or modified sequence from HRSV(A2)__F-del_DSCav1 (opt3)
gggagagucccgcagucggcguccagcggcucugcuuguucgugugugugucguugcaggccuuauucaagcuuaccauggagcugcucauccuuaaggccaacgcuauuaccacaauacugacugcagugacguucugcuuugccagcggccagaauaucaccgaagaguucuaccaauccacauguucugcggucucaaaaggguauuugagugcuuuaagaacuggaugguacaccagcguuauuacaaucgaacuguccaacauuaaggagaauaaaugcaacgguaccgacgccaaggugaaacuaaucaagcaggaacucgauaaguauaaaaaugcaguaacugagcugcagcuucugaugcagucuacacccgccaccaacaauagggcucggcgcgaguugccucgauuuaugaacuacacgcucaauaacgcaaagaaaacuaaugugacccugucgaagaaacguaagagaagguuccugggcuuucucuuaggggucggaucagccauagcuagcggcguggccguuuguaaggugcugcaccuugaaggugaggucaacaaaaucaagagugcguugcuguccacaaauaaagcagugguaucucuaagcaacgggguuuccgugcucacuuucaagguccuggaccuuaaaaauuauauugauaagcaacuguugccaauccucaacaaacagucaugcaguauuagcaacaucgaaaccgugauagaguuucagcagaagaauaaccggcuguuagagauuacacgcgaguucucugugaaugccggagucaccacgccgguuuccacuuacaugcugacaaacucagaacuccuuagccugaucaaugacaugcccauuaccaacgaucaaaagaaauugaugaguaauaacgugcagaucguaagacagcagucuuauuccaucauguguauuauaaaggaagaggugcuagcuuacgucgugcaacugccucucuacggcguuaucgacacuccaugcuggaaacugcauacaagcccccuuuguaccacgaauaccaaggaaggcucgaacauuugccugacaaggacugaucgggggugguauugugacaaugccggaucuguguccuuuuucccucaggcagagaccugcaaaguccagucaaaccgcguguuuugugauacaaugaauaguuugacucucccaagcgagguaaaccugugcaauguugacaucuucaaccccaaguacgauugcaagauaaugaccuccaaaacagacgugucuagcucagucauuaccaguuuaggugcuaucguguccuguuauggcaagacuaaaugcacggccagcaacaagaaucgagggaucauuaaaacauuuucuaacggaugugauuacgucucaaauaagggcguggacaccguuaguguggguaacacucuguauuacguaaauaagcaagaagggaaaagccuauaugucaagggagagccuaucauuaacuucuacgacccacucguguucccguccgaugaauuugacgcgucuauaucgcagguuaaugagaaaaucaaccagagccuggccuucauuagaaaguccgaugaacuuuugcacaaugugaacgcaggcaaaucaaccacaaauaucaugaucaccacuauuauaaucgucauuaucgugauucugcucagucugaucgcuguaggccuucuguuguacugcaaggccaggugaggacuaguggaagcauuuuccuggcugauuaaaagaaauuacucagcuauggucaucuguuccuguuagaaggcuaugcagcauauuauauacuaugcgcauguuaugaaaugcauaauaaaaaauuuuaaaaaaucuaaaagaucuaaaaaaaaaaaaaaaaaaaaaaaaaaaaaaaaaaaaaaaaaaaaaaaaaaaaaaaaaaaaaaaaugcaucccccccccccccccccccccccccccccccaaaggcucuuuucagagccaccagaauu

SEQ ID NO: 1424 - RNA, 2014 nt, Artificial Sequence
  mRNA product Design d-4 comprising derived and/or modified sequence from HRSV(A2)__F-del_DSCav1 (opt4)
gggagagucccgcagucggcguccagcggcucugcuuguucgugugugugucguugcaggccuuauucaagcuuaccauggagcugcugauccugaaggccaacgccaucaccaccauccugaccgccgugaccuucugcuucgccagcggccagaacaucaccgaggaguucuaccagagcaccugcagcgccgugagcaagggcuaccugagcgcccugagaaccggcugguacaccagcgugaucaccaucgagcugagcaacaucaaggagaacaagugcaacggcaccgacgccaaggugaagcugaucaagcaggagcuggacaaguacaagaacgccgugaccgagcugcagcugcugaugcagagcacccccgccaccaacaacagagccagaagagagcugcccagauucaugaacuacacccugaacaacgccaagaagaccaacgugacccugagcaagaagagaaagagaagauuccugggcuuccugcugggcgugggcagcgccaucgccagcggcguggccgugugcaaggugcugcaccuggagggcgaggugaacaagaucaagagcgcccugcugagcaccaacaaggccguggugagccugagcaacggcgugagcgugcugaccuucaaggugcuggaccugaagaacuacaucgacaagcagcugcugcccauccugaacaagcagagcugcagcaucagcaacaucgagaccgugaucgaguuccagcagaagaacaacagacugcuggagaucaccagagaguucagcgugaacgccggcgugaccacccccgugagcaccuacaugcugaccaacagcgagcugcugagccugaucaacgacaugcccaucaccaacgaccagaagaagcugaugagcaacaacgugcagaucgugagacagcagagcuacagcaucaugugcaucaucaaggaggaggugcuggccuacguggugcagcugccccuguacggcgugaucgacacccccugcuggaagcugcacaccagcccccugugcaccaccaacaccaaggagggcagcaacaucugccugaccagaaccgacagaggcugguacugcgacaacgccggcagcgugagcuucuucccccaggccgagaccugcaaggugcagagcaacagaguguucugcgacaccaugaacagccugacccugcccagcgaggugaaccugugcaacguggacaucuucaaccccaaguacgacugcaagaucaugaccagcaagaccgacgugagcagcagcgugaucaccagccugggcgccaucgugagcugcuacggcaagaccaagugcaccgccagcaacaagaacagaggcaucaucaagaccuucagcaacggcugcgacuacgugagcaacaagggcguggacaccgugagcgugggcaacacccuguacuacgugaacaagcaggagggcaagagccuguacgugaagggcgagcccaucaucaacuucuacgacccccugguguuccccagcgacgaguucgacgccagcaucagccaggugaacgagaagaucaaccagagccuggccuucaucagaaagagcgacgagcugcugcacaacgugaacgccggcaagagcaccaccaacaucaugaucaccaccaucaucaucgugaucaucgugauccugcugagccugaucgccgugggccugcugcuguacugcaaggccagaugaggacuaguggaagcauuuuccuggcugauuaaaagaaauuacucagcuauggucaucuguuccuguuagaaggcuaugcagcauauuauauacuaugcgcauguuaugaaaugcauaauaaaaaauuuuaaaaaaucuaaaagaucuaaaaaaaaaaaaaaaaaaaaaaaaaaaaaaaaaaaaaaaaaaaaaaaaaaaaaaaaaaaaaaaaugcaucccccccccccccccccccccccccccccccaaaggcucuuuucagagccaccagaauu

SEQ ID NO: 1425 - RNA, 2014 nt, Artificial Sequence
  mRNA product Design d-4 comprising derived and/or modified sequence from HRSV(A2)__F-del_DSCav1 (opt5)
gggagagucccgcagucggcguccagcggcucugcuuguucgugugugugucguugcaggccuuauucaagcuuaccauggagcugcucauccugaaggccaacgcuauuaccacaauccuuacggccgugaccuucugcuuugcgagcggccagaauauuacagaagaguucuaccaauccaccuguucugcugucagcaaaggguaucuguccgcccucagaacaggaugguacaccucuguuaucacaauugaacugagcaacaucaaggagaauaaaugcaacggcaccgacgccaaggugaaacuuaucaagcaggaacuggauaaguauaaaaaugcugugacggagcuccagcugcugaugcaguccacccccgccacaaacaaucgggcucgcagagagcucccucgguuuaugaacuacacccugaauaacgccaagaaaacaaaugucacccuuucuaagaaacgcaagagacgguuccugggguuucuccugggagugggcagcgcgauugccuccgggguugcuguguguaagguccuucaccuggaaggagaggugaacaaaaucaagagcgcccuccugucuacgaauaaagcuguugugucccugagcaacggcgucucugugcucacauucaaggugcuggaccuuaaaaauuauauugauaagcaacugcucccgauccugaacaaacaguccugcagcauuucuaacaucgaaaccgucauugaguuucagcagaagaauaaccgccuucuggagaucacaagagaauuuuccguuaaugccggcgugaccacccccgugagcacauacaugcucacgaacuccgagcugcugucucucaucaaugacaugccuauuaccaacgaucaaaagaaacugaugagcaauaacguccagaucgugcggcagcaguccuauagcauuauguguaucauuaaggaagagguucuugcguacgugguccaacugccccucuacggggugaucgacacaccuugcuggaaacugcauaccucuccccuuuguacaaccaauacgaaggaaggauccaacaucugccugacacgcaccgauagaggcugguauugugacaaugccgggagcguuucuuucuucccucaggcugagaccugcaaagugcagagcaaccgggucuuuugugauacaaugaacucccucacccugccgucugaggugaaucugugcaaugucgacauuuucaaccccaaguacgauugcaagaucaugacaagcaaaacggacguguccagcucuguuauuaccucccucggagccaucgugagcuguuauggcaagacaaaaugcaccgcuucuaacaagaaucgcgggauuaucaaaacauuuuccaacggaugugauuacgucagcaauaagggcguggacaccguuuccgugggcaacacgcuguauuacgucaauaagcaagaagggaaaucucuuuaugugaagggagagccuaucauuaacuucuacgacccccugguguucccuagcgaugaauuugacgccuccaucucucagguuaaugagaaaauuaaccagagccucgccuucaucagaaaguccgaugaacugcugcacaaugucaacgcuggcaaaagcaccacaaauauuaugaucaccacaauuaucaucgugauuaucgugauucuucucucucugaucgcggucgggcugcuccuguacugcaaggcccggugaggacuaguggaagcauuuuccuggcugauuaaaagaaauuacucagcuauggucaucuguuccuguuagaaggcuaugcagcauauuauauacuaugcgcauguuaugaaaugcauaauaaaaaauuuuaaaaaaucuaaaagaucuaaaaaaaaaaaaaaaaaaaaaaaaaaaaaaaaaaaaaaaaaaaaaaaaaaaaaaaaaaaaaaaaugcaucccccccccccccccccccccccccccccccaaaggcucuuuucagagccaccagaauu

SEQ ID NO: 1426 - RNA, 2014 nt, Artificial Sequence
  mRNA product Design d-4 comprising derived and/or modified sequence from HRSV(A2)__F-del_DSCav1 (opt6)
gggagagucccgcagucggcguccagcggcucugcuuguucgugugugugucguugcaggccuuauucaagcuuaccauggaacuauuaauauuaaaagcaaaugcuauuaccacaauacuuacugcuguaaccuucugcuuugccucuggccaaaacauaacagaagaauuuuaucaaucaacuugcuccgcuguaagcaaaggcuaccuaucagcauuacgcaccggcugguacacaucaguaauaacaauagaacuauccaacauaaaagaaaauaaaugcaacggaacagacgcaaaaguaaaauuaauaaaacaagaacucgacaaauacaaaaacgcaguaacagaauuacaacuacuaaugcaaaguacuccagccaccaacaacagagcaagaagagaauuaccacgauuuaugaacuacacacuaaacaaugcaaaaaaaacaaacguaacacuaucaaaaaaacguaaacgcagauucuuaggcuuccuccuagguguaggcucagcaaucgccucaggaguggcaguuuguaaaguacuacaccuagaaggagaaguaaacaaaaucaaaucugcccuuuuaucgacaaacaaagcaguaguaucguuauccaauggagucucaguauugacauucaaaguauuagaccuaaaaaauuauauagauaaacaacucuuaccuaucuuaaauaaacaaagcugcucaauaaguaacauagaaaccguaauagaauuucaacaaaaaaacaauagacuccuugagaucacucgagaauuuucaguaaacgcagguguaacaacaccaguaagcacauacaugcuaacaaauagugaacuauuaucucuaauuaacgauaugcccauaaccaacgaucaaaaaaaacucaugaguaacaacguacaaauaguaagacaacaauccuauagcauaaugugcauuauaaaagaagaaguacuagcauauguaguccaacuaccacuauacggcguaauagacacaccaugcuggaaacuacacaccucaccccuaugcacaacaaauacaaaagaaggaucaaacauaugcuuaaccaggacagacagaggcugguacugcgauaacgcaggaucuguuucauucuucccccaagcagaaacaugcaaaguacaaucaaacagaguauuuugugauaccaugaacucacucacauuaccauccgaagucaaccucugcaacguagacauauucaaccccaaauacgacugcaaaauaaugaccucaaaaacagauguaucaucaucaguaaucacaucacuaggagcuaucguaucuuguuauggaaaaacaaaaugcacagcauccaacaaaaacagaggaauuaucaaaacauucucaaauggaugugacuauguaucaaacaaaggaguagacaccguaagcguaggcaauacacuauauuacguaaauaaacaagaaggaaaaucacuauacguaaaaggugaaccaauaauaaacuucuaugacccccuaguauucccaucagaugaauuugacgcaagcauaucacaagucaacgaaaaaauaaaccaaucacuggcauucauucgcaaaucagaugaacuucuccacaacguaaacgcugguaaaagcacuacaaacauaaugauaacaacaaucaucauugucauaauaguuauucuauuaucacuaaucgcaguaggauuacuacuauacuguaaagcgagguaaggacuaguggaagcauuuuccuggcugauuaaaagaaauuacucagcuauggucaucuguuccuguuagaaggcuaugcagcauauuauauacuaugcgcauguuaugaaaugcauaauaaaaaauuuuaaaaaaucuaaaagaucuaaaaaaaaaaaaaaaaaaaaaaaaaaaaaaaaaaaaaaaaaaaaaaaaaaaaaaaaaaaaaaaaugcaucccccccccccccccccccccccccccccccaaaggcucuuuucagagccaccagaauu

SEQ ID NO: 1427 - RNA, 2014 nt, Artificial Sequence
  mRNA product Design d-4 comprising derived and/or modified sequence from HRSV(A2)__F-del_DSCav1 (opt11)
gggagagucccgcagucggcguccagcggcucugcuuguucgugugugugucguugcaggccuuauucaagcuuaccauggagcugcucauccugaaggccaacgccaucaccacaauccugacggcggugaccuucugcuucgccagcggccagaacaucaccgaggaguucuaccaguccacgugcagcgccgucuccaagggguaccucagcgcccugcgaaccggcugguacaccuccgugaucaccaucgagcugucaaacaucaaggagaacaagugcaacgggaccgaugccaagguuaagcucaucaagcaggagcuggacaaguacaagaacgcggucacggagcugcagcuccugaugcaguccacuccggcaaccaacaaccgcgccaggcgcgagcugccccgguucaugaacuacacccucaacaacgccaagaagacgaaugugacccugagcaagaagcgcaagcggcgcuuccugggcuuccuccuaggggugggcuccgccaucgcgagcggcgucgccgugugcaagguguugcaccucgagggggaggucaacaagaucaagagcgcccugcuguccaccaacaaggccgugguaagccucuccaacggcgucagcguucugaccuucaaggugcuggaccucaagaacuauaucgacaagcagcugcugcccauccugaacaagcagagcugcuccaucucaaacaucgaaacggugauugaguuccagcagaagaacaaccggcuccuggaaaucacccgcgaguucagcgugaacgccggggucaccacccccguguccacguacaugcugaccaacagcgagcuccuaucccugaucaacgacaugccgaucaccaacgaccagaagaagcucaugagcaacaacgugcagaucguccggcagcaguccuacagcaucaugugcaucaucaaggaagaggugcuggcguacgugguccagcugccccucuacggcgugaucgacacccccugcuggaagcugcacacgagcccccugugcacaaccaacaccaaggagggguccaacaucugccucacgcgcaccgaccggggcugguacugcgacaacgccggcagcgucuccuucuucccgcaggccgagaccugcaaggugcagagcaaccgcguguucugcgacaccaugaacucccugacgcugcccucugagguaaaccucugcaacgucgacaucuucaaccccaaguacgacugcaagaucaugaccuccaagacagacgugagcuccagcgugaucacaucccugggggccaucgucagcugcuacggcaagacuaaguguacugccagcaacaagaaccgggggaucaucaagaccuucuccaacggcugcgacuacgugagcaacaagggcguggacaccguguccgucgggaacacccuguacuacguuaauaagcaggagggcaagagccucuacgugaaaggggagcccaucauuaacuucuacgacccacugguuuuccccuccgacgaguucgacgcgagcaucucccaggugaacgagaagaucaaccagagccuggccuucauccgcaaguccgacgagcugcuccacaacgugaacgccggcaagagcacgaccaacaucaugaucaccaccaucaucaucgugaucaucgugauucugcugucccucaucgccguggggcugcugcuuuacugcaaggcccggugaggacuaguggaagcauuuuccuggcugauuaaaagaaauuacucagcuauggucaucuguuccuguuagaaggcuaugcagcauauuauauacuaugcgcauguuaugaaaugcauaauaaaaaauuuuaaaaaaucuaaaagaucuaaaaaaaaaaaaaaaaaaaaaaaaaaaaaaaaaaaaaaaaaaaaaaaaaaaaaaaaaaaaaaaaugcaucccccccccccccccccccccccccccccccaaaggcucuuuucagagccaccagaauu

SEQ ID NO: 1428 - RNA, 2111 nt, Artificial Sequence
  mRNA product Design d-5 comprising derived and/or modified sequence from HRSV(A2)__F-del_DSCav1 (opt1)
gggagagggcgcuuggcuugcaaggacccugagcugcggcauugaagcacacccaacccaacucgacugaagucagccucacugaaccggaucugagaaucuucucucucugggcuugccagggcucuccgaaccuagcuagcauccucuucaauuccaacuagaaagcuuaccauggagcugcucauccugaaggccaacgccaucaccaccauccugacggcggugaccuucugcuucgccagcggccagaacaucaccgaggaguucuaccaguccacgugcagcgccgucuccaagggguaccucagcgcccugcggaccggcugguacaccuccgugaucaccaucgagcugagcaacaucaaggagaacaagugcaacgggaccgacgccaaggugaagcucaucaagcaggagcuggacaaguacaagaacgcggucacggagcugcagcuccugaugcaguccaccccggcaaccaacaaccgcgcccggcgcgagcugccccgguucaugaacuacacccucaacaacgccaagaagacgaacgugacccugagcaagaagcgcaagcggcgcuuccugggcuuccuccugggggugggcuccgccaucgcgagcggcgucgccgugugcaaggugcugcaccucgagggggaggucaacaagaucaagagcgcccugcuguccaccaacaaggccguggugagccucuccaacggcgucagcgugcugaccuucaaggugcuggaccucaagaacuacaucgacaagcagcugcugcccauccugaacaagcagagcugcuccaucagcaacaucgagacggugaucgaguuccagcagaagaacaaccggcuccuggagaucacccgcgaguucagcgugaacgccggggucaccacccccguguccacguacaugcugaccaacagcgagcuccugucccugaucaacgacaugccgaucaccaacgaccagaagaagcucaugagcaacaacgugcagaucguccggcagcaguccuacagcaucaugugcaucaucaaggaggaggugcuggcguacgugguccagcugccccucuacggcgugaucgacacccccugcuggaagcugcacacgagcccccugugcaccaccaacaccaaggagggguccaacaucugccucacgcgcaccgaccggggcugguacugcgacaacgccggcagcgucuccuucuucccgcaggccgagaccugcaaggugcagagcaaccgcguguucugcgacaccaugaacucccugacgcugcccagcgagguaaaccucugcaacgucgacaucuucaaccccaaguacgacugcaagaucaugaccuccaagaccgacgugagcuccagcgugaucaccucccugggggccaucgucagcugcuacggcaagacgaagugcaccgccagcaacaagaaccgggggaucaucaagaccuucuccaacggcugcgacuacgugagcaacaagggcguggacaccguguccgucgggaacacccuguacuacgugaacaagcaggagggcaagagccucuacgugaagggggagcccaucaucaacuucuacgacccgcuggucuuccccuccgacgaguucgacgcgagcaucucccaggugaacgagaagaucaaccagagccuggccuucauccgcaaguccgacgagcugcuccacaacgugaacgccggcaagagcacgaccaacaucaugaucaccaccaucaucaucgucaucaucgugauccugcugucccucaucgccguggggcugcugcucuacugcaaggcccggugaggacuaguggaagcauuuuccuggcugauuaaaagaaauuacucagcuauggucaucuguuccuguuagaaggcuaugcagcauauuauauacuaugcgcauguuaugaaaugcauaauaaaaaauuuuaaaaaaucuaaaagaucuaaaaaaaaaaaaaaaaaaaaaaaaaaaaaaaaaaaaaaaaaaaaaaaaaaaaaaaaaaaaaaaaugcaucccccccccccccccccccccccccccccccaaaggcucuuuucagagccaccagaauu

SEQ ID NO: 1429 - RNA, 2111 nt, Artificial Sequence
  mRNA product Design d-5 comprising derived and/or modified sequence from HRSV(A2)__F-del_DSCav1 (opt1)
gggagagggcgcuuggcuugcaaggacccugagcugcggcauugaagcacacccaacccaacucgacugaagucagccucacugaaccggaucugagaaucuucucucucugggcuugccagggcucuccgaaccuagcuagcauccucuucaauuccaacuagaaagcuuaccauggagcugcucauccugaaggccaacgccaucaccaccauccugacggcggugaccuucugcuucgccagcggccagaacaucaccgaggaguucuaccaguccacgugcagcgccgucuccaagggguaccucagcgcccugcgcaccggcugguacaccuccgugaucaccaucgagcugagcaacaucaaggagaacaagugcaacgggaccgacgccaaggugaagcucaucaagcaggagcuggacaaguacaagaacgcggucacggagcugcagcuccugaugcaguccacccccgccaccaacaaccgggcccgccgggagcugccgcgcuucaugaacuacacccucaacaacgccaagaagacgaacgugacccugagcaagaagcggaagcgccgguuccugggcuuccuccugggggugggcuccgcgaucgccagcggcgucgccgugugcaaggugcugcaccucgagggggaggucaacaagaucaaguccgcccugcugagcaccaacaaggccguggugucccucagcaacggcgucuccgugcugaccuucaaggugcuggaccucaagaacuacaucgacaagcagcugcugcccauccucaacaagcagagcugcuccaucagcaacaucgagacggucaucgaguuccagcagaagaacaaccgccugcuggagaucacccgggaguucuccgugaacgcgggggugaccacccccgucagcacguacaugcucaccaacagcgagcugcugucccucaucaacgacaugcccaucaccaacgaccagaagaagcugaugagcaacaacgugcagaucgugcgccagcaguccuacagcaucaugugcaucaucaaggaggagguccuggccuacguggugcagcucccgcuguacggcgucaucgacacccccugcuggaagcugcacacgagcccccucugcaccaccaacaccaaggaggggagcaacaucugccugacgcggaccgaccgcggcugguacugcgacaacgccggcuccgugagcuucuucccccaggccgagaccugcaagguccaguccaaccggguguucugcgacaccaugaacagccugacgcucccguccgaggugaaccugugcaacgucgacaucuucaaccccaaguacgacugcaagaucaugaccagcaagaccgacguguccagcuccgugaucaccagccugggggccaucgucuccugcuacggcaagacgaagugcaccgcgagcaacaagaaccgcgggaucaucaagaccuucuccaacggcugcgacuacgugagcaacaagggcguggacaccgucagcguggggaacacccucuacuacgugaacaagcaggagggcaagucccuguacgucaagggggagcccaucaucaacuucuacgacccccugguguucccgagcgacgaguucgacgccuccaucagccaggugaacgagaagaucaaccagucccucgccuucauccggaaguccgacgagcugcugcacaacgucaacgccggcaaguccacgaccaacaucaugaucaccaccaucaucaucgugaucaucgugauccugcucagccugaucgccgucgggcugcuccuguacugcaaggcgcgcugaggacuaguggaagcauuuuccuggcugauuaaaagaaauuacucagcuauggucaucuguuccuguuagaaggcuaugcagcauauuauauacuaugcgcauguuaugaaaugcauaauaaaaaauuuuaaaaaaucuaaaagaucuaaaaaaaaaaaaaaaaaaaaaaaaaaaaaaaaaaaaaaaaaaaaaaaaaaaaaaaaaaaaaaaaugcaucccccccccccccccccccccccccccccccaaaggcucuuuucagagccaccagaauu

SEQ ID NO: 1430 - RNA, 2111 nt, Artificial Sequence
  mRNA product Design d-5 comprising derived and/or modified sequence from HRSV(A2)__F-del_DSCav1 (opt2)
gggagagggcgcuuggcuugcaaggacccugagcugcggcauugaagcacacccaacccaacucgacugaagucagccucacugaaccggaucugagaaucuucucucucugggcuugccagggcucuccgaaccuagcuagcauccucuucaauuccaacuagaaagcuuaccauggagcuccucauccucaaggccaacgccaucaccaccauccucaccgccgucaccuucugcuucgccuccggccagaacaucaccgaggaguucuaccaguccaccugcuccgccgucuccaagggcuaccucuccgcccuccgcaccggcugguacaccuccgucaucaccaucgagcucuccaacaucaaggagaacaagugcaacggcaccgacgccaaggucaagcucaucaagcaggagcucgacaaguacaagaacgccgucaccgagcuccagcuccucaugcaguccacccccgccaccaacaaccgcgcccgccgcgagcucccccgcuucaugaacuacacccucaacaacgccaagaagaccaacgucacccucuccaagaagcgcaagcgccgcuuccucggcuuccuccucggcgucggcuccgccaucgccuccggcgucgccgucugcaagguccuccaccucgagggcgaggucaacaagaucaaguccgcccuccucuccaccaacaaggccgucgucucccucuccaacggcgucuccguccucaccuucaagguccucgaccucaagaacuacaucgacaagcagcuccuccccauccucaacaagcaguccugcuccaucuccaacaucgagaccgucaucgaguuccagcagaagaacaaccgccuccucgagaucacccgcgaguucuccgucaacgccggcgucaccacccccgucuccaccuacaugcucaccaacuccgagcuccucucccucaucaacgacaugcccaucaccaacgaccagaagaagcucauguccaacaacguccagaucguccgccagcaguccuacuccaucaugugcaucaucaaggaggagguccucgccuacgucguccagcucccccucuacggcgucaucgacacccccugcuggaagcuccacaccuccccccucugcaccaccaacaccaaggagggcuccaacaucugccucacccgcaccgaccgcggcugguacugcgacaacgccggcuccgucuccuucuucccccaggccgagaccugcaagguccaguccaaccgcgucuucugcgacaccaugaacucccucacccuccccuccgaggucaaccucugcaacgucgacaucuucaaccccaaguacgacugcaagaucaugaccuccaagaccgacgucuccuccuccgucaucaccucccucggcgccaucgucuccugcuacggcaagaccaagugcaccgccuccaacaagaaccgcggcaucaucaagaccuucuccaacggcugcgacuacgucuccaacaagggcgucgacaccgucuccgucggcaacacccucuacuacgucaacaagcaggagggcaagucccucuacgucaagggcgagcccaucaucaacuucuacgacccccucgucuuccccuccgacgaguucgacgccuccaucucccaggucaacgagaagaucaaccagucccucgccuucauccgcaaguccgacgagcuccuccacaacgucaacgccggcaaguccaccaccaacaucaugaucaccaccaucaucaucgucaucaucgucauccuccucucccucaucgccgucggccuccuccucuacugcaaggcccgcugaggacuaguggaagcauuuuccuggcugauuaaaagaaauuacucagcuauggucaucuguuccuguuagaaggcuaugcagcauauuauauacuaugcgcauguuaugaaaugcauaauaaaaaauuuuaaaaaaucuaaaagaucuaaaaaaaaaaaaaaaaaaaaaaaaaaaaaaaaaaaaaaaaaaaaaaaaaaaaaaaaaaaaaaaaugcaucccccccccccccccccccccccccccccccaaaggcucuuuucagagccaccagaauu

SEQ ID NO: 1431 - RNA, 2111 nt, Artificial Sequence
  mRNA product Design d-5 comprising derived and/or modified sequence from HRSV(A2)__F-del_DSCav1 (opt3)
gggagagggcgcuuggcuugcaaggacccugagcugcggcauugaagcacacccaacccaacucgacugaagucagccucacugaaccggaucugagaaucuucucucucugggcuugccagggcucuccgaaccuagcuagcauccucuucaauuccaacuagaaagcuuaccauggagcugcucauccuuaaggccaacgcuauuaccacaauacugacugcagugacguucugcuuugccagcggccagaauaucaccgaagaguucuaccaauccacauguucugcggucucaaaaggguauuugagugcuuuaagaacuggaugguacaccagcguuauuacaaucgaacuguccaacauuaaggagaauaaaugcaacgguaccgacgccaaggugaaacuaaucaagcaggaacucgauaaguauaaaaaugcaguaacugagcugcagcuucugaugcagucuacacccgccaccaacaauagggcucggcgcgaguugccucgauuuaugaacuacacgcucaauaacgcaaagaaaacuaaugugacccugucgaagaaacguaagagaagguuccugggcuuucucuuaggggucggaucagccauagcuagcggcguggccguuuguaaggugcugcaccuugaaggugaggucaacaaaaucaagagugcguugcuguccacaaauaaagcagugguaucucuaagcaacgggguuuccgugcucacuuucaagguccuggaccuuaaaaauuauauugauaagcaacuguugccaauccucaacaaacagucaugcaguauuagcaacaucgaaaccgugauagaguuucagcagaagaauaaccggcuguuagagauuacacgcgaguucucugugaaugccggagucaccacgccgguuuccacuuacaugcugacaaacucagaacuccuuagccugaucaaugacaugcccauuaccaacgaucaaaagaaauugaugaguaauaacgugcagaucguaagacagcagucuuauuccaucauguguauuauaaaggaagaggugcuagcuuacgucgugcaacugccucucuacggcguuaucgacacuccaugcuggaaacugcauacaagcccccuuuguaccacgaauaccaaggaaggcucgaacauuugccugacaaggacugaucgggggugguauugugacaaugccggaucuguguccuuuuucccucaggcagagaccugcaaaguccagucaaaccgcguguuuugugauacaaugaauaguuugacucucccaagcgagguaaaccugugcaauguugacaucuucaaccccaaguacgauugcaagauaaugaccuccaaaacagacgugucuagcucagucauuaccaguuuaggugcuaucguguccuguuauggcaagacuaaaugcacggccagcaacaagaaucgagggaucauuaaaacauuuucuaacggaugugauuacgucucaaauaagggcguggacaccguuaguguggguaacacucuguauuacguaaauaagcaagaagggaaaagccuauaugucaagggagagccuaucauuaacuucuacgacccacucguguucccguccgaugaauuugacgcgucuauaucgcagguuaaugagaaaaucaaccagagccuggccuucauuagaaaguccgaugaacuuuugcacaaugugaacgcaggcaaaucaaccacaaauaucaugaucaccacuauuauaaucgucauuaucgugauucugcucagucugaucgcuguaggccuucuguuguacugcaaggccaggugaggacuaguggaagcauuuuccuggcugauuaaaagaaauuacucagcuauggucaucuguuccuguuagaaggcuaugcagcauauuauauacuaugcgcauguuaugaaaugcauaauaaaaaauuuuaaaaaaucuaaaagaucuaaaaaaaaaaaaaaaaaaaaaaaaaaaaaaaaaaaaaaaaaaaaaaaaaaaaaaaaaaaaaaaaugcaucccccccccccccccccccccccccccccccaaaggcucuuuucagagccaccagaauu

SEQ ID NO: 1432 - RNA, 2111 nt, Artificial Sequence
  mRNA product Design d-5 comprising derived and/or modified sequence from HRSV(A2)__F-del_DSCav1 (opt4)
gggagagggcgcuuggcuugcaaggacccugagcugcggcauugaagcacacccaacccaacucgacugaagucagccucacugaaccggaucugagaaucuucucucucugggcuugccagggcucuccgaaccuagcuagcauccucuucaauuccaacuagaaagcuuaccauggagcugcugauccugaaggccaacgccaucaccaccauccugaccgccgugaccuucugcuucgccagcggccagaacaucaccgaggaguucuaccagagcaccugcagcgccgugagcaagggcuaccugagcgcccugagaaccggcugguacaccagcgugaucaccaucgagcugagcaacaucaaggagaacaagugcaacggcaccgacgccaaggugaagcugaucaagcaggagcuggacaaguacaagaacgccgugaccgagcugcagcugcugaugcagagcacccccgccaccaacaacagagccagaagagagcugcccagauucaugaacuacacccugaacaacgccaagaagaccaacgugacccugagcaagaagagaaagagaagauuccugggcuuccugcugggcgugggcagcgccaucgccagcggcguggccgugugcaaggugcugcaccuggagggcgaggugaacaagaucaagagcgcccugcugagcaccaacaaggccguggugagccugagcaacggcgugagcgugcugaccuucaaggugcuggaccugaagaacuacaucgacaagcagcugcugcccauccugaacaagcagagcugcagcaucagcaacaucgagaccgugaucgaguuccagcagaagaacaacagacugcuggagaucaccagagaguucagcgugaacgccggcgugaccacccccgugagcaccuacaugcugaccaacagcgagcugcugagccugaucaacgacaugcccaucaccaacgaccagaagaagcugaugagcaacaacgugcagaucgugagacagcagagcuacagcaucaugugcaucaucaaggaggaggugcuggccuacguggugcagcugccccuguacggcgugaucgacacccccugcuggaagcugcacaccagcccccugugcaccaccaacaccaaggagggcagcaacaucugccugaccagaaccgacagaggcugguacugcgacaacgccggcagcgugagcuucuucccccaggccgagaccugcaaggugcagagcaacagaguguucugcgacaccaugaacagccugacccugcccagcgaggugaaccugugcaacguggacaucuucaaccccaaguacgacugcaagaucaugaccagcaagaccgacgugagcagcagcgugaucaccagccugggcgccaucgugagcugcuacggcaagaccaagugcaccgccagcaacaagaacagaggcaucaucaagaccuucagcaacggcugcgacuacgugagcaacaagggcguggacaccgugagcgugggcaacacccuguacuacgugaacaagcaggagggcaagagccuguacgugaagggcgagcccaucaucaacuucuacgacccccugguguuccccagcgacgaguucgacgccagcaucagccaggugaacgagaagaucaaccagagccuggccuucaucagaaagagcgacgagcugcugcacaacgugaacgccggcaagagcaccaccaacaucaugaucaccaccaucaucaucgugaucaucgugauccugcugagccugaucgccgugggccugcugcuguacugcaaggccagaugaggacuaguggaagcauuuuccuggcugauuaaaagaaauuacucagcuauggucaucuguuccuguuagaaggcuaugcagcauauuauauacuaugcgcauguuaugaaaugcauaauaaaaaauuuuaaaaaaucuaaaagaucuaaaaaaaaaaaaaaaaaaaaaaaaaaaaaaaaaaaaaaaaaaaaaaaaaaaaaaaaaaaaaaaaugcaucccccccccccccccccccccccccccccccaaaggcucuuuucagagccaccagaauu

SEQ ID NO: 1433 - RNA, 2111 nt, Artificial Sequence
  mRNA product Design d-5 comprising derived and/or modified sequence from HRSV(A2)__F-del_DSCav1 (opt5)
gggagagggcgcuuggcuugcaaggacccugagcugcggcauugaagcacacccaacccaacucgacugaagucagccucacugaaccggaucugagaaucuucucucucugggcuugccagggcucuccgaaccuagcuagcauccucuucaauuccaacuagaaagcuuaccauggagcugcucauccugaaggccaacgcuauuaccacaauccuuacggccgugaccuucugcuuugcgagcggccagaauauuacagaagaguucuaccaauccaccuguucugcugucagcaaaggguaucuguccgcccucagaacaggaugguacaccucuguuaucacaauugaacugagcaacaucaaggagaauaaaugcaacggcaccgacgccaaggugaaacuuaucaagcaggaacuggauaaguauaaaaaugcugugacggagcuccagcugcugaugcaguccacccccgccacaaacaaucgggcucgcagagagcucccucgguuuaugaacuacacccugaauaacgccaagaaaacaaaugucacccuuucuaagaaacgcaagagacgguuccugggguuucuccugggagugggcagcgcgauugccuccgggguugcuguguguaagguccuucaccuggaaggagaggugaacaaaaucaagagcgcccuccugucuacgaauaaagcuguugugucccugagcaacggcgucucugugcucacauucaaggugcuggaccuuaaaaauuauauugauaagcaacugcucccgauccugaacaaacaguccugcagcauuucuaacaucgaaaccgucauugaguuucagcagaagaauaaccgccuucuggagaucacaagagaauuuuccguuaaugccggcgugaccacccccgugagcacauacaugcucacgaacuccgagcugcugucucucaucaaugacaugccuauuaccaacgaucaaaagaaacugaugagcaauaacguccagaucgugcggcagcaguccuauagcauuauguguaucauuaaggaagagguucuugcguacgugguccaacugccccucuacggggugaucgacacaccuugcuggaaacugcauaccucuccccuuuguacaaccaauacgaaggaaggauccaacaucugccugacacgcaccgauagaggcugguauugugacaaugccgggagcguuucuuucuucccucaggcugagaccugcaaagugcagagcaaccgggucuuuugugauacaaugaacucccucacccugccgucugaggugaaucugugcaaugucgacauuuucaaccccaaguacgauugcaagaucaugacaagcaaaacggacguguccagcucuguuauuaccucccucggagccaucgugagcuguuauggcaagacaaaaugcaccgcuucuaacaagaaucgcgggauuaucaaaacauuuuccaacggaugugauuacgucagcaauaagggcguggacaccguuuccgugggcaacacgcuguauuacgucaauaagcaagaagggaaaucucuuuaugugaagggagagccuaucauuaacuucuacgacccccugguguucccuagcgaugaauuugacgccuccaucucucagguuaaugagaaaauuaaccagagccucgccuucaucagaaaguccgaugaacugcugcacaaugucaacgcuggcaaaagcaccacaaauauuaugaucaccacaauuaucaucgugauuaucgugauucuucucucucugaucgcggucgggcugcuccuguacugcaaggcccggugaggacuaguggaagcauuuuccuggcugauuaaaagaaauuacucagcuauggucaucuguuccuguuagaaggcuaugcagcauauuauauacuaugcgcauguuaugaaaugcauaauaaaaaauuuuaaaaaaucuaaaagaucuaaaaaaaaaaaaaaaaaaaaaaaaaaaaaaaaaaaaaaaaaaaaaaaaaaaaaaaaaaaaaaaaugcaucccccccccccccccccccccccccccccccaaaggcucuuuucagagccaccagaauu

SEQ ID NO: 1434 - RNA, 2111 nt, Artificial Sequence
  mRNA product Design d-5 comprising derived and/or modified sequence from HRSV(A2)__F-del_DSCav1 (opt6)
gggagagggcgcuuggcuugcaaggacccugagcugcggcauugaagcacacccaacccaacucgacugaagucagccucacugaaccggaucugagaaucuucucucucugggcuugccagggcucuccgaaccuagcuagcauccucuucaauuccaacuagaaagcuuaccauggaacuauuaauauuaaaagcaaaugcuauuaccacaauacuuacugcuguaaccuucugcuuugccucuggccaaaacauaacagaagaauuuuaucaaucaacuugcuccgcuguaagcaaaggcuaccuaucagcauuacgcaccggcugguacacaucaguaauaacaauagaacuauccaacauaaaagaaaauaaaugcaacggaacagacgcaaaaguaaaauuaauaaaacaagaacucgacaaauacaaaaacgcaguaacagaauuacaacuacuaaugcaaaguacuccagccaccaacaacagagcaagaagagaauuaccacgauuuaugaacuacacacuaaacaaugcaaaaaaaacaaacguaacacuaucaaaaaaacguaaacgcagauucuuaggcuuccuccuagguguaggcucagcaaucgccucaggaguggcaguuuguaaaguacuacaccuagaaggagaaguaaacaaaaucaaaucugcccuuuuaucgacaaacaaagcaguaguaucguuauccaauggagucucaguauugacauucaaaguauuagaccuaaaaaauuauauagauaaacaacucuuaccuaucuuaaauaaacaaagcugcucaauaaguaacauagaaaccguaauagaauuucaacaaaaaaacaauagacuccuugagaucacucgagaauuuucaguaaacgcagguguaacaacaccaguaagcacauacaugcuaacaaauagugaacuauuaucucuaauuaacgauaugcccauaaccaacgaucaaaaaaaacucaugaguaacaacguacaaauaguaagacaacaauccuauagcauaaugugcauuauaaaagaagaaguacuagcauauguaguccaacuaccacuauacggcguaauagacacaccaugcuggaaacuacacaccucaccccuaugcacaacaaauacaaaagaaggaucaaacauaugcuuaaccaggacagacagaggcugguacugcgauaacgcaggaucuguuucauucuucccccaagcagaaacaugcaaaguacaaucaaacagaguauuuugugauaccaugaacucacucacauuaccauccgaagucaaccucugcaacguagacauauucaaccccaaauacgacugcaaaauaaugaccucaaaaacagauguaucaucaucaguaaucacaucacuaggagcuaucguaucuuguuauggaaaaacaaaaugcacagcauccaacaaaaacagaggaauuaucaaaacauucucaaauggaugugacuauguaucaaacaaaggaguagacaccguaagcguaggcaauacacuauauuacguaaauaaacaagaaggaaaaucacuauacguaaaaggugaaccaauaauaaacuucuaugacccccuaguauucccaucagaugaauuugacgcaagcauaucacaagucaacgaaaaaauaaaccaaucacuggcauucauucgcaaaucagaugaacuucuccacaacguaaacgcugguaaaagcacuacaaacauaaugauaacaacaaucaucauugucauaauaguuauucuauuaucacuaaucgcaguaggauuacuacuauacuguaaagcgagguaaggacuaguggaagcauuuuccuggcugauuaaaagaaauuacucagcuauggucaucuguuccuguuagaaggcuaugcagcauauuauauacuaugcgcauguuaugaaaugcauaauaaaaaauuuuaaaaaaucuaaaagaucuaaaaaaaaaaaaaaaaaaaaaaaaaaaaaaaaaaaaaaaaaaaaaaaaaaaaaaaaaaaaaaaaugcaucccccccccccccccccccccccccccccccaaaggcucuuuucagagccaccagaauu

SEQ ID NO: 1435 - RNA, 2111 nt, Artificial Sequence
  mRNA product Design d-5 comprising derived and/or modified sequence from HRSV(A2)__F-del_DSCav1 (opt11)
gggagagggcgcuuggcuugcaaggacccugagcugcggcauugaagcacacccaacccaacucgacugaagucagccucacugaaccggaucugagaaucuucucucucugggcuugccagggcucuccgaaccuagcuagcauccucuucaauuccaacuagaaagcuuaccauggagcugcucauccugaaggccaacgccaucaccacaauccugacggcggugaccuucugcuucgccagcggccagaacaucaccgaggaguucuaccaguccacgugcagcgccgucuccaagggguaccucagcgcccugcgaaccggcugguacaccuccgugaucaccaucgagcugucaaacaucaaggagaacaagugcaacgggaccgaugccaagguuaagcucaucaagcaggagcuggacaaguacaagaacgcggucacggagcugcagcuccugaugcaguccacuccggcaaccaacaaccgcgccaggcgcgagcugccccgguucaugaacuacacccucaacaacgccaagaagacgaaugugacccugagcaagaagcgcaagcggcgcuuccugggcuuccuccuaggggugggcuccgccaucgcgagcggcgucgccgugugcaagguguugcaccucgagggggaggucaacaagaucaagagcgcccugcuguccaccaacaaggccgugguaagccucuccaacggcgucagcguucugaccuucaaggugcuggaccucaagaacuauaucgacaagcagcugcugcccauccugaacaagcagagcugcuccaucucaaacaucgaaacggugauugaguuccagcagaagaacaaccggcuccuggaaaucacccgcgaguucagcgugaacgccggggucaccacccccguguccacguacaugcugaccaacagcgagcuccuaucccugaucaacgacaugccgaucaccaacgaccagaagaagcucaugagcaacaacgugcagaucguccggcagcaguccuacagcaucaugugcaucaucaaggaagaggugcuggcguacgugguccagcugccccucuacggcgugaucgacacccccugcuggaagcugcacacgagcccccugugcacaaccaacaccaaggagggguccaacaucugccucacgcgcaccgaccggggcugguacugcgacaacgccggcagcgucuccuucuucccgcaggccgagaccugcaaggugcagagcaaccgcguguucugcgacaccaugaacucccugacgcugcccucugagguaaaccucugcaacgucgacaucuucaaccccaaguacgacugcaagaucaugaccuccaagacagacgugagcuccagcgugaucacaucccugggggccaucgucagcugcuacggcaagacuaaguguacugccagcaacaagaaccgggggaucaucaagaccuucuccaacggcugcgacuacgugagcaacaagggcguggacaccguguccgucgggaacacccuguacuacguuaauaagcaggagggcaagagccucuacgugaaaggggagcccaucauuaacuucuacgacccacugguuuuccccuccgacgaguucgacgcgagcaucucccaggugaacgagaagaucaaccagagccuggccuucauccgcaaguccgacgagcugcuccacaacgugaacgccggcaagagcacgaccaacaucaugaucaccaccaucaucaucgugaucaucgugauucugcugucccucaucgccguggggcugcugcuuuacugcaaggcccggugaggacuaguggaagcauuuuccuggcugauuaaaagaaauuacucagcuauggucaucuguuccuguuagaaggcuaugcagcauauuauauacuaugcgcauguuaugaaaugcauaauaaaaaauuuuaaaaaaucuaaaagaucuaaaaaaaaaaaaaaaaaaaaaaaaaaaaaaaaaaaaaaaaaaaaaaaaaaaaaaaaaaaaaaaaugcaucccccccccccccccccccccccccccccccaaaggcucuuuucagagccaccagaauu

SEQ ID NO: 1436 - RNA, 1991 nt, Artificial Sequence
  mRNA product Design e-1 comprising derived and/or modified sequence from HRSV(A2)__F-del_DSCav1 (opt1)
gggagaauauaagcguuggcggagcgucgguuguagcacucugcgcgcccgcucuucugcugcuguuugucuacuuccuccugcuuccccgccgccgccgccgccaucaagcuuaccauggagcugcucauccugaaggccaacgccaucaccaccauccugacggcggugaccuucugcuucgccagcggccagaacaucaccgaggaguucuaccaguccacgugcagcgccgucuccaagggguaccucagcgcccugcggaccggcugguacaccuccgugaucaccaucgagcugagcaacaucaaggagaacaagugcaacgggaccgacgccaaggugaagcucaucaagcaggagcuggacaaguacaagaacgcggucacggagcugcagcuccugaugcaguccaccccggcaaccaacaaccgcgcccggcgcgagcugccccgguucaugaacuacacccucaacaacgccaagaagacgaacgugacccugagcaagaagcgcaagcggcgcuuccugggcuuccuccugggggugggcuccgccaucgcgagcggcgucgccgugugcaaggugcugcaccucgagggggaggucaacaagaucaagagcgcccugcuguccaccaacaaggccguggugagccucuccaacggcgucagcgugcugaccuucaaggugcuggaccucaagaacuacaucgacaagcagcugcugcccauccugaacaagcagagcugcuccaucagcaacaucgagacggugaucgaguuccagcagaagaacaaccggcuccuggagaucacccgcgaguucagcgugaacgccggggucaccacccccguguccacguacaugcugaccaacagcgagcuccugucccugaucaacgacaugccgaucaccaacgaccagaagaagcucaugagcaacaacgugcagaucguccggcagcaguccuacagcaucaugugcaucaucaaggaggaggugcuggcguacgugguccagcugccccucuacggcgugaucgacacccccugcuggaagcugcacacgagcccccugugcaccaccaacaccaaggagggguccaacaucugccucacgcgcaccgaccggggcugguacugcgacaacgccggcagcgucuccuucuucccgcaggccgagaccugcaaggugcagagcaaccgcguguucugcgacaccaugaacucccugacgcugcccagcgagguaaaccucugcaacgucgacaucuucaaccccaaguacgacugcaagaucaugaccuccaagaccgacgugagcuccagcgugaucaccucccugggggccaucgucagcugcuacggcaagacgaagugcaccgccagcaacaagaaccgggggaucaucaagaccuucuccaacggcugcgacuacgugagcaacaagggcguggacaccguguccgucgggaacacccuguacuacgugaacaagcaggagggcaagagccucuacgugaagggggagcccaucaucaacuucuacgacccgcuggucuuccccuccgacgaguucgacgcgagcaucucccaggugaacgagaagaucaaccagagccuggccuucauccgcaaguccgacgagcugcuccacaacgugaacgccggcaagagcacgaccaacaucaugaucaccaccaucaucaucgucaucaucgugauccugcugucccucaucgccguggggcugcugcucuacugcaaggcccggugaggacuaguguccaccugucccuccugggcugcuggauugucucguuuuccugccaaauaaacaggaucagcgcuuuacagaucuaaaaaaaaaaaaaaaaaaaaaaaaaaaaaaaaaaaaaaaaaaaaaaaaaaaaaaaaaaaaaaaaugcaucccccccccccccccccccccccccccccccaaaggcucuuuucagagccaccagaauu

SEQ ID NO: 1437 - RNA, 1991 nt, Artificial Sequence
  mRNA product Design e-1 comprising derived and/or modified sequence from HRSV(A2)__F-del_DSCav1 (opt1)
gggagaauauaagcguuggcggagcgucgguuguagcacucugcgcgcccgcucuucugcugcuguuugucuacuuccuccugcuuccccgccgccgccgccgccaucaagcuuaccauggagcugcucauccugaaggccaacgccaucaccaccauccugacggcggugaccuucugcuucgccagcggccagaacaucaccgaggaguucuaccaguccacgugcagcgccgucuccaagggguaccucagcgcccugcgcaccggcugguacaccuccgugaucaccaucgagcugagcaacaucaaggagaacaagugcaacgggaccgacgccaaggugaagcucaucaagcaggagcuggacaaguacaagaacgcggucacggagcugcagcuccugaugcaguccacccccgccaccaacaaccgggcccgccgggagcugccgcgcuucaugaacuacacccucaacaacgccaagaagacgaacgugacccugagcaagaagcggaagcgccgguuccugggcuuccuccugggggugggcuccgcgaucgccagcggcgucgccgugugcaaggugcugcaccucgagggggaggucaacaagaucaaguccgcccugcugagcaccaacaaggccguggugucccucagcaacggcgucuccgugcugaccuucaaggugcuggaccucaagaacuacaucgacaagcagcugcugcccauccucaacaagcagagcugcuccaucagcaacaucgagacggucaucgaguuccagcagaagaacaaccgccugcuggagaucacccgggaguucuccgugaacgcgggggugaccacccccgucagcacguacaugcucaccaacagcgagcugcugucccucaucaacgacaugcccaucaccaacgaccagaagaagcugaugagcaacaacgugcagaucgugcgccagcaguccuacagcaucaugugcaucaucaaggaggagguccuggccuacguggugcagcucccgcuguacggcgucaucgacacccccugcuggaagcugcacacgagcccccucugcaccaccaacaccaaggaggggagcaacaucugccugacgcggaccgaccgcggcugguacugcgacaacgccggcuccgugagcuucuucccccaggccgagaccugcaagguccaguccaaccggguguucugcgacaccaugaacagccugacgcucccguccgaggugaaccugugcaacgucgacaucuucaaccccaaguacgacugcaagaucaugaccagcaagaccgacguguccagcuccgugaucaccagccugggggccaucgucuccugcuacggcaagacgaagugcaccgcgagcaacaagaaccgcgggaucaucaagaccuucuccaacggcugcgacuacgugagcaacaagggcguggacaccgucagcguggggaacacccucuacuacgugaacaagcaggagggcaagucccuguacgucaagggggagcccaucaucaacuucuacgacccccugguguucccgagcgacgaguucgacgccuccaucagccaggugaacgagaagaucaaccagucccucgccuucauccggaaguccgacgagcugcugcacaacgucaacgccggcaaguccacgaccaacaucaugaucaccaccaucaucaucgugaucaucgugauccugcucagccugaucgccgucgggcugcuccuguacugcaaggcgcgcugaggacuaguguccaccugucccuccugggcugcuggauugucucguuuuccugccaaauaaacaggaucagcgcuuuacagaucuaaaaaaaaaaaaaaaaaaaaaaaaaaaaaaaaaaaaaaaaaaaaaaaaaaaaaaaaaaaaaaaaugcaucccccccccccccccccccccccccccccccaaaggcucuuuucagagccaccagaauu

SEQ ID NO: 1438 - RNA, 1991 nt, Artificial Sequence
  mRNA product Design e-1 comprising derived and/or modified sequence from HRSV(A2)__F-del_DSCav1 (opt2)
gggagaauauaagcguuggcggagcgucgguuguagcacucugcgcgcccgcucuucugcugcuguuugucuacuuccuccugcuuccccgccgccgccgccgccaucaagcuuaccauggagcuccucauccucaaggccaacgccaucaccaccauccucaccgccgucaccuucugcuucgccuccggccagaacaucaccgaggaguucuaccaguccaccugcuccgccgucuccaagggcuaccucuccgcccuccgcaccggcugguacaccuccgucaucaccaucgagcucuccaacaucaaggagaacaagugcaacggcaccgacgccaaggucaagcucaucaagcaggagcucgacaaguacaagaacgccgucaccgagcuccagcuccucaugcaguccacccccgccaccaacaaccgcgcccgccgcgagcucccccgcuucaugaacuacacccucaacaacgccaagaagaccaacgucacccucuccaagaagcgcaagcgccgcuuccucggcuuccuccucggcgucggcuccgccaucgccuccggcgucgccgucugcaagguccuccaccucgagggcgaggucaacaagaucaaguccgcccuccucuccaccaacaaggccgucgucucccucuccaacggcgucuccguccucaccuucaagguccucgaccucaagaacuacaucgacaagcagcuccuccccauccucaacaagcaguccugcuccaucuccaacaucgagaccgucaucgaguuccagcagaagaacaaccgccuccucgagaucacccgcgaguucuccgucaacgccggcgucaccacccccgucuccaccuacaugcucaccaacuccgagcuccucucccucaucaacgacaugcccaucaccaacgaccagaagaagcucauguccaacaacguccagaucguccgccagcaguccuacuccaucaugugcaucaucaaggaggagguccucgccuacgucguccagcucccccucuacggcgucaucgacacccccugcuggaagcuccacaccuccccccucugcaccaccaacaccaaggagggcuccaacaucugccucacccgcaccgaccgcggcugguacugcgacaacgccggcuccgucuccuucuucccccaggccgagaccugcaagguccaguccaaccgcgucuucugcgacaccaugaacucccucacccuccccuccgaggucaaccucugcaacgucgacaucuucaaccccaaguacgacugcaagaucaugaccuccaagaccgacgucuccuccuccgucaucaccucccucggcgccaucgucuccugcuacggcaagaccaagugcaccgccuccaacaagaaccgcggcaucaucaagaccuucuccaacggcugcgacuacgucuccaacaagggcgucgacaccgucuccgucggcaacacccucuacuacgucaacaagcaggagggcaagucccucuacgucaagggcgagcccaucaucaacuucuacgacccccucgucuuccccuccgacgaguucgacgccuccaucucccaggucaacgagaagaucaaccagucccucgccuucauccgcaaguccgacgagcuccuccacaacgucaacgccggcaaguccaccaccaacaucaugaucaccaccaucaucaucgucaucaucgucauccuccucucccucaucgccgucggccuccuccucuacugcaaggcccgcugaggacuaguguccaccugucccuccugggcugcuggauugucucguuuuccugccaaauaaacaggaucagcgcuuuacagaucuaaaaaaaaaaaaaaaaaaaaaaaaaaaaaaaaaaaaaaaaaaaaaaaaaaaaaaaaaaaaaaaaugcaucccccccccccccccccccccccccccccccaaaggcucuuuucagagccaccagaauu

SEQ ID NO: 1439 - RNA, 1991 nt, Artificial Sequence
  mRNA product Design e-1 comprising derived and/or modified sequence from HRSV(A2)__F-del_DSCav1 (opt3)
gggagaauauaagcguuggcggagcgucgguuguagcacucugcgcgcccgcucuucugcugcuguuugucuacuuccuccugcuuccccgccgccgccgccgccaucaagcuuaccauggagcugcucauccuuaaggccaacgcuauuaccacaauacugacugcagugacguucugcuuugccagcggccagaauaucaccgaagaguucuaccaauccacauguucugcggucucaaaaggguauuugagugcuuuaagaacuggaugguacaccagcguuauuacaaucgaacuguccaacauuaaggagaauaaaugcaacgguaccgacgccaaggugaaacuaaucaagcaggaacucgauaaguauaaaaaugcaguaacugagcugcagcuucugaugcagucuacacccgccaccaacaauagggcucggcgcgaguugccucgauuuaugaacuacacgcucaauaacgcaaagaaaacuaaugugacccugucgaagaaacguaagagaagguuccugggcuuucucuuaggggucggaucagccauagcuagcggcguggccguuuguaaggugcugcaccuugaaggugaggucaacaaaaucaagagugcguugcuguccacaaauaaagcagugguaucucuaagcaacgggguuuccgugcucacuuucaagguccuggaccuuaaaaauuauauugauaagcaacuguugccaauccucaacaaacagucaugcaguauuagcaacaucgaaaccgugauagaguuucagcagaagaauaaccggcuguuagagauuacacgcgaguucucugugaaugccggagucaccacgccgguuuccacuuacaugcugacaaacucagaacuccuuagccugaucaaugacaugcccauuaccaacgaucaaaagaaauugaugaguaauaacgugcagaucguaagacagcagucuuauuccaucauguguauuauaaaggaagaggugcuagcuuacgucgugcaacugccucucuacggcguuaucgacacuccaugcuggaaacugcauacaagcccccuuuguaccacgaauaccaaggaaggcucgaacauuugccugacaaggacugaucgggggugguauugugacaaugccggaucuguguccuuuuucccucaggcagagaccugcaaaguccagucaaaccgcguguuuugugauacaaugaauaguuugacucucccaagcgagguaaaccugugcaauguugacaucuucaaccccaaguacgauugcaagauaaugaccuccaaaacagacgugucuagcucagucauuaccaguuuaggugcuaucguguccuguuauggcaagacuaaaugcacggccagcaacaagaaucgagggaucauuaaaacauuuucuaacggaugugauuacgucucaaauaagggcguggacaccguuaguguggguaacacucuguauuacguaaauaagcaagaagggaaaagccuauaugucaagggagagccuaucauuaacuucuacgacccacucguguucccguccgaugaauuugacgcgucuauaucgcagguuaaugagaaaaucaaccagagccuggccuucauuagaaaguccgaugaacuuuugcacaaugugaacgcaggcaaaucaaccacaaauaucaugaucaccacuauuauaaucgucauuaucgugauucugcucagucugaucgcuguaggccuucuguuguacugcaaggccaggugaggacuaguguccaccugucccuccugggcugcuggauugucucguuuuccugccaaauaaacaggaucagcgcuuuacagaucuaaaaaaaaaaaaaaaaaaaaaaaaaaaaaaaaaaaaaaaaaaaaaaaaaaaaaaaaaaaaaaaaugcaucccccccccccccccccccccccccccccccaaaggcucuuuucagagccaccagaauu

SEQ ID NO: 1440 - RNA, 1991 nt, Artificial Sequence
  mRNA product Design e-1 comprising derived and/or modified sequence from HRSV(A2)__F-del_DSCav1 (opt4)
gggagaauauaagcguuggcggagcgucgguuguagcacucugcgcgcccgcucuucugcugcuguuugucuacuuccuccugcuuccccgccgccgccgccgccaucaagcuuaccauggagcugcugauccugaaggccaacgccaucaccaccauccugaccgccgugaccuucugcuucgccagcggccagaacaucaccgaggaguucuaccagagcaccugcagcgccgugagcaagggcuaccugagcgcccugagaaccggcugguacaccagcgugaucaccaucgagcugagcaacaucaaggagaacaagugcaacggcaccgacgccaaggugaagcugaucaagcaggagcuggacaaguacaagaacgccgugaccgagcugcagcugcugaugcagagcacccccgccaccaacaacagagccagaagagagcugcccagauucaugaacuacacccugaacaacgccaagaagaccaacgugacccugagcaagaagagaaagagaagauuccugggcuuccugcugggcgugggcagcgccaucgccagcggcguggccgugugcaaggugcugcaccuggagggcgaggugaacaagaucaagagcgcccugcugagcaccaacaaggccguggugagccugagcaacggcgugagcgugcugaccuucaaggugcuggaccugaagaacuacaucgacaagcagcugcugcccauccugaacaagcagagcugcagcaucagcaacaucgagaccgugaucgaguuccagcagaagaacaacagacugcuggagaucaccagagaguucagcgugaacgccggcgugaccacccccgugagcaccuacaugcugaccaacagcgagcugcugagccugaucaacgacaugcccaucaccaacgaccagaagaagcugaugagcaacaacgugcagaucgugagacagcagagcuacagcaucaugugcaucaucaaggaggaggugcuggccuacguggugcagcugccccuguacggcgugaucgacacccccugcuggaagcugcacaccagcccccugugcaccaccaacaccaaggagggcagcaacaucugccugaccagaaccgacagaggcugguacugcgacaacgccggcagcgugagcuucuucccccaggccgagaccugcaaggugcagagcaacagaguguucugcgacaccaugaacagccugacccugcccagcgaggugaaccugugcaacguggacaucuucaaccccaaguacgacugcaagaucaugaccagcaagaccgacgugagcagcagcgugaucaccagccugggcgccaucgugagcugcuacggcaagaccaagugcaccgccagcaacaagaacagaggcaucaucaagaccuucagcaacggcugcgacuacgugagcaacaagggcguggacaccgugagcgugggcaacacccuguacuacgugaacaagcaggagggcaagagccuguacgugaagggcgagcccaucaucaacuucuacgacccccugguguuccccagcgacgaguucgacgccagcaucagccaggugaacgagaagaucaaccagagccuggccuucaucagaaagagcgacgagcugcugcacaacgugaacgccggcaagagcaccaccaacaucaugaucaccaccaucaucaucgugaucaucgugauccugcugagccugaucgccgugggccugcugcuguacugcaaggccagaugaggacuaguguccaccugucccuccugggcugcuggauugucucguuuuccugccaaauaaacaggaucagcgcuuuacagaucuaaaaaaaaaaaaaaaaaaaaaaaaaaaaaaaaaaaaaaaaaaaaaaaaaaaaaaaaaaaaaaaaugcaucccccccccccccccccccccccccccccccaaaggcucuuuucagagccaccagaauu

SEQ ID NO: 1441 - RNA, 1991 nt, Artificial Sequence
  mRNA product Design e-1 comprising derived and/or modified sequence from HRSV(A2)__F-del_DSCav1 (opt5)
gggagaauauaagcguuggcggagcgucgguuguagcacucugcgcgcccgcucuucugcugcuguuugucuacuuccuccugcuuccccgccgccgccgccgccaucaagcuuaccauggagcugcucauccugaaggccaacgcuauuaccacaauccuuacggccgugaccuucugcuuugcgagcggccagaauauuacagaagaguucuaccaauccaccuguucugcugucagcaaaggguaucuguccgcccucagaacaggaugguacaccucuguuaucacaauugaacugagcaacaucaaggagaauaaaugcaacggcaccgacgccaaggugaaacuuaucaagcaggaacuggauaaguauaaaaaugcugugacggagcuccagcugcugaugcaguccacccccgccacaaacaaucgggcucgcagagagcucccucgguuuaugaacuacacccugaauaacgccaagaaaacaaaugucacccuuucuaagaaacgcaagagacgguuccugggguuucuccugggagugggcagcgcgauugccuccgggguugcuguguguaagguccuucaccuggaaggagaggugaacaaaaucaagagcgcccuccugucuacgaauaaagcuguugugucccugagcaacggcgucucugugcucacauucaaggugcuggaccuuaaaaauuauauugauaagcaacugcucccgauccugaacaaacaguccugcagcauuucuaacaucgaaaccgucauugaguuucagcagaagaauaaccgccuucuggagaucacaagagaauuuuccguuaaugccggcgugaccacccccgugagcacauacaugcucacgaacuccgagcugcugucucucaucaaugacaugccuauuaccaacgaucaaaagaaacugaugagcaauaacguccagaucgugcggcagcaguccuauagcauuauguguaucauuaaggaagagguucuugcguacgugguccaacugccccucuacggggugaucgacacaccuugcuggaaacugcauaccucuccccuuuguacaaccaauacgaaggaaggauccaacaucugccugacacgcaccgauagaggcugguauugugacaaugccgggagcguuucuuucuucccucaggcugagaccugcaaagugcagagcaaccgggucuuuugugauacaaugaacucccucacccugccgucugaggugaaucugugcaaugucgacauuuucaaccccaaguacgauugcaagaucaugacaagcaaaacggacguguccagcucuguuauuaccucccucggagccaucgugagcuguuauggcaagacaaaaugcaccgcuucuaacaagaaucgcgggauuaucaaaacauuuuccaacggaugugauuacgucagcaauaagggcguggacaccguuuccgugggcaacacgcuguauuacgucaauaagcaagaagggaaaucucuuuaugugaagggagagccuaucauuaacuucuacgacccccugguguucccuagcgaugaauuugacgccuccaucucucagguuaaugagaaaauuaaccagagccucgccuucaucagaaaguccgaugaacugcugcacaaugucaacgcuggcaaaagcaccacaaauauuaugaucaccacaauuaucaucgugauuaucgugauucuucucucucugaucgcggucgggcugcuccuguacugcaaggcccggugaggacuaguguccaccugucccuccugggcugcuggauugucucguuuuccugccaaauaaacaggaucagcgcuuuacagaucuaaaaaaaaaaaaaaaaaaaaaaaaaaaaaaaaaaaaaaaaaaaaaaaaaaaaaaaaaaaaaaaaugcaucccccccccccccccccccccccccccccccaaaggcucuuuucagagccaccagaauu

SEQ ID NO: 1442 - RNA, 1991 nt, Artificial Sequence
  mRNA product Design e-1 comprising derived and/or modified sequence from HRSV(A2)__F-del_DSCav1 (opt6)
gggagaauauaagcguuggcggagcgucgguuguagcacucugcgcgcccgcucuucugcugcuguuugucuacuuccuccugcuuccccgccgccgccgccgccaucaagcuuaccauggaacuauuaauauuaaaagcaaaugcuauuaccacaauacuuacugcuguaaccuucugcuuugccucuggccaaaacauaacagaagaauuuuaucaaucaacuugcuccgcuguaagcaaaggcuaccuaucagcauuacgcaccggcugguacacaucaguaauaacaauagaacuauccaacauaaaagaaaauaaaugcaacggaacagacgcaaaaguaaaauuaauaaaacaagaacucgacaaauacaaaaacgcaguaacagaauuacaacuacuaaugcaaaguacuccagccaccaacaacagagcaagaagagaauuaccacgauuuaugaacuacacacuaaacaaugcaaaaaaaacaaacguaacacuaucaaaaaaacguaaacgcagauucuuaggcuuccuccuagguguaggcucagcaaucgccucaggaguggcaguuuguaaaguacuacaccuagaaggagaaguaaacaaaaucaaaucugcccuuuuaucgacaaacaaagcaguaguaucguuauccaauggagucucaguauugacauucaaaguauuagaccuaaaaaauuauauagauaaacaacucuuaccuaucuuaaauaaacaaagcugcucaauaaguaacauagaaaccguaauagaauuucaacaaaaaaacaauagacuccuugagaucacucgagaauuuucaguaaacgcagguguaacaacaccaguaagcacauacaugcuaacaaauagugaacuauuaucucuaauuaacgauaugcccauaaccaacgaucaaaaaaaacucaugaguaacaacguacaaauaguaagacaacaauccuauagcauaaugugcauuauaaaagaagaaguacuagcauauguaguccaacuaccacuauacggcguaauagacacaccaugcuggaaacuacacaccucaccccuaugcacaacaaauacaaaagaaggaucaaacauaugcuuaaccaggacagacagaggcugguacugcgauaacgcaggaucuguuucauucuucccccaagcagaaacaugcaaaguacaaucaaacagaguauuuugugauaccaugaacucacucacauuaccauccgaagucaaccucugcaacguagacauauucaaccccaaauacgacugcaaaauaaugaccucaaaaacagauguaucaucaucaguaaucacaucacuaggagcuaucguaucuuguuauggaaaaacaaaaugcacagcauccaacaaaaacagaggaauuaucaaaacauucucaaauggaugugacuauguaucaaacaaaggaguagacaccguaagcguaggcaauacacuauauuacguaaauaaacaagaaggaaaaucacuauacguaaaaggugaaccaauaauaaacuucuaugacccccuaguauucccaucagaugaauuugacgcaagcauaucacaagucaacgaaaaaauaaaccaaucacuggcauucauucgcaaaucagaugaacuucuccacaacguaaacgcugguaaaagcacuacaaacauaaugauaacaacaaucaucauugucauaauaguuauucuauuaucacuaaucgcaguaggauuacuacuauacuguaaagcgagguaaggacuaguguccaccugucccuccugggcugcuggauugucucguuuuccugccaaauaaacaggaucagcgcuuuacagaucuaaaaaaaaaaaaaaaaaaaaaaaaaaaaaaaaaaaaaaaaaaaaaaaaaaaaaaaaaaaaaaaaugcaucccccccccccccccccccccccccccccccaaaggcucuuuucagagccaccagaauu

SEQ ID NO: 1443 - RNA, 1991 nt, Artificial Sequence
  mRNA product Design e-1 comprising derived and/or modified sequence from HRSV(A2)__F-del_DSCav1 (opt11)
gggagaauauaagcguuggcggagcgucgguuguagcacucugcgcgcccgcucuucugcugcuguuugucuacuuccuccugcuuccccgccgccgccgccgccaucaagcuuaccauggagcugcucauccugaaggccaacgccaucaccacaauccugacggcggugaccuucugcuucgccagcggccagaacaucaccgaggaguucuaccaguccacgugcagcgccgucuccaagggguaccucagcgcccugcgaaccggcugguacaccuccgugaucaccaucgagcugucaaacaucaaggagaacaagugcaacgggaccgaugccaagguuaagcucaucaagcaggagcuggacaaguacaagaacgcggucacggagcugcagcuccugaugcaguccacuccggcaaccaacaaccgcgccaggcgcgagcugccccgguucaugaacuacacccucaacaacgccaagaagacgaaugugacccugagcaagaagcgcaagcggcgcuuccugggcuuccuccuaggggugggcuccgccaucgcgagcggcgucgccgugugcaagguguugcaccucgagggggaggucaacaagaucaagagcgcccugcuguccaccaacaaggccgugguaagccucuccaacggcgucagcguucugaccuucaaggugcuggaccucaagaacuauaucgacaagcagcugcugcccauccugaacaagcagagcugcuccaucucaaacaucgaaacggugauugaguuccagcagaagaacaaccggcuccuggaaaucacccgcgaguucagcgugaacgccggggucaccacccccguguccacguacaugcugaccaacagcgagcuccuaucccugaucaacgacaugccgaucaccaacgaccagaagaagcucaugagcaacaacgugcagaucguccggcagcaguccuacagcaucaugugcaucaucaaggaagaggugcuggcguacgugguccagcugccccucuacggcgugaucgacacccccugcuggaagcugcacacgagcccccugugcacaaccaacaccaaggagggguccaacaucugccucacgcgcaccgaccggggcugguacugcgacaacgccggcagcgucuccuucuucccgcaggccgagaccugcaaggugcagagcaaccgcguguucugcgacaccaugaacucccugacgcugcccucugagguaaaccucugcaacgucgacaucuucaaccccaaguacgacugcaagaucaugaccuccaagacagacgugagcuccagcgugaucacaucccugggggccaucgucagcugcuacggcaagacuaaguguacugccagcaacaagaaccgggggaucaucaagaccuucuccaacggcugcgacuacgugagcaacaagggcguggacaccguguccgucgggaacacccuguacuacguuaauaagcaggagggcaagagccucuacgugaaaggggagcccaucauuaacuucuacgacccacugguuuuccccuccgacgaguucgacgcgagcaucucccaggugaacgagaagaucaaccagagccuggccuucauccgcaaguccgacgagcugcuccacaacgugaacgccggcaagagcacgaccaacaucaugaucaccaccaucaucaucgugaucaucgugauucugcugucccucaucgccguggggcugcugcuuuacugcaaggcccggugaggacuaguguccaccugucccuccugggcugcuggauugucucguuuuccugccaaauaaacaggaucagcgcuuuacagaucuaaaaaaaaaaaaaaaaaaaaaaaaaaaaaaaaaaaaaaaaaaaaaaaaaaaaaaaaaaaaaaaaugcaucccccccccccccccccccccccccccccccaaaggcucuuuucagagccaccagaauu

SEQ ID NO: 1444 - RNA, 1973 nt, Artificial Sequence
  mRNA product Design e-2 comprising derived and/or modified sequence from HRSV(A2)__F-del_DSCav1 (opt1)
gggagacccgugacccggaaguuguacggcuacgcgacuuucccucccacaaacccucgcgcccuuccuuuccuacuugggcccggcagaaagcuuaccauggagcugcucauccugaaggccaacgccaucaccaccauccugacggcggugaccuucugcuucgccagcggccagaacaucaccgaggaguucuaccaguccacgugcagcgccgucuccaagggguaccucagcgcccugcggaccggcugguacaccuccgugaucaccaucgagcugagcaacaucaaggagaacaagugcaacgggaccgacgccaaggugaagcucaucaagcaggagcuggacaaguacaagaacgcggucacggagcugcagcuccugaugcaguccaccccggcaaccaacaaccgcgcccggcgcgagcugccccgguucaugaacuacacccucaacaacgccaagaagacgaacgugacccugagcaagaagcgcaagcggcgcuuccugggcuuccuccugggggugggcuccgccaucgcgagcggcgucgccgugugcaaggugcugcaccucgagggggaggucaacaagaucaagagcgcccugcuguccaccaacaaggccguggugagccucuccaacggcgucagcgugcugaccuucaaggugcuggaccucaagaacuacaucgacaagcagcugcugcccauccugaacaagcagagcugcuccaucagcaacaucgagacggugaucgaguuccagcagaagaacaaccggcuccuggagaucacccgcgaguucagcgugaacgccggggucaccacccccguguccacguacaugcugaccaacagcgagcuccugucccugaucaacgacaugccgaucaccaacgaccagaagaagcucaugagcaacaacgugcagaucguccggcagcaguccuacagcaucaugugcaucaucaaggaggaggugcuggcguacgugguccagcugccccucuacggcgugaucgacacccccugcuggaagcugcacacgagcccccugugcaccaccaacaccaaggagggguccaacaucugccucacgcgcaccgaccggggcugguacugcgacaacgccggcagcgucuccuucuucccgcaggccgagaccugcaaggugcagagcaaccgcguguucugcgacaccaugaacucccugacgcugcccagcgagguaaaccucugcaacgucgacaucuucaaccccaaguacgacugcaagaucaugaccuccaagaccgacgugagcuccagcgugaucaccucccugggggccaucgucagcugcuacggcaagacgaagugcaccgccagcaacaagaaccgggggaucaucaagaccuucuccaacggcugcgacuacgugagcaacaagggcguggacaccguguccgucgggaacacccuguacuacgugaacaagcaggagggcaagagccucuacgugaagggggagcccaucaucaacuucuacgacccgcuggucuuccccuccgacgaguucgacgcgagcaucucccaggugaacgagaagaucaaccagagccuggccuucauccgcaaguccgacgagcugcuccacaacgugaacgccggcaagagcacgaccaacaucaugaucaccaccaucaucaucgucaucaucgugauccugcugucccucaucgccguggggcugcugcucuacugcaaggcccggugaggacuaguguccaccugucccuccugggcugcuggauugucucguuuuccugccaaauaaacaggaucagcgcuuuacagaucuaaaaaaaaaaaaaaaaaaaaaaaaaaaaaaaaaaaaaaaaaaaaaaaaaaaaaaaaaaaaaaaaugcaucccccccccccccccccccccccccccccccaaaggcucuuuucagagccaccagaauu

SEQ ID NO: 1445 - RNA, 1973 nt, Artificial Sequence
  mRNA product Design e-2 comprising derived and/or modified sequence from HRSV(A2)__F-del_DSCav1 (opt1)
gggagacccgugacccggaaguuguacggcuacgcgacuuucccucccacaaacccucgcgcccuuccuuuccuacuugggcccggcagaaagcuuaccauggagcugcucauccugaaggccaacgccaucaccaccauccugacggcggugaccuucugcuucgccagcggccagaacaucaccgaggaguucuaccaguccacgugcagcgccgucuccaagggguaccucagcgcccugcgcaccggcugguacaccuccgugaucaccaucgagcugagcaacaucaaggagaacaagugcaacgggaccgacgccaaggugaagcucaucaagcaggagcuggacaaguacaagaacgcggucacggagcugcagcuccugaugcaguccacccccgccaccaacaaccgggcccgccgggagcugccgcgcuucaugaacuacacccucaacaacgccaagaagacgaacgugacccugagcaagaagcggaagcgccgguuccugggcuuccuccugggggugggcuccgcgaucgccagcggcgucgccgugugcaaggugcugcaccucgagggggaggucaacaagaucaaguccgcccugcugagcaccaacaaggccguggugucccucagcaacggcgucuccgugcugaccuucaaggugcuggaccucaagaacuacaucgacaagcagcugcugcccauccucaacaagcagagcugcuccaucagcaacaucgagacggucaucgaguuccagcagaagaacaaccgccugcuggagaucacccgggaguucuccgugaacgcgggggugaccacccccgucagcacguacaugcucaccaacagcgagcugcugucccucaucaacgacaugcccaucaccaacgaccagaagaagcugaugagcaacaacgugcagaucgugcgccagcaguccuacagcaucaugugcaucaucaaggaggagguccuggccuacguggugcagcucccgcuguacggcgucaucgacacccccugcuggaagcugcacacgagcccccucugcaccaccaacaccaaggaggggagcaacaucugccugacgcggaccgaccgcggcugguacugcgacaacgccggcuccgugagcuucuucccccaggccgagaccugcaagguccaguccaaccggguguucugcgacaccaugaacagccugacgcucccguccgaggugaaccugugcaacgucgacaucuucaaccccaaguacgacugcaagaucaugaccagcaagaccgacguguccagcuccgugaucaccagccugggggccaucgucuccugcuacggcaagacgaagugcaccgcgagcaacaagaaccgcgggaucaucaagaccuucuccaacggcugcgacuacgugagcaacaagggcguggacaccgucagcguggggaacacccucuacuacgugaacaagcaggagggcaagucccuguacgucaagggggagcccaucaucaacuucuacgacccccugguguucccgagcgacgaguucgacgccuccaucagccaggugaacgagaagaucaaccagucccucgccuucauccggaaguccgacgagcugcugcacaacgucaacgccggcaaguccacgaccaacaucaugaucaccaccaucaucaucgugaucaucgugauccugcucagccugaucgccgucgggcugcuccuguacugcaaggcgcgcugaggacuaguguccaccugucccuccugggcugcuggauugucucguuuuccugccaaauaaacaggaucagcgcuuuacagaucuaaaaaaaaaaaaaaaaaaaaaaaaaaaaaaaaaaaaaaaaaaaaaaaaaaaaaaaaaaaaaaaaugcaucccccccccccccccccccccccccccccccaaaggcucuuuucagagccaccagaauu

SEQ ID NO: 1446 - RNA, 1973 nt, Artificial Sequence
  mRNA product Design e-2 comprising derived and/or modified sequence from HRSV(A2)__F-del_DSCav1 (opt2)
gggagacccgugacccggaaguuguacggcuacgcgacuuucccucccacaaacccucgcgcccuuccuuuccuacuugggcccggcagaaagcuuaccauggagcuccucauccucaaggccaacgccaucaccaccauccucaccgccgucaccuucugcuucgccuccggccagaacaucaccgaggaguucuaccaguccaccugcuccgccgucuccaagggcuaccucuccgcccuccgcaccggcugguacaccuccgucaucaccaucgagcucuccaacaucaaggagaacaagugcaacggcaccgacgccaaggucaagcucaucaagcaggagcucgacaaguacaagaacgccgucaccgagcuccagcuccucaugcaguccacccccgccaccaacaaccgcgcccgccgcgagcucccccgcuucaugaacuacacccucaacaacgccaagaagaccaacgucacccucuccaagaagcgcaagcgccgcuuccucggcuuccuccucggcgucggcuccgccaucgccuccggcgucgccgucugcaagguccuccaccucgagggcgaggucaacaagaucaaguccgcccuccucuccaccaacaaggccgucgucucccucuccaacggcgucuccguccucaccuucaagguccucgaccucaagaacuacaucgacaagcagcuccuccccauccucaacaagcaguccugcuccaucuccaacaucgagaccgucaucgaguuccagcagaagaacaaccgccuccucgagaucacccgcgaguucuccgucaacgccggcgucaccacccccgucuccaccuacaugcucaccaacuccgagcuccucucccucaucaacgacaugcccaucaccaacgaccagaagaagcucauguccaacaacguccagaucguccgccagcaguccuacuccaucaugugcaucaucaaggaggagguccucgccuacgucguccagcucccccucuacggcgucaucgacacccccugcuggaagcuccacaccuccccccucugcaccaccaacaccaaggagggcuccaacaucugccucacccgcaccgaccgcggcugguacugcgacaacgccggcuccgucuccuucuucccccaggccgagaccugcaagguccaguccaaccgcgucuucugcgacaccaugaacucccucacccuccccuccgaggucaaccucugcaacgucgacaucuucaaccccaaguacgacugcaagaucaugaccuccaagaccgacgucuccuccuccgucaucaccucccucggcgccaucgucuccugcuacggcaagaccaagugcaccgccuccaacaagaaccgcggcaucaucaagaccuucuccaacggcugcgacuacgucuccaacaagggcgucgacaccgucuccgucggcaacacccucuacuacgucaacaagcaggagggcaagucccucuacgucaagggcgagcccaucaucaacuucuacgacccccucgucuuccccuccgacgaguucgacgccuccaucucccaggucaacgagaagaucaaccagucccucgccuucauccgcaaguccgacgagcuccuccacaacgucaacgccggcaaguccaccaccaacaucaugaucaccaccaucaucaucgucaucaucgucauccuccucucccucaucgccgucggccuccuccucuacugcaaggcccgcugaggacuaguguccaccugucccuccugggcugcuggauugucucguuuuccugccaaauaaacaggaucagcgcuuuacagaucuaaaaaaaaaaaaaaaaaaaaaaaaaaaaaaaaaaaaaaaaaaaaaaaaaaaaaaaaaaaaaaaaugcaucccccccccccccccccccccccccccccccaaaggcucuuuucagagccaccagaauu

SEQ ID NO: 1447 - RNA, 1973 nt, Artificial Sequence
  mRNA product Design e-2 comprising derived and/or modified sequence from HRSV(A2)__F-del_DSCav1 (opt3)
gggagacccgugacccggaaguuguacggcuacgcgacuuucccucccacaaacccucgcgcccuuccuuuccuacuugggcccggcagaaagcuuaccauggagcugcucauccuuaaggccaacgcuauuaccacaauacugacugcagugacguucugcuuugccagcggccagaauaucaccgaagaguucuaccaauccacauguucugcggucucaaaaggguauuugagugcuuuaagaacuggaugguacaccagcguuauuacaaucgaacuguccaacauuaaggagaauaaaugcaacgguaccgacgccaaggugaaacuaaucaagcaggaacucgauaaguauaaaaaugcaguaacugagcugcagcuucugaugcagucuacacccgccaccaacaauagggcucggcgcgaguugccucgauuuaugaacuacacgcucaauaacgcaaagaaaacuaaugugacccugucgaagaaacguaagagaagguuccugggcuuucucuuaggggucggaucagccauagcuagcggcguggccguuuguaaggugcugcaccuugaaggugaggucaacaaaaucaagagugcguugcuguccacaaauaaagcagugguaucucuaagcaacgggguuuccgugcucacuuucaagguccuggaccuuaaaaauuauauugauaagcaacuguugccaauccucaacaaacagucaugcaguauuagcaacaucgaaaccgugauagaguuucagcagaagaauaaccggcuguuagagauuacacgcgaguucucugugaaugccggagucaccacgccgguuuccacuuacaugcugacaaacucagaacuccuuagccugaucaaugacaugcccauuaccaacgaucaaaagaaauugaugaguaauaacgugcagaucguaagacagcagucuuauuccaucauguguauuauaaaggaagaggugcuagcuuacgucgugcaacugccucucuacggcguuaucgacacuccaugcuggaaacugcauacaagcccccuuuguaccacgaauaccaaggaaggcucgaacauuugccugacaaggacugaucgggggugguauugugacaaugccggaucuguguccuuuuucccucaggcagagaccugcaaaguccagucaaaccgcguguuuugugauacaaugaauaguuugacucucccaagcgagguaaaccugugcaauguugacaucuucaaccccaaguacgauugcaagauaaugaccuccaaaacagacgugucuagcucagucauuaccaguuuaggugcuaucguguccuguuauggcaagacuaaaugcacggccagcaacaagaaucgagggaucauuaaaacauuuucuaacggaugugauuacgucucaaauaagggcguggacaccguuaguguggguaacacucuguauuacguaaauaagcaagaagggaaaagccuauaugucaagggagagccuaucauuaacuucuacgacccacucguguucccguccgaugaauuugacgcgucuauaucgcagguuaaugagaaaaucaaccagagccuggccuucauuagaaaguccgaugaacuuuugcacaaugugaacgcaggcaaaucaaccacaaauaucaugaucaccacuauuauaaucgucauuaucgugauucugcucagucugaucgcuguaggccuucuguuguacugcaaggccaggugaggacuaguguccaccugucccuccugggcugcuggauugucucguuuuccugccaaauaaacaggaucagcgcuuuacagaucuaaaaaaaaaaaaaaaaaaaaaaaaaaaaaaaaaaaaaaaaaaaaaaaaaaaaaaaaaaaaaaaaugcaucccccccccccccccccccccccccccccccaaaggcucuuuucagagccaccagaauu

SEQ ID NO: 1448 - RNA, 1973 nt, Artificial Sequence
  mRNA product Design e-2 comprising derived and/or modified sequence from HRSV(A2)__F-del_DSCav1 (opt4)
gggagacccgugacccggaaguuguacggcuacgcgacuuucccucccacaaacccucgcgcccuuccuuuccuacuugggcccggcagaaagcuuaccauggagcugcugauccugaaggccaacgccaucaccaccauccugaccgccgugaccuucugcuucgccagcggccagaacaucaccgaggaguucuaccagagcaccugcagcgccgugagcaagggcuaccugagcgcccugagaaccggcugguacaccagcgugaucaccaucgagcugagcaacaucaaggagaacaagugcaacggcaccgacgccaaggugaagcugaucaagcaggagcuggacaaguacaagaacgccgugaccgagcugcagcugcugaugcagagcacccccgccaccaacaacagagccagaagagagcugcccagauucaugaacuacacccugaacaacgccaagaagaccaacgugacccugagcaagaagagaaagagaagauuccugggcuuccugcugggcgugggcagcgccaucgccagcggcguggccgugugcaaggugcugcaccuggagggcgaggugaacaagaucaagagcgcccugcugagcaccaacaaggccguggugagccugagcaacggcgugagcgugcugaccuucaaggugcuggaccugaagaacuacaucgacaagcagcugcugcccauccugaacaagcagagcugcagcaucagcaacaucgagaccgugaucgaguuccagcagaagaacaacagacugcuggagaucaccagagaguucagcgugaacgccggcgugaccacccccgugagcaccuacaugcugaccaacagcgagcugcugagccugaucaacgacaugcccaucaccaacgaccagaagaagcugaugagcaacaacgugcagaucgugagacagcagagcuacagcaucaugugcaucaucaaggaggaggugcuggccuacguggugcagcugccccuguacggcgugaucgacacccccugcuggaagcugcacaccagcccccugugcaccaccaacaccaaggagggcagcaacaucugccugaccagaaccgacagaggcugguacugcgacaacgccggcagcgugagcuucuucccccaggccgagaccugcaaggugcagagcaacagaguguucugcgacaccaugaacagccugacccugcccagcgaggugaaccugugcaacguggacaucuucaaccccaaguacgacugcaagaucaugaccagcaagaccgacgugagcagcagcgugaucaccagccugggcgccaucgugagcugcuacggcaagaccaagugcaccgccagcaacaagaacagaggcaucaucaagaccuucagcaacggcugcgacuacgugagcaacaagggcguggacaccgugagcgugggcaacacccuguacuacgugaacaagcaggagggcaagagccuguacgugaagggcgagcccaucaucaacuucuacgacccccugguguuccccagcgacgaguucgacgccagcaucagccaggugaacgagaagaucaaccagagccuggccuucaucagaaagagcgacgagcugcugcacaacgugaacgccggcaagagcaccaccaacaucaugaucaccaccaucaucaucgugaucaucgugauccugcugagccugaucgccgugggccugcugcuguacugcaaggccagaugaggacuaguguccaccugucccuccugggcugcuggauugucucguuuuccugccaaauaaacaggaucagcgcuuuacagaucuaaaaaaaaaaaaaaaaaaaaaaaaaaaaaaaaaaaaaaaaaaaaaaaaaaaaaaaaaaaaaaaaugcaucccccccccccccccccccccccccccccccaaaggcucuuuucagagccaccagaauu

SEQ ID NO: 1449 - RNA, 1973 nt, Artificial Sequence
  mRNA product Design e-2 comprising derived and/or modified sequence from HRSV(A2)__F-del_DSCav1 (opt5)
gggagacccgugacccggaaguuguacggcuacgcgacuuucccucccacaaacccucgcgcccuuccuuuccuacuugggcccggcagaaagcuuaccauggagcugcucauccugaaggccaacgcuauuaccacaauccuuacggccgugaccuucugcuuugcgagcggccagaauauuacagaagaguucuaccaauccaccuguucugcugucagcaaaggguaucuguccgcccucagaacaggaugguacaccucuguuaucacaauugaacugagcaacaucaaggagaauaaaugcaacggcaccgacgccaaggugaaacuuaucaagcaggaacuggauaaguauaaaaaugcugugacggagcuccagcugcugaugcaguccacccccgccacaaacaaucgggcucgcagagagcucccucgguuuaugaacuacacccugaauaacgccaagaaaacaaaugucacccuuucuaagaaacgcaagagacgguuccugggguuucuccugggagugggcagcgcgauugccuccgggguugcuguguguaagguccuucaccuggaaggagaggugaacaaaaucaagagcgcccuccugucuacgaauaaagcuguugugucccugagcaacggcgucucugugcucacauucaaggugcuggaccuuaaaaauuauauugauaagcaacugcucccgauccugaacaaacaguccugcagcauuucuaacaucgaaaccgucauugaguuucagcagaagaauaaccgccuucuggagaucacaagagaauuuuccguuaaugccggcgugaccacccccgugagcacauacaugcucacgaacuccgagcugcugucucucaucaaugacaugccuauuaccaacgaucaaaagaaacugaugagcaauaacguccagaucgugcggcagcaguccuauagcauuauguguaucauuaaggaagagguucuugcguacgugguccaacugccccucuacggggugaucgacacaccuugcuggaaacugcauaccucuccccuuuguacaaccaauacgaaggaaggauccaacaucugccugacacgcaccgauagaggcugguauugugacaaugccgggagcguuucuuucuucccucaggcugagaccugcaaagugcagagcaaccgggucuuuugugauacaaugaacucccucacccugccgucugaggugaaucugugcaaugucgacauuuucaaccccaaguacgauugcaagaucaugacaagcaaaacggacguguccagcucuguuauuaccucccucggagccaucgugagcuguuauggcaagacaaaaugcaccgcuucuaacaagaaucgcgggauuaucaaaacauuuuccaacggaugugauuacgucagcaauaagggcguggacaccguuuccgugggcaacacgcuguauuacgucaauaagcaagaagggaaaucucuuuaugugaagggagagccuaucauuaacuucuacgacccccugguguucccuagcgaugaauuugacgccuccaucucucagguuaaugagaaaauuaaccagagccucgccuucaucagaaaguccgaugaacugcugcacaaugucaacgcuggcaaaagcaccacaaauauuaugaucaccacaauuaucaucgugauuaucgugauucuucucucucugaucgcggucgggcugcuccuguacugcaaggcccggugaggacuaguguccaccugucccuccugggcugcuggauugucucguuuuccugccaaauaaacaggaucagcgcuuuacagaucuaaaaaaaaaaaaaaaaaaaaaaaaaaaaaaaaaaaaaaaaaaaaaaaaaaaaaaaaaaaaaaaaugcaucccccccccccccccccccccccccccccccaaaggcucuuuucagagccaccagaauu

SEQ ID NO: 1450 - RNA, 1973 nt, Artificial Sequence
  mRNA product Design e-2 comprising derived and/or modified sequence from HRSV(A2)__F-del_DSCav1 (opt6)
gggagacccgugacccggaaguuguacggcuacgcgacuuucccucccacaaacccucgcgcccuuccuuuccuacuugggcccggcagaaagcuuaccauggaacuauuaauauuaaaagcaaaugcuauuaccacaauacuuacugcuguaaccuucugcuuugccucuggccaaaacauaacagaagaauuuuaucaaucaacuugcuccgcuguaagcaaaggcuaccuaucagcauuacgcaccggcugguacacaucaguaauaacaauagaacuauccaacauaaaagaaaauaaaugcaacggaacagacgcaaaaguaaaauuaauaaaacaagaacucgacaaauacaaaaacgcaguaacagaauuacaacuacuaaugcaaaguacuccagccaccaacaacagagcaagaagagaauuaccacgauuuaugaacuacacacuaaacaaugcaaaaaaaacaaacguaacacuaucaaaaaaacguaaacgcagauucuuaggcuuccuccuagguguaggcucagcaaucgccucaggaguggcaguuuguaaaguacuacaccuagaaggagaaguaaacaaaaucaaaucugcccuuuuaucgacaaacaaagcaguaguaucguuauccaauggagucucaguauugacauucaaaguauuagaccuaaaaaauuauauagauaaacaacucuuaccuaucuuaaauaaacaaagcugcucaauaaguaacauagaaaccguaauagaauuucaacaaaaaaacaauagacuccuugagaucacucgagaauuuucaguaaacgcagguguaacaacaccaguaagcacauacaugcuaacaaauagugaacuauuaucucuaauuaacgauaugcccauaaccaacgaucaaaaaaaacucaugaguaacaacguacaaauaguaagacaacaauccuauagcauaaugugcauuauaaaagaagaaguacuagcauauguaguccaacuaccacuauacggcguaauagacacaccaugcuggaaacuacacaccucaccccuaugcacaacaaauacaaaagaaggaucaaacauaugcuuaaccaggacagacagaggcugguacugcgauaacgcaggaucuguuucauucuucccccaagcagaaacaugcaaaguacaaucaaacagaguauuuugugauaccaugaacucacucacauuaccauccgaagucaaccucugcaacguagacauauucaaccccaaauacgacugcaaaauaaugaccucaaaaacagauguaucaucaucaguaaucacaucacuaggagcuaucguaucuuguuauggaaaaacaaaaugcacagcauccaacaaaaacagaggaauuaucaaaacauucucaaauggaugugacuauguaucaaacaaaggaguagacaccguaagcguaggcaauacacuauauuacguaaauaaacaagaaggaaaaucacuauacguaaaaggugaaccaauaauaaacuucuaugacccccuaguauucccaucagaugaauuugacgcaagcauaucacaagucaacgaaaaaauaaaccaaucacuggcauucauucgcaaaucagaugaacuucuccacaacguaaacgcugguaaaagcacuacaaacauaaugauaacaacaaucaucauugucauaauaguuauucuauuaucacuaaucgcaguaggauuacuacuauacuguaaagcgagguaaggacuaguguccaccugucccuccugggcugcuggauugucucguuuuccugccaaauaaacaggaucagcgcuuuacagaucuaaaaaaaaaaaaaaaaaaaaaaaaaaaaaaaaaaaaaaaaaaaaaaaaaaaaaaaaaaaaaaaaugcaucccccccccccccccccccccccccccccccaaaggcucuuuucagagccaccagaauu

SEQ ID NO: 1451 - RNA, 1973 nt, Artificial Sequence
  mRNA product Design e-2 comprising derived and/or modified sequence from HRSV(A2)__F-del_DSCav1 (opt11)
gggagacccgugacccggaaguuguacggcuacgcgacuuucccucccacaaacccucgcgcccuuccuuuccuacuugggcccggcagaaagcuuaccauggagcugcucauccugaaggccaacgccaucaccacaauccugacggcggugaccuucugcuucgccagcggccagaacaucaccgaggaguucuaccaguccacgugcagcgccgucuccaagggguaccucagcgcccugcgaaccggcugguacaccuccgugaucaccaucgagcugucaaacaucaaggagaacaagugcaacgggaccgaugccaagguuaagcucaucaagcaggagcuggacaaguacaagaacgcggucacggagcugcagcuccugaugcaguccacuccggcaaccaacaaccgcgccaggcgcgagcugccccgguucaugaacuacacccucaacaacgccaagaagacgaaugugacccugagcaagaagcgcaagcggcgcuuccugggcuuccuccuaggggugggcuccgccaucgcgagcggcgucgccgugugcaagguguugcaccucgagggggaggucaacaagaucaagagcgcccugcuguccaccaacaaggccgugguaagccucuccaacggcgucagcguucugaccuucaaggugcuggaccucaagaacuauaucgacaagcagcugcugcccauccugaacaagcagagcugcuccaucucaaacaucgaaacggugauugaguuccagcagaagaacaaccggcuccuggaaaucacccgcgaguucagcgugaacgccggggucaccacccccguguccacguacaugcugaccaacagcgagcuccuaucccugaucaacgacaugccgaucaccaacgaccagaagaagcucaugagcaacaacgugcagaucguccggcagcaguccuacagcaucaugugcaucaucaaggaagaggugcuggcguacgugguccagcugccccucuacggcgugaucgacacccccugcuggaagcugcacacgagcccccugugcacaaccaacaccaaggagggguccaacaucugccucacgcgcaccgaccggggcugguacugcgacaacgccggcagcgucuccuucuucccgcaggccgagaccugcaaggugcagagcaaccgcguguucugcgacaccaugaacucccugacgcugcccucugagguaaaccucugcaacgucgacaucuucaaccccaaguacgacugcaagaucaugaccuccaagacagacgugagcuccagcgugaucacaucccugggggccaucgucagcugcuacggcaagacuaaguguacugccagcaacaagaaccgggggaucaucaagaccuucuccaacggcugcgacuacgugagcaacaagggcguggacaccguguccgucgggaacacccuguacuacguuaauaagcaggagggcaagagccucuacgugaaaggggagcccaucauuaacuucuacgacccacugguuuuccccuccgacgaguucgacgcgagcaucucccaggugaacgagaagaucaaccagagccuggccuucauccgcaaguccgacgagcugcuccacaacgugaacgccggcaagagcacgaccaacaucaugaucaccaccaucaucaucgugaucaucgugauucugcugucccucaucgccguggggcugcugcuuuacugcaaggcccggugaggacuaguguccaccugucccuccugggcugcuggauugucucguuuuccugccaaauaaacaggaucagcgcuuuacagaucuaaaaaaaaaaaaaaaaaaaaaaaaaaaaaaaaaaaaaaaaaaaaaaaaaaaaaaaaaaaaaaaaugcaucccccccccccccccccccccccccccccccaaaggcucuuuucagagccaccagaauu

SEQ ID NO: 1452 - RNA, 1943 nt, Artificial Sequence
  mRNA product Design e-3 comprising derived and/or modified sequence from HRSV(A2)__F-del_DSCav1 (opt1)
gggagacuuucccauucuguagcagaauuugguguugccuguggucuuggucccgcggagaagcuuaccauggagcugcucauccugaaggccaacgccaucaccaccauccugacggcggugaccuucugcuucgccagcggccagaacaucaccgaggaguucuaccaguccacgugcagcgccgucuccaagggguaccucagcgcccugcggaccggcugguacaccuccgugaucaccaucgagcugagcaacaucaaggagaacaagugcaacgggaccgacgccaaggugaagcucaucaagcaggagcuggacaaguacaagaacgcggucacggagcugcagcuccugaugcaguccaccccggcaaccaacaaccgcgcccggcgcgagcugccccgguucaugaacuacacccucaacaacgccaagaagacgaacgugacccugagcaagaagcgcaagcggcgcuuccugggcuuccuccugggggugggcuccgccaucgcgagcggcgucgccgugugcaaggugcugcaccucgagggggaggucaacaagaucaagagcgcccugcuguccaccaacaaggccguggugagccucuccaacggcgucagcgugcugaccuucaaggugcuggaccucaagaacuacaucgacaagcagcugcugcccauccugaacaagcagagcugcuccaucagcaacaucgagacggugaucgaguuccagcagaagaacaaccggcuccuggagaucacccgcgaguucagcgugaacgccggggucaccacccccguguccacguacaugcugaccaacagcgagcuccugucccugaucaacgacaugccgaucaccaacgaccagaagaagcucaugagcaacaacgugcagaucguccggcagcaguccuacagcaucaugugcaucaucaaggaggaggugcuggcguacgugguccagcugccccucuacggcgugaucgacacccccugcuggaagcugcacacgagcccccugugcaccaccaacaccaaggagggguccaacaucugccucacgcgcaccgaccggggcugguacugcgacaacgccggcagcgucuccuucuucccgcaggccgagaccugcaaggugcagagcaaccgcguguucugcgacaccaugaacucccugacgcugcccagcgagguaaaccucugcaacgucgacaucuucaaccccaaguacgacugcaagaucaugaccuccaagaccgacgugagcuccagcgugaucaccucccugggggccaucgucagcugcuacggcaagacgaagugcaccgccagcaacaagaaccgggggaucaucaagaccuucuccaacggcugcgacuacgugagcaacaagggcguggacaccguguccgucgggaacacccuguacuacgugaacaagcaggagggcaagagccucuacgugaagggggagcccaucaucaacuucuacgacccgcuggucuuccccuccgacgaguucgacgcgagcaucucccaggugaacgagaagaucaaccagagccuggccuucauccgcaaguccgacgagcugcuccacaacgugaacgccggcaagagcacgaccaacaucaugaucaccaccaucaucaucgucaucaucgugauccugcugucccucaucgccguggggcugcugcucuacugcaaggcccggugaggacuaguguccaccugucccuccugggcugcuggauugucucguuuuccugccaaauaaacaggaucagcgcuuuacagaucuaaaaaaaaaaaaaaaaaaaaaaaaaaaaaaaaaaaaaaaaaaaaaaaaaaaaaaaaaaaaaaaaugcaucccccccccccccccccccccccccccccccaaaggcucuuuucagagccaccagaauu

SEQ ID NO: 1453 - RNA, 1943 nt, Artificial Sequence
  mRNA product Design e-3 comprising derived and/or modified sequence from HRSV(A2)__F-del_DSCav1 (opt1)
gggagacuuucccauucuguagcagaauuugguguugccuguggucuuggucccgcggagaagcuuaccauggagcugcucauccugaaggccaacgccaucaccaccauccugacggcggugaccuucugcuucgccagcggccagaacaucaccgaggaguucuaccaguccacgugcagcgccgucuccaagggguaccucagcgcccugcgcaccggcugguacaccuccgugaucaccaucgagcugagcaacaucaaggagaacaagugcaacgggaccgacgccaaggugaagcucaucaagcaggagcuggacaaguacaagaacgcggucacggagcugcagcuccugaugcaguccacccccgccaccaacaaccgggcccgccgggagcugccgcgcuucaugaacuacacccucaacaacgccaagaagacgaacgugacccugagcaagaagcggaagcgccgguuccugggcuuccuccugggggugggcuccgcgaucgccagcggcgucgccgugugcaaggugcugcaccucgagggggaggucaacaagaucaaguccgcccugcugagcaccaacaaggccguggugucccucagcaacggcgucuccgugcugaccuucaaggugcuggaccucaagaacuacaucgacaagcagcugcugcccauccucaacaagcagagcugcuccaucagcaacaucgagacggucaucgaguuccagcagaagaacaaccgccugcuggagaucacccgggaguucuccgugaacgcgggggugaccacccccgucagcacguacaugcucaccaacagcgagcugcugucccucaucaacgacaugcccaucaccaacgaccagaagaagcugaugagcaacaacgugcagaucgugcgccagcaguccuacagcaucaugugcaucaucaaggaggagguccuggccuacguggugcagcucccgcuguacggcgucaucgacacccccugcuggaagcugcacacgagcccccucugcaccaccaacaccaaggaggggagcaacaucugccugacgcggaccgaccgcggcugguacugcgacaacgccggcuccgugagcuucuucccccaggccgagaccugcaagguccaguccaaccggguguucugcgacaccaugaacagccugacgcucccguccgaggugaaccugugcaacgucgacaucuucaaccccaaguacgacugcaagaucaugaccagcaagaccgacguguccagcuccgugaucaccagccugggggccaucgucuccugcuacggcaagacgaagugcaccgcgagcaacaagaaccgcgggaucaucaagaccuucuccaacggcugcgacuacgugagcaacaagggcguggacaccgucagcguggggaacacccucuacuacgugaacaagcaggagggcaagucccuguacgucaagggggagcccaucaucaacuucuacgacccccugguguucccgagcgacgaguucgacgccuccaucagccaggugaacgagaagaucaaccagucccucgccuucauccggaaguccgacgagcugcugcacaacgucaacgccggcaaguccacgaccaacaucaugaucaccaccaucaucaucgugaucaucgugauccugcucagccugaucgccgucgggcugcuccuguacugcaaggcgcgcugaggacuaguguccaccugucccuccugggcugcuggauugucucguuuuccugccaaauaaacaggaucagcgcuuuacagaucuaaaaaaaaaaaaaaaaaaaaaaaaaaaaaaaaaaaaaaaaaaaaaaaaaaaaaaaaaaaaaaaaugcaucccccccccccccccccccccccccccccccaaaggcucuuuucagagccaccagaauu

SEQ ID NO: 1454 - RNA, 1943 nt, Artificial Sequence
  mRNA product Design e-3 comprising derived and/or modified sequence from HRSV(A2)__F-del_DSCav1 (opt2)
gggagacuuucccauucuguagcagaauuugguguugccuguggucuuggucccgcggagaagcuuaccauggagcuccucauccucaaggccaacgccaucaccaccauccucaccgccgucaccuucugcuucgccuccggccagaacaucaccgaggaguucuaccaguccaccugcuccgccgucuccaagggcuaccucuccgcccuccgcaccggcugguacaccuccgucaucaccaucgagcucuccaacaucaaggagaacaagugcaacggcaccgacgccaaggucaagcucaucaagcaggagcucgacaaguacaagaacgccgucaccgagcuccagcuccucaugcaguccacccccgccaccaacaaccgcgcccgccgcgagcucccccgcuucaugaacuacacccucaacaacgccaagaagaccaacgucacccucuccaagaagcgcaagcgccgcuuccucggcuuccuccucggcgucggcuccgccaucgccuccggcgucgccgucugcaagguccuccaccucgagggcgaggucaacaagaucaaguccgcccuccucuccaccaacaaggccgucgucucccucuccaacggcgucuccguccucaccuucaagguccucgaccucaagaacuacaucgacaagcagcuccuccccauccucaacaagcaguccugcuccaucuccaacaucgagaccgucaucgaguuccagcagaagaacaaccgccuccucgagaucacccgcgaguucuccgucaacgccggcgucaccacccccgucuccaccuacaugcucaccaacuccgagcuccucucccucaucaacgacaugcccaucaccaacgaccagaagaagcucauguccaacaacguccagaucguccgccagcaguccuacuccaucaugugcaucaucaaggaggagguccucgccuacgucguccagcucccccucuacggcgucaucgacacccccugcuggaagcuccacaccuccccccucugcaccaccaacaccaaggagggcuccaacaucugccucacccgcaccgaccgcggcugguacugcgacaacgccggcuccgucuccuucuucccccaggccgagaccugcaagguccaguccaaccgcgucuucugcgacaccaugaacucccucacccuccccuccgaggucaaccucugcaacgucgacaucuucaaccccaaguacgacugcaagaucaugaccuccaagaccgacgucuccuccuccgucaucaccucccucggcgccaucgucuccugcuacggcaagaccaagugcaccgccuccaacaagaaccgcggcaucaucaagaccuucuccaacggcugcgacuacgucuccaacaagggcgucgacaccgucuccgucggcaacacccucuacuacgucaacaagcaggagggcaagucccucuacgucaagggcgagcccaucaucaacuucuacgacccccucgucuuccccuccgacgaguucgacgccuccaucucccaggucaacgagaagaucaaccagucccucgccuucauccgcaaguccgacgagcuccuccacaacgucaacgccggcaaguccaccaccaacaucaugaucaccaccaucaucaucgucaucaucgucauccuccucucccucaucgccgucggccuccuccucuacugcaaggcccgcugaggacuaguguccaccugucccuccugggcugcuggauugucucguuuuccugccaaauaaacaggaucagcgcuuuacagaucuaaaaaaaaaaaaaaaaaaaaaaaaaaaaaaaaaaaaaaaaaaaaaaaaaaaaaaaaaaaaaaaaugcaucccccccccccccccccccccccccccccccaaaggcucuuuucagagccaccagaauu

SEQ ID NO: 1455 - RNA, 1943 nt, Artificial Sequence
  mRNA product Design e-3 comprising derived and/or modified sequence from HRSV(A2)__F-del_DSCav1 (opt3)
gggagacuuucccauucuguagcagaauuugguguugccuguggucuuggucccgcggagaagcuuaccauggagcugcucauccuuaaggccaacgcuauuaccacaauacugacugcagugacguucugcuuugccagcggccagaauaucaccgaagaguucuaccaauccacauguucugcggucucaaaaggguauuugagugcuuuaagaacuggaugguacaccagcguuauuacaaucgaacuguccaacauuaaggagaauaaaugcaacgguaccgacgccaaggugaaacuaaucaagcaggaacucgauaaguauaaaaaugcaguaacugagcugcagcuucugaugcagucuacacccgccaccaacaauagggcucggcgcgaguugccucgauuuaugaacuacacgcucaauaacgcaaagaaaacuaaugugacccugucgaagaaacguaagagaagguuccugggcuuucucuuaggggucggaucagccauagcuagcggcguggccguuuguaaggugcugcaccuugaaggugaggucaacaaaaucaagagugcguugcuguccacaaauaaagcagugguaucucuaagcaacgggguuuccgugcucacuuucaagguccuggaccuuaaaaauuauauugauaagcaacuguugccaauccucaacaaacagucaugcaguauuagcaacaucgaaaccgugauagaguuucagcagaagaauaaccggcuguuagagauuacacgcgaguucucugugaaugccggagucaccacgccgguuuccacuuacaugcugacaaacucagaacuccuuagccugaucaaugacaugcccauuaccaacgaucaaaagaaauugaugaguaauaacgugcagaucguaagacagcagucuuauuccaucauguguauuauaaaggaagaggugcuagcuuacgucgugcaacugccucucuacggcguuaucgacacuccaugcuggaaacugcauacaagcccccuuuguaccacgaauaccaaggaaggcucgaacauuugccugacaaggacugaucgggggugguauugugacaaugccggaucuguguccuuuuucccucaggcagagaccugcaaaguccagucaaaccgcguguuuugugauacaaugaauaguuugacucucccaagcgagguaaaccugugcaauguugacaucuucaaccccaaguacgauugcaagauaaugaccuccaaaacagacgugucuagcucagucauuaccaguuuaggugcuaucguguccuguuauggcaagacuaaaugcacggccagcaacaagaaucgagggaucauuaaaacauuuucuaacggaugugauuacgucucaaauaagggcguggacaccguuaguguggguaacacucuguauuacguaaauaagcaagaagggaaaagccuauaugucaagggagagccuaucauuaacuucuacgacccacucguguucccguccgaugaauuugacgcgucuauaucgcagguuaaugagaaaaucaaccagagccuggccuucauuagaaaguccgaugaacuuuugcacaaugugaacgcaggcaaaucaaccacaaauaucaugaucaccacuauuauaaucgucauuaucgugauucugcucagucugaucgcuguaggccuucuguuguacugcaaggccaggugaggacuaguguccaccugucccuccugggcugcuggauugucucguuuuccugccaaauaaacaggaucagcgcuuuacagaucuaaaaaaaaaaaaaaaaaaaaaaaaaaaaaaaaaaaaaaaaaaaaaaaaaaaaaaaaaaaaaaaaugcaucccccccccccccccccccccccccccccccaaaggcucuuuucagagccaccagaauu

SEQ ID NO: 1456 - RNA, 1943 nt, Artificial Sequence
  mRNA product Design e-3 comprising derived and/or modified sequence from HRSV(A2)__F-del_DSCav1 (opt4)
gggagacuuucccauucuguagcagaauuugguguugccuguggucuuggucccgcggagaagcuuaccauggagcugcugauccugaaggccaacgccaucaccaccauccugaccgccgugaccuucugcuucgccagcggccagaacaucaccgaggaguucuaccagagcaccugcagcgccgugagcaagggcuaccugagcgcccugagaaccggcugguacaccagcgugaucaccaucgagcugagcaacaucaaggagaacaagugcaacggcaccgacgccaaggugaagcugaucaagcaggagcuggacaaguacaagaacgccgugaccgagcugcagcugcugaugcagagcacccccgccaccaacaacagagccagaagagagcugcccagauucaugaacuacacccugaacaacgccaagaagaccaacgugacccugagcaagaagagaaagagaagauuccugggcuuccugcugggcgugggcagcgccaucgccagcggcguggccgugugcaaggugcugcaccuggagggcgaggugaacaagaucaagagcgcccugcugagcaccaacaaggccguggugagccugagcaacggcgugagcgugcugaccuucaaggugcuggaccugaagaacuacaucgacaagcagcugcugcccauccugaacaagcagagcugcagcaucagcaacaucgagaccgugaucgaguuccagcagaagaacaacagacugcuggagaucaccagagaguucagcgugaacgccggcgugaccacccccgugagcaccuacaugcugaccaacagcgagcugcugagccugaucaacgacaugcccaucaccaacgaccagaagaagcugaugagcaacaacgugcagaucgugagacagcagagcuacagcaucaugugcaucaucaaggaggaggugcuggccuacguggugcagcugccccuguacggcgugaucgacacccccugcuggaagcugcacaccagcccccugugcaccaccaacaccaaggagggcagcaacaucugccugaccagaaccgacagaggcugguacugcgacaacgccggcagcgugagcuucuucccccaggccgagaccugcaaggugcagagcaacagaguguucugcgacaccaugaacagccugacccugcccagcgaggugaaccugugcaacguggacaucuucaaccccaaguacgacugcaagaucaugaccagcaagaccgacgugagcagcagcgugaucaccagccugggcgccaucgugagcugcuacggcaagaccaagugcaccgccagcaacaagaacagaggcaucaucaagaccuucagcaacggcugcgacuacgugagcaacaagggcguggacaccgugagcgugggcaacacccuguacuacgugaacaagcaggagggcaagagccuguacgugaagggcgagcccaucaucaacuucuacgacccccugguguuccccagcgacgaguucgacgccagcaucagccaggugaacgagaagaucaaccagagccuggccuucaucagaaagagcgacgagcugcugcacaacgugaacgccggcaagagcaccaccaacaucaugaucaccaccaucaucaucgugaucaucgugauccugcugagccugaucgccgugggccugcugcuguacugcaaggccagaugaggacuaguguccaccugucccuccugggcugcuggauugucucguuuuccugccaaauaaacaggaucagcgcuuuacagaucuaaaaaaaaaaaaaaaaaaaaaaaaaaaaaaaaaaaaaaaaaaaaaaaaaaaaaaaaaaaaaaaaugcaucccccccccccccccccccccccccccccccaaaggcucuuuucagagccaccagaauu

SEQ ID NO: 1457 - RNA, 1943 nt, Artificial Sequence
  mRNA product Design e-3 comprising derived and/or modified sequence from HRSV(A2)__F-del_DSCav1 (opt5)
gggagacuuucccauucuguagcagaauuugguguugccuguggucuuggucccgcggagaagcuuaccauggagcugcucauccugaaggccaacgcuauuaccacaauccuuacggccgugaccuucugcuuugcgagcggccagaauauuacagaagaguucuaccaauccaccuguucugcugucagcaaaggguaucuguccgcccucagaacaggaugguacaccucuguuaucacaauugaacugagcaacaucaaggagaauaaaugcaacggcaccgacgccaaggugaaacuuaucaagcaggaacuggauaaguauaaaaaugcugugacggagcuccagcugcugaugcaguccacccccgccacaaacaaucgggcucgcagagagcucccucgguuuaugaacuacacccugaauaacgccaagaaaacaaaugucacccuuucuaagaaacgcaagagacgguuccugggguuucuccugggagugggcagcgcgauugccuccgggguugcuguguguaagguccuucaccuggaaggagaggugaacaaaaucaagagcgcccuccugucuacgaauaaagcuguugugucccugagcaacggcgucucugugcucacauucaaggugcuggaccuuaaaaauuauauugauaagcaacugcucccgauccugaacaaacaguccugcagcauuucuaacaucgaaaccgucauugaguuucagcagaagaauaaccgccuucuggagaucacaagagaauuuuccguuaaugccggcgugaccacccccgugagcacauacaugcucacgaacuccgagcugcugucucucaucaaugacaugccuauuaccaacgaucaaaagaaacugaugagcaauaacguccagaucgugcggcagcaguccuauagcauuauguguaucauuaaggaagagguucuugcguacgugguccaacugccccucuacggggugaucgacacaccuugcuggaaacugcauaccucuccccuuuguacaaccaauacgaaggaaggauccaacaucugccugacacgcaccgauagaggcugguauugugacaaugccgggagcguuucuuucuucccucaggcugagaccugcaaagugcagagcaaccgggucuuuugugauacaaugaacucccucacccugccgucugaggugaaucugugcaaugucgacauuuucaaccccaaguacgauugcaagaucaugacaagcaaaacggacguguccagcucuguuauuaccucccucggagccaucgugagcuguuauggcaagacaaaaugcaccgcuucuaacaagaaucgcgggauuaucaaaacauuuuccaacggaugugauuacgucagcaauaagggcguggacaccguuuccgugggcaacacgcuguauuacgucaauaagcaagaagggaaaucucuuuaugugaagggagagccuaucauuaacuucuacgacccccugguguucccuagcgaugaauuugacgccuccaucucucagguuaaugagaaaauuaaccagagccucgccuucaucagaaaguccgaugaacugcugcacaaugucaacgcuggcaaaagcaccacaaauauuaugaucaccacaauuaucaucgugauuaucgugauucuucucucucugaucgcggucgggcugcuccuguacugcaaggcccggugaggacuaguguccaccugucccuccugggcugcuggauugucucguuuuccugccaaauaaacaggaucagcgcuuuacagaucuaaaaaaaaaaaaaaaaaaaaaaaaaaaaaaaaaaaaaaaaaaaaaaaaaaaaaaaaaaaaaaaaugcaucccccccccccccccccccccccccccccccaaaggcucuuuucagagccaccagaauu

SEQ ID NO: 1458 - RNA, 1943 nt, Artificial Sequence
  mRNA product Design e-3 comprising derived and/or modified sequence from HRSV(A2)__F-del_DSCav1 (opt6)
gggagacuuucccauucuguagcagaauuugguguugccuguggucuuggucccgcggagaagcuuaccauggaacuauuaauauuaaaagcaaaugcuauuaccacaauacuuacugcuguaaccuucugcuuugccucuggccaaaacauaacagaagaauuuuaucaaucaacuugcuccgcuguaagcaaaggcuaccuaucagcauuacgcaccggcugguacacaucaguaauaacaauagaacuauccaacauaaaagaaaauaaaugcaacggaacagacgcaaaaguaaaauuaauaaaacaagaacucgacaaauacaaaaacgcaguaacagaauuacaacuacuaaugcaaaguacuccagccaccaacaacagagcaagaagagaauuaccacgauuuaugaacuacacacuaaacaaugcaaaaaaaacaaacguaacacuaucaaaaaaacguaaacgcagauucuuaggcuuccuccuagguguaggcucagcaaucgccucaggaguggcaguuuguaaaguacuacaccuagaaggagaaguaaacaaaaucaaaucugcccuuuuaucgacaaacaaagcaguaguaucguuauccaauggagucucaguauugacauucaaaguauuagaccuaaaaaauuauauagauaaacaacucuuaccuaucuuaaauaaacaaagcugcucaauaaguaacauagaaaccguaauagaauuucaacaaaaaaacaauagacuccuugagaucacucgagaauuuucaguaaacgcagguguaacaacaccaguaagcacauacaugcuaacaaauagugaacuauuaucucuaauuaacgauaugcccauaaccaacgaucaaaaaaaacucaugaguaacaacguacaaauaguaagacaacaauccuauagcauaaugugcauuauaaaagaagaaguacuagcauauguaguccaacuaccacuauacggcguaauagacacaccaugcuggaaacuacacaccucaccccuaugcacaacaaauacaaaagaaggaucaaacauaugcuuaaccaggacagacagaggcugguacugcgauaacgcaggaucuguuucauucuucccccaagcagaaacaugcaaaguacaaucaaacagaguauuuugugauaccaugaacucacucacauuaccauccgaagucaaccucugcaacguagacauauucaaccccaaauacgacugcaaaauaaugaccucaaaaacagauguaucaucaucaguaaucacaucacuaggagcuaucguaucuuguuauggaaaaacaaaaugcacagcauccaacaaaaacagaggaauuaucaaaacauucucaaauggaugugacuauguaucaaacaaaggaguagacaccguaagcguaggcaauacacuauauuacguaaauaaacaagaaggaaaaucacuauacguaaaaggugaaccaauaauaaacuucuaugacccccuaguauucccaucagaugaauuugacgcaagcauaucacaagucaacgaaaaaauaaaccaaucacuggcauucauucgcaaaucagaugaacuucuccacaacguaaacgcugguaaaagcacuacaaacauaaugauaacaacaaucaucauugucauaauaguuauucuauuaucacuaaucgcaguaggauuacuacuauacuguaaagcgagguaaggacuaguguccaccugucccuccugggcugcuggauugucucguuuuccugccaaauaaacaggaucagcgcuuuacagaucuaaaaaaaaaaaaaaaaaaaaaaaaaaaaaaaaaaaaaaaaaaaaaaaaaaaaaaaaaaaaaaaaugcaucccccccccccccccccccccccccccccccaaaggcucuuuucagagccaccagaauu

SEQ ID NO: 1459 - RNA, 1943 nt, Artificial Sequence
  mRNA product Design e-3 comprising derived and/or modified sequence from HRSV(A2)__F-del_DSCav1 (opt11)
gggagacuuucccauucuguagcagaauuugguguugccuguggucuuggucccgcggagaagcuuaccauggagcugcucauccugaaggccaacgccaucaccacaauccugacggcggugaccuucugcuucgccagcggccagaacaucaccgaggaguucuaccaguccacgugcagcgccgucuccaagggguaccucagcgcccugcgaaccggcugguacaccuccgugaucaccaucgagcugucaaacaucaaggagaacaagugcaacgggaccgaugccaagguuaagcucaucaagcaggagcuggacaaguacaagaacgcggucacggagcugcagcuccugaugcaguccacuccggcaaccaacaaccgcgccaggcgcgagcugccccgguucaugaacuacacccucaacaacgccaagaagacgaaugugacccugagcaagaagcgcaagcggcgcuuccugggcuuccuccuaggggugggcuccgccaucgcgagcggcgucgccgugugcaagguguugcaccucgagggggaggucaacaagaucaagagcgcccugcuguccaccaacaaggccgugguaagccucuccaacggcgucagcguucugaccuucaaggugcuggaccucaagaacuauaucgacaagcagcugcugcccauccugaacaagcagagcugcuccaucucaaacaucgaaacggugauugaguuccagcagaagaacaaccggcuccuggaaaucacccgcgaguucagcgugaacgccggggucaccacccccguguccacguacaugcugaccaacagcgagcuccuaucccugaucaacgacaugccgaucaccaacgaccagaagaagcucaugagcaacaacgugcagaucguccggcagcaguccuacagcaucaugugcaucaucaaggaagaggugcuggcguacgugguccagcugccccucuacggcgugaucgacacccccugcuggaagcugcacacgagcccccugugcacaaccaacaccaaggagggguccaacaucugccucacgcgcaccgaccggggcugguacugcgacaacgccggcagcgucuccuucuucccgcaggccgagaccugcaaggugcagagcaaccgcguguucugcgacaccaugaacucccugacgcugcccucugagguaaaccucugcaacgucgacaucuucaaccccaaguacgacugcaagaucaugaccuccaagacagacgugagcuccagcgugaucacaucccugggggccaucgucagcugcuacggcaagacuaaguguacugccagcaacaagaaccgggggaucaucaagaccuucuccaacggcugcgacuacgugagcaacaagggcguggacaccguguccgucgggaacacccuguacuacguuaauaagcaggagggcaagagccucuacgugaaaggggagcccaucauuaacuucuacgacccacugguuuuccccuccgacgaguucgacgcgagcaucucccaggugaacgagaagaucaaccagagccuggccuucauccgcaaguccgacgagcugcuccacaacgugaacgccggcaagagcacgaccaacaucaugaucaccaccaucaucaucgugaucaucgugauucugcugucccucaucgccguggggcugcugcuuuacugcaaggcccggugaggacuaguguccaccugucccuccugggcugcuggauugucucguuuuccugccaaauaaacaggaucagcgcuuuacagaucuaaaaaaaaaaaaaaaaaaaaaaaaaaaaaaaaaaaaaaaaaaaaaaaaaaaaaaaaaaaaaaaaugcaucccccccccccccccccccccccccccccccaaaggcucuuuucagagccaccagaauu

SEQ ID NO: 1460 - RNA, 1997 nt, Artificial Sequence
  mRNA product Design e-4 comprising derived and/or modified sequence from HRSV(A2)__F-del_DSCav1 (opt1)
gggagacuccugucgggcggaaguaggaggaguagaguuuaaaaacaguacucuuuuuccgguucgggacguaguugaagcaacgacaagccggauaaccgcucuugagacaggaagcuuaccauggagcugcucauccugaaggccaacgccaucaccaccauccugacggcggugaccuucugcuucgccagcggccagaacaucaccgaggaguucuaccaguccacgugcagcgccgucuccaagggguaccucagcgcccugcggaccggcugguacaccuccgugaucaccaucgagcugagcaacaucaaggagaacaagugcaacgggaccgacgccaaggugaagcucaucaagcaggagcuggacaaguacaagaacgcggucacggagcugcagcuccugaugcaguccaccccggcaaccaacaaccgcgcccggcgcgagcugccccgguucaugaacuacacccucaacaacgccaagaagacgaacgugacccugagcaagaagcgcaagcggcgcuuccugggcuuccuccugggggugggcuccgccaucgcgagcggcgucgccgugugcaaggugcugcaccucgagggggaggucaacaagaucaagagcgcccugcuguccaccaacaaggccguggugagccucuccaacggcgucagcgugcugaccuucaaggugcuggaccucaagaacuacaucgacaagcagcugcugcccauccugaacaagcagagcugcuccaucagcaacaucgagacggugaucgaguuccagcagaagaacaaccggcuccuggagaucacccgcgaguucagcgugaacgccggggucaccacccccguguccacguacaugcugaccaacagcgagcuccugucccugaucaacgacaugccgaucaccaacgaccagaagaagcucaugagcaacaacgugcagaucguccggcagcaguccuacagcaucaugugcaucaucaaggaggaggugcuggcguacgugguccagcugccccucuacggcgugaucgacacccccugcuggaagcugcacacgagcccccugugcaccaccaacaccaaggagggguccaacaucugccucacgcgcaccgaccggggcugguacugcgacaacgccggcagcgucuccuucuucccgcaggccgagaccugcaaggugcagagcaaccgcguguucugcgacaccaugaacucccugacgcugcccagcgagguaaaccucugcaacgucgacaucuucaaccccaaguacgacugcaagaucaugaccuccaagaccgacgugagcuccagcgugaucaccucccugggggccaucgucagcugcuacggcaagacgaagugcaccgccagcaacaagaaccgggggaucaucaagaccuucuccaacggcugcgacuacgugagcaacaagggcguggacaccguguccgucgggaacacccuguacuacgugaacaagcaggagggcaagagccucuacgugaagggggagcccaucaucaacuucuacgacccgcuggucuuccccuccgacgaguucgacgcgagcaucucccaggugaacgagaagaucaaccagagccuggccuucauccgcaaguccgacgagcugcuccacaacgugaacgccggcaagagcacgaccaacaucaugaucaccaccaucaucaucgucaucaucgugauccugcugucccucaucgccguggggcugcugcucuacugcaaggcccggugaggacuaguguccaccugucccuccugggcugcuggauugucucguuuuccugccaaauaaacaggaucagcgcuuuacagaucuaaaaaaaaaaaaaaaaaaaaaaaaaaaaaaaaaaaaaaaaaaaaaaaaaaaaaaaaaaaaaaaaugcaucccccccccccccccccccccccccccccccaaaggcucuuuucagagccaccagaauu

SEQ ID NO: 1461 - RNA, 1997 nt, Artificial Sequence
  mRNA product Design e-4 comprising derived and/or modified sequence from HRSV(A2)__F-del_DSCav1 (opt1)
gggagacuccugucgggcggaaguaggaggaguagaguuuaaaaacaguacucuuuuuccgguucgggacguaguugaagcaacgacaagccggauaaccgcucuugagacaggaagcuuaccauggagcugcucauccugaaggccaacgccaucaccaccauccugacggcggugaccuucugcuucgccagcggccagaacaucaccgaggaguucuaccaguccacgugcagcgccgucuccaagggguaccucagcgcccugcgcaccggcugguacaccuccgugaucaccaucgagcugagcaacaucaaggagaacaagugcaacgggaccgacgccaaggugaagcucaucaagcaggagcuggacaaguacaagaacgcggucacggagcugcagcuccugaugcaguccacccccgccaccaacaaccgggcccgccgggagcugccgcgcuucaugaacuacacccucaacaacgccaagaagacgaacgugacccugagcaagaagcggaagcgccgguuccugggcuuccuccugggggugggcuccgcgaucgccagcggcgucgccgugugcaaggugcugcaccucgagggggaggucaacaagaucaaguccgcccugcugagcaccaacaaggccguggugucccucagcaacggcgucuccgugcugaccuucaaggugcuggaccucaagaacuacaucgacaagcagcugcugcccauccucaacaagcagagcugcuccaucagcaacaucgagacggucaucgaguuccagcagaagaacaaccgccugcuggagaucacccgggaguucuccgugaacgcgggggugaccacccccgucagcacguacaugcucaccaacagcgagcugcugucccucaucaacgacaugcccaucaccaacgaccagaagaagcugaugagcaacaacgugcagaucgugcgccagcaguccuacagcaucaugugcaucaucaaggaggagguccuggccuacguggugcagcucccgcuguacggcgucaucgacacccccugcuggaagcugcacacgagcccccucugcaccaccaacaccaaggaggggagcaacaucugccugacgcggaccgaccgcggcugguacugcgacaacgccggcuccgugagcuucuucccccaggccgagaccugcaagguccaguccaaccggguguucugcgacaccaugaacagccugacgcucccguccgaggugaaccugugcaacgucgacaucuucaaccccaaguacgacugcaagaucaugaccagcaagaccgacguguccagcuccgugaucaccagccugggggccaucgucuccugcuacggcaagacgaagugcaccgcgagcaacaagaaccgcgggaucaucaagaccuucuccaacggcugcgacuacgugagcaacaagggcguggacaccgucagcguggggaacacccucuacuacgugaacaagcaggagggcaagucccuguacgucaagggggagcccaucaucaacuucuacgacccccugguguucccgagcgacgaguucgacgccuccaucagccaggugaacgagaagaucaaccagucccucgccuucauccggaaguccgacgagcugcugcacaacgucaacgccggcaaguccacgaccaacaucaugaucaccaccaucaucaucgugaucaucgugauccugcucagccugaucgccgucgggcugcuccuguacugcaaggcgcgcugaggacuaguguccaccugucccuccugggcugcuggauugucucguuuuccugccaaauaaacaggaucagcgcuuuacagaucuaaaaaaaaaaaaaaaaaaaaaaaaaaaaaaaaaaaaaaaaaaaaaaaaaaaaaaaaaaaaaaaaugcaucccccccccccccccccccccccccccccccaaaggcucuuuucagagccaccagaauu

SEQ ID NO: 1462 - RNA, 1997 nt, Artificial Sequence
  mRNA product Design e-4 comprising derived and/or modified sequence from HRSV(A2)__F-del_DSCav1 (opt2)
gggagacuccugucgggcggaaguaggaggaguagaguuuaaaaacaguacucuuuuuccgguucgggacguaguugaagcaacgacaagccggauaaccgcucuugagacaggaagcuuaccauggagcuccucauccucaaggccaacgccaucaccaccauccucaccgccgucaccuucugcuucgccuccggccagaacaucaccgaggaguucuaccaguccaccugcuccgccgucuccaagggcuaccucuccgcccuccgcaccggcugguacaccuccgucaucaccaucgagcucuccaacaucaaggagaacaagugcaacggcaccgacgccaaggucaagcucaucaagcaggagcucgacaaguacaagaacgccgucaccgagcuccagcuccucaugcaguccacccccgccaccaacaaccgcgcccgccgcgagcucccccgcuucaugaacuacacccucaacaacgccaagaagaccaacgucacccucuccaagaagcgcaagcgccgcuuccucggcuuccuccucggcgucggcuccgccaucgccuccggcgucgccgucugcaagguccuccaccucgagggcgaggucaacaagaucaaguccgcccuccucuccaccaacaaggccgucgucucccucuccaacggcgucuccguccucaccuucaagguccucgaccucaagaacuacaucgacaagcagcuccuccccauccucaacaagcaguccugcuccaucuccaacaucgagaccgucaucgaguuccagcagaagaacaaccgccuccucgagaucacccgcgaguucuccgucaacgccggcgucaccacccccgucuccaccuacaugcucaccaacuccgagcuccucucccucaucaacgacaugcccaucaccaacgaccagaagaagcucauguccaacaacguccagaucguccgccagcaguccuacuccaucaugugcaucaucaaggaggagguccucgccuacgucguccagcucccccucuacggcgucaucgacacccccugcuggaagcuccacaccuccccccucugcaccaccaacaccaaggagggcuccaacaucugccucacccgcaccgaccgcggcugguacugcgacaacgccggcuccgucuccuucuucccccaggccgagaccugcaagguccaguccaaccgcgucuucugcgacaccaugaacucccucacccuccccuccgaggucaaccucugcaacgucgacaucuucaaccccaaguacgacugcaagaucaugaccuccaagaccgacgucuccuccuccgucaucaccucccucggcgccaucgucuccugcuacggcaagaccaagugcaccgccuccaacaagaaccgcggcaucaucaagaccuucuccaacggcugcgacuacgucuccaacaagggcgucgacaccgucuccgucggcaacacccucuacuacgucaacaagcaggagggcaagucccucuacgucaagggcgagcccaucaucaacuucuacgacccccucgucuuccccuccgacgaguucgacgccuccaucucccaggucaacgagaagaucaaccagucccucgccuucauccgcaaguccgacgagcuccuccacaacgucaacgccggcaaguccaccaccaacaucaugaucaccaccaucaucaucgucaucaucgucauccuccucucccucaucgccgucggccuccuccucuacugcaaggcccgcugaggacuaguguccaccugucccuccugggcugcuggauugucucguuuuccugccaaauaaacaggaucagcgcuuuacagaucuaaaaaaaaaaaaaaaaaaaaaaaaaaaaaaaaaaaaaaaaaaaaaaaaaaaaaaaaaaaaaaaaugcaucccccccccccccccccccccccccccccccaaaggcucuuuucagagccaccagaauu

SEQ ID NO: 1463 - RNA, 1997 nt, Artificial Sequence
  mRNA product Design e-4 comprising derived and/or modified sequence from HRSV(A2)__F-del_DSCav1 (opt3)
gggagacuccugucgggcggaaguaggaggaguagaguuuaaaaacaguacucuuuuuccgguucgggacguaguugaagcaacgacaagccggauaaccgcucuugagacaggaagcuuaccauggagcugcucauccuuaaggccaacgcuauuaccacaauacugacugcagugacguucugcuuugccagcggccagaauaucaccgaagaguucuaccaauccacauguucugcggucucaaaaggguauuugagugcuuuaagaacuggaugguacaccagcguuauuacaaucgaacuguccaacauuaaggagaauaaaugcaacgguaccgacgccaaggugaaacuaaucaagcaggaacucgauaaguauaaaaaugcaguaacugagcugcagcuucugaugcagucuacacccgccaccaacaauagggcucggcgcgaguugccucgauuuaugaacuacacgcucaauaacgcaaagaaaacuaaugugacccugucgaagaaacguaagagaagguuccugggcuuucucuuaggggucggaucagccauagcuagcggcguggccguuuguaaggugcugcaccuugaaggugaggucaacaaaaucaagagugcguugcuguccacaaauaaagcagugguaucucuaagcaacgggguuuccgugcucacuuucaagguccuggaccuuaaaaauuauauugauaagcaacuguugccaauccucaacaaacagucaugcaguauuagcaacaucgaaaccgugauagaguuucagcagaagaauaaccggcuguuagagauuacacgcgaguucucugugaaugccggagucaccacgccgguuuccacuuacaugcugacaaacucagaacuccuuagccugaucaaugacaugcccauuaccaacgaucaaaagaaauugaugaguaauaacgugcagaucguaagacagcagucuuauuccaucauguguauuauaaaggaagaggugcuagcuuacgucgugcaacugccucucuacggcguuaucgacacuccaugcuggaaacugcauacaagcccccuuuguaccacgaauaccaaggaaggcucgaacauuugccugacaaggacugaucgggggugguauugugacaaugccggaucuguguccuuuuucccucaggcagagaccugcaaaguccagucaaaccgcguguuuugugauacaaugaauaguuugacucucccaagcgagguaaaccugugcaauguugacaucuucaaccccaaguacgauugcaagauaaugaccuccaaaacagacgugucuagcucagucauuaccaguuuaggugcuaucguguccuguuauggcaagacuaaaugcacggccagcaacaagaaucgagggaucauuaaaacauuuucuaacggaugugauuacgucucaaauaagggcguggacaccguuaguguggguaacacucuguauuacguaaauaagcaagaagggaaaagccuauaugucaagggagagccuaucauuaacuucuacgacccacucguguucccguccgaugaauuugacgcgucuauaucgcagguuaaugagaaaaucaaccagagccuggccuucauuagaaaguccgaugaacuuuugcacaaugugaacgcaggcaaaucaaccacaaauaucaugaucaccacuauuauaaucgucauuaucgugauucugcucagucugaucgcuguaggccuucuguuguacugcaaggccaggugaggacuaguguccaccugucccuccugggcugcuggauugucucguuuuccugccaaauaaacaggaucagcgcuuuacagaucuaaaaaaaaaaaaaaaaaaaaaaaaaaaaaaaaaaaaaaaaaaaaaaaaaaaaaaaaaaaaaaaaugcaucccccccccccccccccccccccccccccccaaaggcucuuuucagagccaccagaauu

SEQ ID NO: 1464 - RNA, 1997 nt, Artificial Sequence
  mRNA product Design e-4 comprising derived and/or modified sequence from HRSV(A2)__F-del_DSCav1 (opt4)
gggagacuccugucgggcggaaguaggaggaguagaguuuaaaaacaguacucuuuuuccgguucgggacguaguugaagcaacgacaagccggauaaccgcucuugagacaggaagcuuaccauggagcugcugauccugaaggccaacgccaucaccaccauccugaccgccgugaccuucugcuucgccagcggccagaacaucaccgaggaguucuaccagagcaccugcagcgccgugagcaagggcuaccugagcgcccugagaaccggcugguacaccagcgugaucaccaucgagcugagcaacaucaaggagaacaagugcaacggcaccgacgccaaggugaagcugaucaagcaggagcuggacaaguacaagaacgccgugaccgagcugcagcugcugaugcagagcacccccgccaccaacaacagagccagaagagagcugcccagauucaugaacuacacccugaacaacgccaagaagaccaacgugacccugagcaagaagagaaagagaagauuccugggcuuccugcugggcgugggcagcgccaucgccagcggcguggccgugugcaaggugcugcaccuggagggcgaggugaacaagaucaagagcgcccugcugagcaccaacaaggccguggugagccugagcaacggcgugagcgugcugaccuucaaggugcuggaccugaagaacuacaucgacaagcagcugcugcccauccugaacaagcagagcugcagcaucagcaacaucgagaccgugaucgaguuccagcagaagaacaacagacugcuggagaucaccagagaguucagcgugaacgccggcgugaccacccccgugagcaccuacaugcugaccaacagcgagcugcugagccugaucaacgacaugcccaucaccaacgaccagaagaagcugaugagcaacaacgugcagaucgugagacagcagagcuacagcaucaugugcaucaucaaggaggaggugcuggccuacguggugcagcugccccuguacggcgugaucgacacccccugcuggaagcugcacaccagcccccugugcaccaccaacaccaaggagggcagcaacaucugccugaccagaaccgacagaggcugguacugcgacaacgccggcagcgugagcuucuucccccaggccgagaccugcaaggugcagagcaacagaguguucugcgacaccaugaacagccugacccugcccagcgaggugaaccugugcaacguggacaucuucaaccccaaguacgacugcaagaucaugaccagcaagaccgacgugagcagcagcgugaucaccagccugggcgccaucgugagcugcuacggcaagaccaagugcaccgccagcaacaagaacagaggcaucaucaagaccuucagcaacggcugcgacuacgugagcaacaagggcguggacaccgugagcgugggcaacacccuguacuacgugaacaagcaggagggcaagagccuguacgugaagggcgagcccaucaucaacuucuacgacccccugguguuccccagcgacgaguucgacgccagcaucagccaggugaacgagaagaucaaccagagccuggccuucaucagaaagagcgacgagcugcugcacaacgugaacgccggcaagagcaccaccaacaucaugaucaccaccaucaucaucgugaucaucgugauccugcugagccugaucgccgugggccugcugcuguacugcaaggccagaugaggacuaguguccaccugucccuccugggcugcuggauugucucguuuuccugccaaauaaacaggaucagcgcuuuacagaucuaaaaaaaaaaaaaaaaaaaaaaaaaaaaaaaaaaaaaaaaaaaaaaaaaaaaaaaaaaaaaaaaugcaucccccccccccccccccccccccccccccccaaaggcucuuuucagagccaccagaauu

SEQ ID NO: 1465 - RNA, 1997 nt, Artificial Sequence
  mRNA product Design e-4 comprising derived and/or modified sequence from HRSV(A2)__F-del_DSCav1 (opt5)
gggagacuccugucgggcggaaguaggaggaguagaguuuaaaaacaguacucuuuuuccgguucgggacguaguugaagcaacgacaagccggauaaccgcucuugagacaggaagcuuaccauggagcugcucauccugaaggccaacgcuauuaccacaauccuuacggccgugaccuucugcuuugcgagcggccagaauauuacagaagaguucuaccaauccaccuguucugcugucagcaaaggguaucuguccgcccucagaacaggaugguacaccucuguuaucacaauugaacugagcaacaucaaggagaauaaaugcaacggcaccgacgccaaggugaaacuuaucaagcaggaacuggauaaguauaaaaaugcugugacggagcuccagcugcugaugcaguccacccccgccacaaacaaucgggcucgcagagagcucccucgguuuaugaacuacacccugaauaacgccaagaaaacaaaugucacccuuucuaagaaacgcaagagacgguuccugggguuucuccugggagugggcagcgcgauugccuccgggguugcuguguguaagguccuucaccuggaaggagaggugaacaaaaucaagagcgcccuccugucuacgaauaaagcuguugugucccugagcaacggcgucucugugcucacauucaaggugcuggaccuuaaaaauuauauugauaagcaacugcucccgauccugaacaaacaguccugcagcauuucuaacaucgaaaccgucauugaguuucagcagaagaauaaccgccuucuggagaucacaagagaauuuuccguuaaugccggcgugaccacccccgugagcacauacaugcucacgaacuccgagcugcugucucucaucaaugacaugccuauuaccaacgaucaaaagaaacugaugagcaauaacguccagaucgugcggcagcaguccuauagcauuauguguaucauuaaggaagagguucuugcguacgugguccaacugccccucuacggggugaucgacacaccuugcuggaaacugcauaccucuccccuuuguacaaccaauacgaaggaaggauccaacaucugccugacacgcaccgauagaggcugguauugugacaaugccgggagcguuucuuucuucccucaggcugagaccugcaaagugcagagcaaccgggucuuuugugauacaaugaacucccucacccugccgucugaggugaaucugugcaaugucgacauuuucaaccccaaguacgauugcaagaucaugacaagcaaaacggacguguccagcucuguuauuaccucccucggagccaucgugagcuguuauggcaagacaaaaugcaccgcuucuaacaagaaucgcgggauuaucaaaacauuuuccaacggaugugauuacgucagcaauaagggcguggacaccguuuccgugggcaacacgcuguauuacgucaauaagcaagaagggaaaucucuuuaugugaagggagagccuaucauuaacuucuacgacccccugguguucccuagcgaugaauuugacgccuccaucucucagguuaaugagaaaauuaaccagagccucgccuucaucagaaaguccgaugaacugcugcacaaugucaacgcuggcaaaagcaccacaaauauuaugaucaccacaauuaucaucgugauuaucgugauucuucucucucugaucgcggucgggcugcuccuguacugcaaggcccggugaggacuaguguccaccugucccuccugggcugcuggauugucucguuuuccugccaaauaaacaggaucagcgcuuuacagaucuaaaaaaaaaaaaaaaaaaaaaaaaaaaaaaaaaaaaaaaaaaaaaaaaaaaaaaaaaaaaaaaaugcaucccccccccccccccccccccccccccccccaaaggcucuuuucagagccaccagaauu

SEQ ID NO: 1466 - RNA, 1997 nt, Artificial Sequence
  mRNA product Design e-4 comprising derived and/or modified sequence from HRSV(A2)__F-del_DSCav1 (opt6)
gggagacuccugucgggcggaaguaggaggaguagaguuuaaaaacaguacucuuuuuccgguucgggacguaguugaagcaacgacaagccggauaaccgcucuugagacaggaagcuuaccauggaacuauuaauauuaaaagcaaaugcuauuaccacaauacuuacugcuguaaccuucugcuuugccucuggccaaaacauaacagaagaauuuuaucaaucaacuugcuccgcuguaagcaaaggcuaccuaucagcauuacgcaccggcugguacacaucaguaauaacaauagaacuauccaacauaaaagaaaauaaaugcaacggaacagacgcaaaaguaaaauuaauaaaacaagaacucgacaaauacaaaaacgcaguaacagaauuacaacuacuaaugcaaaguacuccagccaccaacaacagagcaagaagagaauuaccacgauuuaugaacuacacacuaaacaaugcaaaaaaaacaaacguaacacuaucaaaaaaacguaaacgcagauucuuaggcuuccuccuagguguaggcucagcaaucgccucaggaguggcaguuuguaaaguacuacaccuagaaggagaaguaaacaaaaucaaaucugcccuuuuaucgacaaacaaagcaguaguaucguuauccaauggagucucaguauugacauucaaaguauuagaccuaaaaaauuauauagauaaacaacucuuaccuaucuuaaauaaacaaagcugcucaauaaguaacauagaaaccguaauagaauuucaacaaaaaaacaauagacuccuugagaucacucgagaauuuucaguaaacgcagguguaacaacaccaguaagcacauacaugcuaacaaauagugaacuauuaucucuaauuaacgauaugcccauaaccaacgaucaaaaaaaacucaugaguaacaacguacaaauaguaagacaacaauccuauagcauaaugugcauuauaaaagaagaaguacuagcauauguaguccaacuaccacuauacggcguaauagacacaccaugcuggaaacuacacaccucaccccuaugcacaacaaauacaaaagaaggaucaaacauaugcuuaaccaggacagacagaggcugguacugcgauaacgcaggaucuguuucauucuucccccaagcagaaacaugcaaaguacaaucaaacagaguauuuugugauaccaugaacucacucacauuaccauccgaagucaaccucugcaacguagacauauucaaccccaaauacgacugcaaaauaaugaccucaaaaacagauguaucaucaucaguaaucacaucacuaggagcuaucguaucuuguuauggaaaaacaaaaugcacagcauccaacaaaaacagaggaauuaucaaaacauucucaaauggaugugacuauguaucaaacaaaggaguagacaccguaagcguaggcaauacacuauauuacguaaauaaacaagaaggaaaaucacuauacguaaaaggugaaccaauaauaaacuucuaugacccccuaguauucccaucagaugaauuugacgcaagcauaucacaagucaacgaaaaaauaaaccaaucacuggcauucauucgcaaaucagaugaacuucuccacaacguaaacgcugguaaaagcacuacaaacauaaugauaacaacaaucaucauugucauaauaguuauucuauuaucacuaaucgcaguaggauuacuacuauacuguaaagcgagguaaggacuaguguccaccugucccuccugggcugcuggauugucucguuuuccugccaaauaaacaggaucagcgcuuuacagaucuaaaaaaaaaaaaaaaaaaaaaaaaaaaaaaaaaaaaaaaaaaaaaaaaaaaaaaaaaaaaaaaaugcaucccccccccccccccccccccccccccccccaaaggcucuuuucagagccaccagaauu

SEQ ID NO: 1467 - RNA, 1997 nt, Artificial Sequence
  mRNA product Design e-4 comprising derived and/or modified sequence from HRSV(A2)__F-del_DSCav1 (opt11)
gggagacuccugucgggcggaaguaggaggaguagaguuuaaaaacaguacucuuuuuccgguucgggacguaguugaagcaacgacaagccggauaaccgcucuugagacaggaagcuuaccauggagcugcucauccugaaggccaacgccaucaccacaauccugacggcggugaccuucugcuucgccagcggccagaacaucaccgaggaguucuaccaguccacgugcagcgccgucuccaagggguaccucagcgcccugcgaaccggcugguacaccuccgugaucaccaucgagcugucaaacaucaaggagaacaagugcaacgggaccgaugccaagguuaagcucaucaagcaggagcuggacaaguacaagaacgcggucacggagcugcagcuccugaugcaguccacuccggcaaccaacaaccgcgccaggcgcgagcugccccgguucaugaacuacacccucaacaacgccaagaagacgaaugugacccugagcaagaagcgcaagcggcgcuuccugggcuuccuccuaggggugggcuccgccaucgcgagcggcgucgccgugugcaagguguugcaccucgagggggaggucaacaagaucaagagcgcccugcuguccaccaacaaggccgugguaagccucuccaacggcgucagcguucugaccuucaaggugcuggaccucaagaacuauaucgacaagcagcugcugcccauccugaacaagcagagcugcuccaucucaaacaucgaaacggugauugaguuccagcagaagaacaaccggcuccuggaaaucacccgcgaguucagcgugaacgccggggucaccacccccguguccacguacaugcugaccaacagcgagcuccuaucccugaucaacgacaugccgaucaccaacgaccagaagaagcucaugagcaacaacgugcagaucguccggcagcaguccuacagcaucaugugcaucaucaaggaagaggugcuggcguacgugguccagcugccccucuacggcgugaucgacacccccugcuggaagcugcacacgagcccccugugcacaaccaacaccaaggagggguccaacaucugccucacgcgcaccgaccggggcugguacugcgacaacgccggcagcgucuccuucuucccgcaggccgagaccugcaaggugcagagcaaccgcguguucugcgacaccaugaacucccugacgcugcccucugagguaaaccucugcaacgucgacaucuucaaccccaaguacgacugcaagaucaugaccuccaagacagacgugagcuccagcgugaucacaucccugggggccaucgucagcugcuacggcaagacuaaguguacugccagcaacaagaaccgggggaucaucaagaccuucuccaacggcugcgacuacgugagcaacaagggcguggacaccguguccgucgggaacacccuguacuacguuaauaagcaggagggcaagagccucuacgugaaaggggagcccaucauuaacuucuacgacccacugguuuuccccuccgacgaguucgacgcgagcaucucccaggugaacgagaagaucaaccagagccuggccuucauccgcaaguccgacgagcugcuccacaacgugaacgccggcaagagcacgaccaacaucaugaucaccaccaucaucaucgugaucaucgugauucugcugucccucaucgccguggggcugcugcuuuacugcaaggcccggugaggacuaguguccaccugucccuccugggcugcuggauugucucguuuuccugccaaauaaacaggaucagcgcuuuacagaucuaaaaaaaaaaaaaaaaaaaaaaaaaaaaaaaaaaaaaaaaaaaaaaaaaaaaaaaaaaaaaaaaugcaucccccccccccccccccccccccccccccccaaaggcucuuuucagagccaccagaauu

SEQ ID NO: 1468 - RNA, 1964 nt, Artificial Sequence
  mRNA product Design e-5 comprising derived and/or modified sequence from HRSV(A2)__F-del_DSCav1 (opt1)
gggagagcggcucggccauuuugucccagucaguccggaggcugcggcugcagaaguaccgccugcggaguaacugcaaagaagcuuaccauggagcugcucauccugaaggccaacgccaucaccaccauccugacggcggugaccuucugcuucgccagcggccagaacaucaccgaggaguucuaccaguccacgugcagcgccgucuccaagggguaccucagcgcccugcggaccggcugguacaccuccgugaucaccaucgagcugagcaacaucaaggagaacaagugcaacgggaccgacgccaaggugaagcucaucaagcaggagcuggacaaguacaagaacgcggucacggagcugcagcuccugaugcaguccaccccggcaaccaacaaccgcgcccggcgcgagcugccccgguucaugaacuacacccucaacaacgccaagaagacgaacgugacccugagcaagaagcgcaagcggcgcuuccugggcuuccuccugggggugggcuccgccaucgcgagcggcgucgccgugugcaaggugcugcaccucgagggggaggucaacaagaucaagagcgcccugcuguccaccaacaaggccguggugagccucuccaacggcgucagcgugcugaccuucaaggugcuggaccucaagaacuacaucgacaagcagcugcugcccauccugaacaagcagagcugcuccaucagcaacaucgagacggugaucgaguuccagcagaagaacaaccggcuccuggagaucacccgcgaguucagcgugaacgccggggucaccacccccguguccacguacaugcugaccaacagcgagcuccugucccugaucaacgacaugccgaucaccaacgaccagaagaagcucaugagcaacaacgugcagaucguccggcagcaguccuacagcaucaugugcaucaucaaggaggaggugcuggcguacgugguccagcugccccucuacggcgugaucgacacccccugcuggaagcugcacacgagcccccugugcaccaccaacaccaaggagggguccaacaucugccucacgcgcaccgaccggggcugguacugcgacaacgccggcagcgucuccuucuucccgcaggccgagaccugcaaggugcagagcaaccgcguguucugcgacaccaugaacucccugacgcugcccagcgagguaaaccucugcaacgucgacaucuucaaccccaaguacgacugcaagaucaugaccuccaagaccgacgugagcuccagcgugaucaccucccugggggccaucgucagcugcuacggcaagacgaagugcaccgccagcaacaagaaccgggggaucaucaagaccuucuccaacggcugcgacuacgugagcaacaagggcguggacaccguguccgucgggaacacccuguacuacgugaacaagcaggagggcaagagccucuacgugaagggggagcccaucaucaacuucuacgacccgcuggucuuccccuccgacgaguucgacgcgagcaucucccaggugaacgagaagaucaaccagagccuggccuucauccgcaaguccgacgagcugcuccacaacgugaacgccggcaagagcacgaccaacaucaugaucaccaccaucaucaucgucaucaucgugauccugcugucccucaucgccguggggcugcugcucuacugcaaggcccggugaggacuaguguccaccugucccuccugggcugcuggauugucucguuuuccugccaaauaaacaggaucagcgcuuuacagaucuaaaaaaaaaaaaaaaaaaaaaaaaaaaaaaaaaaaaaaaaaaaaaaaaaaaaaaaaaaaaaaaaugcaucccccccccccccccccccccccccccccccaaaggcucuuuucagagccaccagaauu

SEQ ID NO: 1469 - RNA, 1964 nt, Artificial Sequence
  mRNA product Design e-5 comprising derived and/or modified sequence from HRSV(A2)__F-del_DSCav1 (opt1)
gggagagcggcucggccauuuugucccagucaguccggaggcugcggcugcagaaguaccgccugcggaguaacugcaaagaagcuuaccauggagcugcucauccugaaggccaacgccaucaccaccauccugacggcggugaccuucugcuucgccagcggccagaacaucaccgaggaguucuaccaguccacgugcagcgccgucuccaagggguaccucagcgcccugcgcaccggcugguacaccuccgugaucaccaucgagcugagcaacaucaaggagaacaagugcaacgggaccgacgccaaggugaagcucaucaagcaggagcuggacaaguacaagaacgcggucacggagcugcagcuccugaugcaguccacccccgccaccaacaaccgggcccgccgggagcugccgcgcuucaugaacuacacccucaacaacgccaagaagacgaacgugacccugagcaagaagcggaagcgccgguuccugggcuuccuccugggggugggcuccgcgaucgccagcggcgucgccgugugcaaggugcugcaccucgagggggaggucaacaagaucaaguccgcccugcugagcaccaacaaggccguggugucccucagcaacggcgucuccgugcugaccuucaaggugcuggaccucaagaacuacaucgacaagcagcugcugcccauccucaacaagcagagcugcuccaucagcaacaucgagacggucaucgaguuccagcagaagaacaaccgccugcuggagaucacccgggaguucuccgugaacgcgggggugaccacccccgucagcacguacaugcucaccaacagcgagcugcugucccucaucaacgacaugcccaucaccaacgaccagaagaagcugaugagcaacaacgugcagaucgugcgccagcaguccuacagcaucaugugcaucaucaaggaggagguccuggccuacguggugcagcucccgcuguacggcgucaucgacacccccugcuggaagcugcacacgagcccccucugcaccaccaacaccaaggaggggagcaacaucugccugacgcggaccgaccgcggcugguacugcgacaacgccggcuccgugagcuucuucccccaggccgagaccugcaagguccaguccaaccggguguucugcgacaccaugaacagccugacgcucccguccgaggugaaccugugcaacgucgacaucuucaaccccaaguacgacugcaagaucaugaccagcaagaccgacguguccagcuccgugaucaccagccugggggccaucgucuccugcuacggcaagacgaagugcaccgcgagcaacaagaaccgcgggaucaucaagaccuucuccaacggcugcgacuacgugagcaacaagggcguggacaccgucagcguggggaacacccucuacuacgugaacaagcaggagggcaagucccuguacgucaagggggagcccaucaucaacuucuacgacccccugguguucccgagcgacgaguucgacgccuccaucagccaggugaacgagaagaucaaccagucccucgccuucauccggaaguccgacgagcugcugcacaacgucaacgccggcaaguccacgaccaacaucaugaucaccaccaucaucaucgugaucaucgugauccugcucagccugaucgccgucgggcugcuccuguacugcaaggcgcgcugaggacuaguguccaccugucccuccugggcugcuggauugucucguuuuccugccaaauaaacaggaucagcgcuuuacagaucuaaaaaaaaaaaaaaaaaaaaaaaaaaaaaaaaaaaaaaaaaaaaaaaaaaaaaaaaaaaaaaaaugcaucccccccccccccccccccccccccccccccaaaggcucuuuucagagccaccagaauu

SEQ ID NO: 1470 - RNA, 1964 nt, Artificial Sequence
  mRNA product Design e-5 comprising derived and/or modified sequence from HRSV(A2)__F-del_DSCav1 (opt2)
gggagagcggcucggccauuuugucccagucaguccggaggcugcggcugcagaaguaccgccugcggaguaacugcaaagaagcuuaccauggagcuccucauccucaaggccaacgccaucaccaccauccucaccgccgucaccuucugcuucgccuccggccagaacaucaccgaggaguucuaccaguccaccugcuccgccgucuccaagggcuaccucuccgcccuccgcaccggcugguacaccuccgucaucaccaucgagcucuccaacaucaaggagaacaagugcaacggcaccgacgccaaggucaagcucaucaagcaggagcucgacaaguacaagaacgccgucaccgagcuccagcuccucaugcaguccacccccgccaccaacaaccgcgcccgccgcgagcucccccgcuucaugaacuacacccucaacaacgccaagaagaccaacgucacccucuccaagaagcgcaagcgccgcuuccucggcuuccuccucggcgucggcuccgccaucgccuccggcgucgccgucugcaagguccuccaccucgagggcgaggucaacaagaucaaguccgcccuccucuccaccaacaaggccgucgucucccucuccaacggcgucuccguccucaccuucaagguccucgaccucaagaacuacaucgacaagcagcuccuccccauccucaacaagcaguccugcuccaucuccaacaucgagaccgucaucgaguuccagcagaagaacaaccgccuccucgagaucacccgcgaguucuccgucaacgccggcgucaccacccccgucuccaccuacaugcucaccaacuccgagcuccucucccucaucaacgacaugcccaucaccaacgaccagaagaagcucauguccaacaacguccagaucguccgccagcaguccuacuccaucaugugcaucaucaaggaggagguccucgccuacgucguccagcucccccucuacggcgucaucgacacccccugcuggaagcuccacaccuccccccucugcaccaccaacaccaaggagggcuccaacaucugccucacccgcaccgaccgcggcugguacugcgacaacgccggcuccgucuccuucuucccccaggccgagaccugcaagguccaguccaaccgcgucuucugcgacaccaugaacucccucacccuccccuccgaggucaaccucugcaacgucgacaucuucaaccccaaguacgacugcaagaucaugaccuccaagaccgacgucuccuccuccgucaucaccucccucggcgccaucgucuccugcuacggcaagaccaagugcaccgccuccaacaagaaccgcggcaucaucaagaccuucuccaacggcugcgacuacgucuccaacaagggcgucgacaccgucuccgucggcaacacccucuacuacgucaacaagcaggagggcaagucccucuacgucaagggcgagcccaucaucaacuucuacgacccccucgucuuccccuccgacgaguucgacgccuccaucucccaggucaacgagaagaucaaccagucccucgccuucauccgcaaguccgacgagcuccuccacaacgucaacgccggcaaguccaccaccaacaucaugaucaccaccaucaucaucgucaucaucgucauccuccucucccucaucgccgucggccuccuccucuacugcaaggcccgcugaggacuaguguccaccugucccuccugggcugcuggauugucucguuuuccugccaaauaaacaggaucagcgcuuuacagaucuaaaaaaaaaaaaaaaaaaaaaaaaaaaaaaaaaaaaaaaaaaaaaaaaaaaaaaaaaaaaaaaaugcaucccccccccccccccccccccccccccccccaaaggcucuuuucagagccaccagaauu

SEQ ID NO: 1471 - RNA, 1964 nt, Artificial Sequence
  mRNA product Design e-5 comprising derived and/or modified sequence from HRSV(A2)__F-del_DSCav1 (opt3)
gggagagcggcucggccauuuugucccagucaguccggaggcugcggcugcagaaguaccgccugcggaguaacugcaaagaagcuuaccauggagcugcucauccuuaaggccaacgcuauuaccacaauacugacugcagugacguucugcuuugccagcggccagaauaucaccgaagaguucuaccaauccacauguucugcggucucaaaaggguauuugagugcuuuaagaacuggaugguacaccagcguuauuacaaucgaacuguccaacauuaaggagaauaaaugcaacgguaccgacgccaaggugaaacuaaucaagcaggaacucgauaaguauaaaaaugcaguaacugagcugcagcuucugaugcagucuacacccgccaccaacaauagggcucggcgcgaguugccucgauuuaugaacuacacgcucaauaacgcaaagaaaacuaaugugacccugucgaagaaacguaagagaagguuccugggcuuucucuuaggggucggaucagccauagcuagcggcguggccguuuguaaggugcugcaccuugaaggugaggucaacaaaaucaagagugcguugcuguccacaaauaaagcagugguaucucuaagcaacgggguuuccgugcucacuuucaagguccuggaccuuaaaaauuauauugauaagcaacuguugccaauccucaacaaacagucaugcaguauuagcaacaucgaaaccgugauagaguuucagcagaagaauaaccggcuguuagagauuacacgcgaguucucugugaaugccggagucaccacgccgguuuccacuuacaugcugacaaacucagaacuccuuagccugaucaaugacaugcccauuaccaacgaucaaaagaaauugaugaguaauaacgugcagaucguaagacagcagucuuauuccaucauguguauuauaaaggaagaggugcuagcuuacgucgugcaacugccucucuacggcguuaucgacacuccaugcuggaaacugcauacaagcccccuuuguaccacgaauaccaaggaaggcucgaacauuugccugacaaggacugaucgggggugguauugugacaaugccggaucuguguccuuuuucccucaggcagagaccugcaaaguccagucaaaccgcguguuuugugauacaaugaauaguuugacucucccaagcgagguaaaccugugcaauguugacaucuucaaccccaaguacgauugcaagauaaugaccuccaaaacagacgugucuagcucagucauuaccaguuuaggugcuaucguguccuguuauggcaagacuaaaugcacggccagcaacaagaaucgagggaucauuaaaacauuuucuaacggaugugauuacgucucaaauaagggcguggacaccguuaguguggguaacacucuguauuacguaaauaagcaagaagggaaaagccuauaugucaagggagagccuaucauuaacuucuacgacccacucguguucccguccgaugaauuugacgcgucuauaucgcagguuaaugagaaaaucaaccagagccuggccuucauuagaaaguccgaugaacuuuugcacaaugugaacgcaggcaaaucaaccacaaauaucaugaucaccacuauuauaaucgucauuaucgugauucugcucagucugaucgcuguaggccuucuguuguacugcaaggccaggugaggacuaguguccaccugucccuccugggcugcuggauugucucguuuuccugccaaauaaacaggaucagcgcuuuacagaucuaaaaaaaaaaaaaaaaaaaaaaaaaaaaaaaaaaaaaaaaaaaaaaaaaaaaaaaaaaaaaaaaugcaucccccccccccccccccccccccccccccccaaaggcucuuuucagagccaccagaauu

SEQ ID NO: 1472 - RNA, 1964 nt, Artificial Sequence
  mRNA product Design e-5 comprising derived and/or modified sequence from HRSV(A2)__F-del_DSCav1 (opt4)
gggagagcggcucggccauuuugucccagucaguccggaggcugcggcugcagaaguaccgccugcggaguaacugcaaagaagcuuaccauggagcugcugauccugaaggccaacgccaucaccaccauccugaccgccgugaccuucugcuucgccagcggccagaacaucaccgaggaguucuaccagagcaccugcagcgccgugagcaagggcuaccugagcgcccugagaaccggcugguacaccagcgugaucaccaucgagcugagcaacaucaaggagaacaagugcaacggcaccgacgccaaggugaagcugaucaagcaggagcuggacaaguacaagaacgccgugaccgagcugcagcugcugaugcagagcacccccgccaccaacaacagagccagaagagagcugcccagauucaugaacuacacccugaacaacgccaagaagaccaacgugacccugagcaagaagagaaagagaagauuccugggcuuccugcugggcgugggcagcgccaucgccagcggcguggccgugugcaaggugcugcaccuggagggcgaggugaacaagaucaagagcgcccugcugagcaccaacaaggccguggugagccugagcaacggcgugagcgugcugaccuucaaggugcuggaccugaagaacuacaucgacaagcagcugcugcccauccugaacaagcagagcugcagcaucagcaacaucgagaccgugaucgaguuccagcagaagaacaacagacugcuggagaucaccagagaguucagcgugaacgccggcgugaccacccccgugagcaccuacaugcugaccaacagcgagcugcugagccugaucaacgacaugcccaucaccaacgaccagaagaagcugaugagcaacaacgugcagaucgugagacagcagagcuacagcaucaugugcaucaucaaggaggaggugcuggccuacguggugcagcugccccuguacggcgugaucgacacccccugcuggaagcugcacaccagcccccugugcaccaccaacaccaaggagggcagcaacaucugccugaccagaaccgacagaggcugguacugcgacaacgccggcagcgugagcuucuucccccaggccgagaccugcaaggugcagagcaacagaguguucugcgacaccaugaacagccugacccugcccagcgaggugaaccugugcaacguggacaucuucaaccccaaguacgacugcaagaucaugaccagcaagaccgacgugagcagcagcgugaucaccagccugggcgccaucgugagcugcuacggcaagaccaagugcaccgccagcaacaagaacagaggcaucaucaagaccuucagcaacggcugcgacuacgugagcaacaagggcguggacaccgugagcgugggcaacacccuguacuacgugaacaagcaggagggcaagagccuguacgugaagggcgagcccaucaucaacuucuacgacccccugguguuccccagcgacgaguucgacgccagcaucagccaggugaacgagaagaucaaccagagccuggccuucaucagaaagagcgacgagcugcugcacaacgugaacgccggcaagagcaccaccaacaucaugaucaccaccaucaucaucgugaucaucgugauccugcugagccugaucgccgugggccugcugcuguacugcaaggccagaugaggacuaguguccaccugucccuccugggcugcuggauugucucguuuuccugccaaauaaacaggaucagcgcuuuacagaucuaaaaaaaaaaaaaaaaaaaaaaaaaaaaaaaaaaaaaaaaaaaaaaaaaaaaaaaaaaaaaaaaugcaucccccccccccccccccccccccccccccccaaaggcucuuuucagagccaccagaauu

SEQ ID NO: 1473 - RNA, 1964 nt, Artificial Sequence
  mRNA product Design e-5 comprising derived and/or modified sequence from HRSV(A2)__F-del_DSCav1 (opt5)
gggagagcggcucggccauuuugucccagucaguccggaggcugcggcugcagaaguaccgccugcggaguaacugcaaagaagcuuaccauggagcugcucauccugaaggccaacgcuauuaccacaauccuuacggccgugaccuucugcuuugcgagcggccagaauauuacagaagaguucuaccaauccaccuguucugcugucagcaaaggguaucuguccgcccucagaacaggaugguacaccucuguuaucacaauugaacugagcaacaucaaggagaauaaaugcaacggcaccgacgccaaggugaaacuuaucaagcaggaacuggauaaguauaaaaaugcugugacggagcuccagcugcugaugcaguccacccccgccacaaacaaucgggcucgcagagagcucccucgguuuaugaacuacacccugaauaacgccaagaaaacaaaugucacccuuucuaagaaacgcaagagacgguuccugggguuucuccugggagugggcagcgcgauugccuccgggguugcuguguguaagguccuucaccuggaaggagaggugaacaaaaucaagagcgcccuccugucuacgaauaaagcuguugugucccugagcaacggcgucucugugcucacauucaaggugcuggaccuuaaaaauuauauugauaagcaacugcucccgauccugaacaaacaguccugcagcauuucuaacaucgaaaccgucauugaguuucagcagaagaauaaccgccuucuggagaucacaagagaauuuuccguuaaugccggcgugaccacccccgugagcacauacaugcucacgaacuccgagcugcugucucucaucaaugacaugccuauuaccaacgaucaaaagaaacugaugagcaauaacguccagaucgugcggcagcaguccuauagcauuauguguaucauuaaggaagagguucuugcguacgugguccaacugccccucuacggggugaucgacacaccuugcuggaaacugcauaccucuccccuuuguacaaccaauacgaaggaaggauccaacaucugccugacacgcaccgauagaggcugguauugugacaaugccgggagcguuucuuucuucccucaggcugagaccugcaaagugcagagcaaccgggucuuuugugauacaaugaacucccucacccugccgucugaggugaaucugugcaaugucgacauuuucaaccccaaguacgauugcaagaucaugacaagcaaaacggacguguccagcucuguuauuaccucccucggagccaucgugagcuguuauggcaagacaaaaugcaccgcuucuaacaagaaucgcgggauuaucaaaacauuuuccaacggaugugauuacgucagcaauaagggcguggacaccguuuccgugggcaacacgcuguauuacgucaauaagcaagaagggaaaucucuuuaugugaagggagagccuaucauuaacuucuacgacccccugguguucccuagcgaugaauuugacgccuccaucucucagguuaaugagaaaauuaaccagagccucgccuucaucagaaaguccgaugaacugcugcacaaugucaacgcuggcaaaagcaccacaaauauuaugaucaccacaauuaucaucgugauuaucgugauucuucucucucugaucgcggucgggcugcuccuguacugcaaggcccggugaggacuaguguccaccugucccuccugggcugcuggauugucucguuuuccugccaaauaaacaggaucagcgcuuuacagaucuaaaaaaaaaaaaaaaaaaaaaaaaaaaaaaaaaaaaaaaaaaaaaaaaaaaaaaaaaaaaaaaaugcaucccccccccccccccccccccccccccccccaaaggcucuuuucagagccaccagaauu

SEQ ID NO: 1474 - RNA, 1964 nt, Artificial Sequence
  mRNA product Design e-5 comprising derived and/or modified sequence from HRSV(A2)__F-del_DSCav1 (opt6)
gggagagcggcucggccauuuugucccagucaguccggaggcugcggcugcagaaguaccgccugcggaguaacugcaaagaagcuuaccauggaacuauuaauauuaaaagcaaaugcuauuaccacaauacuuacugcuguaaccuucugcuuugccucuggccaaaacauaacagaagaauuuuaucaaucaacuugcuccgcuguaagcaaaggcuaccuaucagcauuacgcaccggcugguacacaucaguaauaacaauagaacuauccaacauaaaagaaaauaaaugcaacggaacagacgcaaaaguaaaauuaauaaaacaagaacucgacaaauacaaaaacgcaguaacagaauuacaacuacuaaugcaaaguacuccagccaccaacaacagagcaagaagagaauuaccacgauuuaugaacuacacacuaaacaaugcaaaaaaaacaaacguaacacuaucaaaaaaacguaaacgcagauucuuaggcuuccuccuagguguaggcucagcaaucgccucaggaguggcaguuuguaaaguacuacaccuagaaggagaaguaaacaaaaucaaaucugcccuuuuaucgacaaacaaagcaguaguaucguuauccaauggagucucaguauugacauucaaaguauuagaccuaaaaaauuauauagauaaacaacucuuaccuaucuuaaauaaacaaagcugcucaauaaguaacauagaaaccguaauagaauuucaacaaaaaaacaauagacuccuugagaucacucgagaauuuucaguaaacgcagguguaacaacaccaguaagcacauacaugcuaacaaauagugaacuauuaucucuaauuaacgauaugcccauaaccaacgaucaaaaaaaacucaugaguaacaacguacaaauaguaagacaacaauccuauagcauaaugugcauuauaaaagaagaaguacuagcauauguaguccaacuaccacuauacggcguaauagacacaccaugcuggaaacuacacaccucaccccuaugcacaacaaauacaaaagaaggaucaaacauaugcuuaaccaggacagacagaggcugguacugcgauaacgcaggaucuguuucauucuucccccaagcagaaacaugcaaaguacaaucaaacagaguauuuugugauaccaugaacucacucacauuaccauccgaagucaaccucugcaacguagacauauucaaccccaaauacgacugcaaaauaaugaccucaaaaacagauguaucaucaucaguaaucacaucacuaggagcuaucguaucuuguuauggaaaaacaaaaugcacagcauccaacaaaaacagaggaauuaucaaaacauucucaaauggaugugacuauguaucaaacaaaggaguagacaccguaagcguaggcaauacacuauauuacguaaauaaacaagaaggaaaaucacuauacguaaaaggugaaccaauaauaaacuucuaugacccccuaguauucccaucagaugaauuugacgcaagcauaucacaagucaacgaaaaaauaaaccaaucacuggcauucauucgcaaaucagaugaacuucuccacaacguaaacgcugguaaaagcacuacaaacauaaugauaacaacaaucaucauugucauaauaguuauucuauuaucacuaaucgcaguaggauuacuacuauacuguaaagcgagguaaggacuaguguccaccugucccuccugggcugcuggauugucucguuuuccugccaaauaaacaggaucagcgcuuuacagaucuaaaaaaaaaaaaaaaaaaaaaaaaaaaaaaaaaaaaaaaaaaaaaaaaaaaaaaaaaaaaaaaaugcaucccccccccccccccccccccccccccccccaaaggcucuuuucagagccaccagaauu

SEQ ID NO: 1475 - RNA, 1964 nt, Artificial Sequence
  mRNA product Design e-5 comprising derived and/or modified sequence from HRSV(A2)__F-del_DSCav1 (opt11)
gggagagcggcucggccauuuugucccagucaguccggaggcugcggcugcagaaguaccgccugcggaguaacugcaaagaagcuuaccauggagcugcucauccugaaggccaacgccaucaccacaauccugacggcggugaccuucugcuucgccagcggccagaacaucaccgaggaguucuaccaguccacgugcagcgccgucuccaagggguaccucagcgcccugcgaaccggcugguacaccuccgugaucaccaucgagcugucaaacaucaaggagaacaagugcaacgggaccgaugccaagguuaagcucaucaagcaggagcuggacaaguacaagaacgcggucacggagcugcagcuccugaugcaguccacuccggcaaccaacaaccgcgccaggcgcgagcugccccgguucaugaacuacacccucaacaacgccaagaagacgaaugugacccugagcaagaagcgcaagcggcgcuuccugggcuuccuccuaggggugggcuccgccaucgcgagcggcgucgccgugugcaagguguugcaccucgagggggaggucaacaagaucaagagcgcccugcuguccaccaacaaggccgugguaagccucuccaacggcgucagcguucugaccuucaaggugcuggaccucaagaacuauaucgacaagcagcugcugcccauccugaacaagcagagcugcuccaucucaaacaucgaaacggugauugaguuccagcagaagaacaaccggcuccuggaaaucacccgcgaguucagcgugaacgccggggucaccacccccguguccacguacaugcugaccaacagcgagcuccuaucccugaucaacgacaugccgaucaccaacgaccagaagaagcucaugagcaacaacgugcagaucguccggcagcaguccuacagcaucaugugcaucaucaaggaagaggugcuggcguacgugguccagcugccccucuacggcgugaucgacacccccugcuggaagcugcacacgagcccccugugcacaaccaacaccaaggagggguccaacaucugccucacgcgcaccgaccggggcugguacugcgacaacgccggcagcgucuccuucuucccgcaggccgagaccugcaaggugcagagcaaccgcguguucugcgacaccaugaacucccugacgcugcccucugagguaaaccucugcaacgucgacaucuucaaccccaaguacgacugcaagaucaugaccuccaagacagacgugagcuccagcgugaucacaucccugggggccaucgucagcugcuacggcaagacuaaguguacugccagcaacaagaaccgggggaucaucaagaccuucuccaacggcugcgacuacgugagcaacaagggcguggacaccguguccgucgggaacacccuguacuacguuaauaagcaggagggcaagagccucuacgugaaaggggagcccaucauuaacuucuacgacccacugguuuuccccuccgacgaguucgacgcgagcaucucccaggugaacgagaagaucaaccagagccuggccuucauccgcaaguccgacgagcugcuccacaacgugaacgccggcaagagcacgaccaacaucaugaucaccaccaucaucaucgugaucaucgugauucugcugucccucaucgccguggggcugcugcuuuacugcaaggcccggugaggacuaguguccaccugucccuccugggcugcuggauugucucguuuuccugccaaauaaacaggaucagcgcuuuacagaucuaaaaaaaaaaaaaaaaaaaaaaaaaaaaaaaaaaaaaaaaaaaaaaaaaaaaaaaaaaaaaaaaugcaucccccccccccccccccccccccccccccccaaaggcucuuuucagagccaccagaauu

SEQ ID NO: 1476 - RNA, 2031 nt, Artificial Sequence
  mRNA product Design e-6 comprising derived and/or modified sequence from HRSV(A2)__F-del_DSCav1 (opt1)
gggagagcggcucggccauuuugucccagucaguccggaggcugcggcugcagaaguaccgccugcggaguaacugcaaagaagcuuaccauggagcugcucauccugaaggccaacgccaucaccaccauccugacggcggugaccuucugcuucgccagcggccagaacaucaccgaggaguucuaccaguccacgugcagcgccgucuccaagggguaccucagcgcccugcggaccggcugguacaccuccgugaucaccaucgagcugagcaacaucaaggagaacaagugcaacgggaccgacgccaaggugaagcucaucaagcaggagcuggacaaguacaagaacgcggucacggagcugcagcuccugaugcaguccaccccggcaaccaacaaccgcgcccggcgcgagcugccccgguucaugaacuacacccucaacaacgccaagaagacgaacgugacccugagcaagaagcgcaagcggcgcuuccugggcuuccuccugggggugggcuccgccaucgcgagcggcgucgccgugugcaaggugcugcaccucgagggggaggucaacaagaucaagagcgcccugcuguccaccaacaaggccguggugagccucuccaacggcgucagcgugcugaccuucaaggugcuggaccucaagaacuacaucgacaagcagcugcugcccauccugaacaagcagagcugcuccaucagcaacaucgagacggugaucgaguuccagcagaagaacaaccggcuccuggagaucacccgcgaguucagcgugaacgccggggucaccacccccguguccacguacaugcugaccaacagcgagcuccugucccugaucaacgacaugccgaucaccaacgaccagaagaagcucaugagcaacaacgugcagaucguccggcagcaguccuacagcaucaugugcaucaucaaggaggaggugcuggcguacgugguccagcugccccucuacggcgugaucgacacccccugcuggaagcugcacacgagcccccugugcaccaccaacaccaaggagggguccaacaucugccucacgcgcaccgaccggggcugguacugcgacaacgccggcagcgucuccuucuucccgcaggccgagaccugcaaggugcagagcaaccgcguguucugcgacaccaugaacucccugacgcugcccagcgagguaaaccucugcaacgucgacaucuucaaccccaaguacgacugcaagaucaugaccuccaagaccgacgugagcuccagcgugaucaccucccugggggccaucgucagcugcuacggcaagacgaagugcaccgccagcaacaagaaccgggggaucaucaagaccuucuccaacggcugcgacuacgugagcaacaagggcguggacaccguguccgucgggaacacccuguacuacgugaacaagcaggagggcaagagccucuacgugaagggggagcccaucaucaacuucuacgacccgcuggucuuccccuccgacgaguucgacgcgagcaucucccaggugaacgagaagaucaaccagagccuggccuucauccgcaaguccgacgagcugcuccacaacgugaacgccggcaagagcacgaccaacaucaugaucaccaccaucaucaucgucaucaucgugauccugcugucccucaucgccguggggcugcugcucuacugcaaggcccggugaggacuaguacuggcugcaucucccuuuccucuguccuccauccuucucccaggauggugaagggggaccugguacccagugauccccaccccaggauccuaaaucaugacuuaccugcuaauaaaaacucauuggaaaagugagaagaucuaaaaaaaaaaaaaaaaaaaaaaaaaaaaaaaaaaaaaaaaaaaaaaaaaaaaaaaaaaaaaaaaugcaucccccccccccccccccccccccccccccccaaaggcucuuuucagagccaccagaauu

SEQ ID NO: 1477 - RNA, 2031 nt, Artificial Sequence
  mRNA product Design e-6 comprising derived and/or modified sequence from HRSV(A2)__F-del_DSCav1 (opt1)
gggagagcggcucggccauuuugucccagucaguccggaggcugcggcugcagaaguaccgccugcggaguaacugcaaagaagcuuaccauggagcugcucauccugaaggccaacgccaucaccaccauccugacggcggugaccuucugcuucgccagcggccagaacaucaccgaggaguucuaccaguccacgugcagcgccgucuccaagggguaccucagcgcccugcgcaccggcugguacaccuccgugaucaccaucgagcugagcaacaucaaggagaacaagugcaacgggaccgacgccaaggugaagcucaucaagcaggagcuggacaaguacaagaacgcggucacggagcugcagcuccugaugcaguccacccccgccaccaacaaccgggcccgccgggagcugccgcgcuucaugaacuacacccucaacaacgccaagaagacgaacgugacccugagcaagaagcggaagcgccgguuccugggcuuccuccugggggugggcuccgcgaucgccagcggcgucgccgugugcaaggugcugcaccucgagggggaggucaacaagaucaaguccgcccugcugagcaccaacaaggccguggugucccucagcaacggcgucuccgugcugaccuucaaggugcuggaccucaagaacuacaucgacaagcagcugcugcccauccucaacaagcagagcugcuccaucagcaacaucgagacggucaucgaguuccagcagaagaacaaccgccugcuggagaucacccgggaguucuccgugaacgcgggggugaccacccccgucagcacguacaugcucaccaacagcgagcugcugucccucaucaacgacaugcccaucaccaacgaccagaagaagcugaugagcaacaacgugcagaucgugcgccagcaguccuacagcaucaugugcaucaucaaggaggagguccuggccuacguggugcagcucccgcuguacggcgucaucgacacccccugcuggaagcugcacacgagcccccucugcaccaccaacaccaaggaggggagcaacaucugccugacgcggaccgaccgcggcugguacugcgacaacgccggcuccgugagcuucuucccccaggccgagaccugcaagguccaguccaaccggguguucugcgacaccaugaacagccugacgcucccguccgaggugaaccugugcaacgucgacaucuucaaccccaaguacgacugcaagaucaugaccagcaagaccgacguguccagcuccgugaucaccagccugggggccaucgucuccugcuacggcaagacgaagugcaccgcgagcaacaagaaccgcgggaucaucaagaccuucuccaacggcugcgacuacgugagcaacaagggcguggacaccgucagcguggggaacacccucuacuacgugaacaagcaggagggcaagucccuguacgucaagggggagcccaucaucaacuucuacgacccccugguguucccgagcgacgaguucgacgccuccaucagccaggugaacgagaagaucaaccagucccucgccuucauccggaaguccgacgagcugcugcacaacgucaacgccggcaaguccacgaccaacaucaugaucaccaccaucaucaucgugaucaucgugauccugcucagccugaucgccgucgggcugcuccuguacugcaaggcgcgcugaggacuaguacuggcugcaucucccuuuccucuguccuccauccuucucccaggauggugaagggggaccugguacccagugauccccaccccaggauccuaaaucaugacuuaccugcuaauaaaaacucauuggaaaagugagaagaucuaaaaaaaaaaaaaaaaaaaaaaaaaaaaaaaaaaaaaaaaaaaaaaaaaaaaaaaaaaaaaaaaugcaucccccccccccccccccccccccccccccccaaaggcucuuuucagagccaccagaauu

SEQ ID NO: 1478 - RNA, 2031 nt, Artificial Sequence
  mRNA product Design e-6 comprising derived and/or modified sequence from HRSV(A2)__F-del_DSCav1 (opt2)
gggagagcggcucggccauuuugucccagucaguccggaggcugcggcugcagaaguaccgccugcggaguaacugcaaagaagcuuaccauggagcuccucauccucaaggccaacgccaucaccaccauccucaccgccgucaccuucugcuucgccuccggccagaacaucaccgaggaguucuaccaguccaccugcuccgccgucuccaagggcuaccucuccgcccuccgcaccggcugguacaccuccgucaucaccaucgagcucuccaacaucaaggagaacaagugcaacggcaccgacgccaaggucaagcucaucaagcaggagcucgacaaguacaagaacgccgucaccgagcuccagcuccucaugcaguccacccccgccaccaacaaccgcgcccgccgcgagcucccccgcuucaugaacuacacccucaacaacgccaagaagaccaacgucacccucuccaagaagcgcaagcgccgcuuccucggcuuccuccucggcgucggcuccgccaucgccuccggcgucgccgucugcaagguccuccaccucgagggcgaggucaacaagaucaaguccgcccuccucuccaccaacaaggccgucgucucccucuccaacggcgucuccguccucaccuucaagguccucgaccucaagaacuacaucgacaagcagcuccuccccauccucaacaagcaguccugcuccaucuccaacaucgagaccgucaucgaguuccagcagaagaacaaccgccuccucgagaucacccgcgaguucuccgucaacgccggcgucaccacccccgucuccaccuacaugcucaccaacuccgagcuccucucccucaucaacgacaugcccaucaccaacgaccagaagaagcucauguccaacaacguccagaucguccgccagcaguccuacuccaucaugugcaucaucaaggaggagguccucgccuacgucguccagcucccccucuacggcgucaucgacacccccugcuggaagcuccacaccuccccccucugcaccaccaacaccaaggagggcuccaacaucugccucacccgcaccgaccgcggcugguacugcgacaacgccggcuccgucuccuucuucccccaggccgagaccugcaagguccaguccaaccgcgucuucugcgacaccaugaacucccucacccuccccuccgaggucaaccucugcaacgucgacaucuucaaccccaaguacgacugcaagaucaugaccuccaagaccgacgucuccuccuccgucaucaccucccucggcgccaucgucuccugcuacggcaagaccaagugcaccgccuccaacaagaaccgcggcaucaucaagaccuucuccaacggcugcgacuacgucuccaacaagggcgucgacaccgucuccgucggcaacacccucuacuacgucaacaagcaggagggcaagucccucuacgucaagggcgagcccaucaucaacuucuacgacccccucgucuuccccuccgacgaguucgacgccuccaucucccaggucaacgagaagaucaaccagucccucgccuucauccgcaaguccgacgagcuccuccacaacgucaacgccggcaaguccaccaccaacaucaugaucaccaccaucaucaucgucaucaucgucauccuccucucccucaucgccgucggccuccuccucuacugcaaggcccgcugaggacuaguacuggcugcaucucccuuuccucuguccuccauccuucucccaggauggugaagggggaccugguacccagugauccccaccccaggauccuaaaucaugacuuaccugcuaauaaaaacucauuggaaaagugagaagaucuaaaaaaaaaaaaaaaaaaaaaaaaaaaaaaaaaaaaaaaaaaaaaaaaaaaaaaaaaaaaaaaaugcaucccccccccccccccccccccccccccccccaaaggcucuuuucagagccaccagaauu

SEQ ID NO: 1479 - RNA, 2031 nt, Artificial Sequence
  mRNA product Design e-6 comprising derived and/or modified sequence from HRSV(A2)__F-del_DSCav1 (opt3)
gggagagcggcucggccauuuugucccagucaguccggaggcugcggcugcagaaguaccgccugcggaguaacugcaaagaagcuuaccauggagcugcucauccuuaaggccaacgcuauuaccacaauacugacugcagugacguucugcuuugccagcggccagaauaucaccgaagaguucuaccaauccacauguucugcggucucaaaaggguauuugagugcuuuaagaacuggaugguacaccagcguuauuacaaucgaacuguccaacauuaaggagaauaaaugcaacgguaccgacgccaaggugaaacuaaucaagcaggaacucgauaaguauaaaaaugcaguaacugagcugcagcuucugaugcagucuacacccgccaccaacaauagggcucggcgcgaguugccucgauuuaugaacuacacgcucaauaacgcaaagaaaacuaaugugacccugucgaagaaacguaagagaagguuccugggcuuucucuuaggggucggaucagccauagcuagcggcguggccguuuguaaggugcugcaccuugaaggugaggucaacaaaaucaagagugcguugcuguccacaaauaaagcagugguaucucuaagcaacgggguuuccgugcucacuuucaagguccuggaccuuaaaaauuauauugauaagcaacuguugccaauccucaacaaacagucaugcaguauuagcaacaucgaaaccgugauagaguuucagcagaagaauaaccggcuguuagagauuacacgcgaguucucugugaaugccggagucaccacgccgguuuccacuuacaugcugacaaacucagaacuccuuagccugaucaaugacaugcccauuaccaacgaucaaaagaaauugaugaguaauaacgugcagaucguaagacagcagucuuauuccaucauguguauuauaaaggaagaggugcuagcuuacgucgugcaacugccucucuacggcguuaucgacacuccaugcuggaaacugcauacaagcccccuuuguaccacgaauaccaaggaaggcucgaacauuugccugacaaggacugaucgggggugguauugugacaaugccggaucuguguccuuuuucccucaggcagagaccugcaaaguccagucaaaccgcguguuuugugauacaaugaauaguuugacucucccaagcgagguaaaccugugcaauguugacaucuucaaccccaaguacgauugcaagauaaugaccuccaaaacagacgugucuagcucagucauuaccaguuuaggugcuaucguguccuguuauggcaagacuaaaugcacggccagcaacaagaaucgagggaucauuaaaacauuuucuaacggaugugauuacgucucaaauaagggcguggacaccguuaguguggguaacacucuguauuacguaaauaagcaagaagggaaaagccuauaugucaagggagagccuaucauuaacuucuacgacccacucguguucccguccgaugaauuugacgcgucuauaucgcagguuaaugagaaaaucaaccagagccuggccuucauuagaaaguccgaugaacuuuugcacaaugugaacgcaggcaaaucaaccacaaauaucaugaucaccacuauuauaaucgucauuaucgugauucugcucagucugaucgcuguaggccuucuguuguacugcaaggccaggugaggacuaguacuggcugcaucucccuuuccucuguccuccauccuucucccaggauggugaagggggaccugguacccagugauccccaccccaggauccuaaaucaugacuuaccugcuaauaaaaacucauuggaaaagugagaagaucuaaaaaaaaaaaaaaaaaaaaaaaaaaaaaaaaaaaaaaaaaaaaaaaaaaaaaaaaaaaaaaaaugcaucccccccccccccccccccccccccccccccaaaggcucuuuucagagccaccagaauu

SEQ ID NO: 1480 - RNA, 2031 nt, Artificial Sequence
  mRNA product Design e-6 comprising derived and/or modified sequence from HRSV(A2)__F-del_DSCav1 (opt4)
gggagagcggcucggccauuuugucccagucaguccggaggcugcggcugcagaaguaccgccugcggaguaacugcaaagaagcuuaccauggagcugcugauccugaaggccaacgccaucaccaccauccugaccgccgugaccuucugcuucgccagcggccagaacaucaccgaggaguucuaccagagcaccugcagcgccgugagcaagggcuaccugagcgcccugagaaccggcugguacaccagcgugaucaccaucgagcugagcaacaucaaggagaacaagugcaacggcaccgacgccaaggugaagcugaucaagcaggagcuggacaaguacaagaacgccgugaccgagcugcagcugcugaugcagagcacccccgccaccaacaacagagccagaagagagcugcccagauucaugaacuacacccugaacaacgccaagaagaccaacgugacccugagcaagaagagaaagagaagauuccugggcuuccugcugggcgugggcagcgccaucgccagcggcguggccgugugcaaggugcugcaccuggagggcgaggugaacaagaucaagagcgcccugcugagcaccaacaaggccguggugagccugagcaacggcgugagcgugcugaccuucaaggugcuggaccugaagaacuacaucgacaagcagcugcugcccauccugaacaagcagagcugcagcaucagcaacaucgagaccgugaucgaguuccagcagaagaacaacagacugcuggagaucaccagagaguucagcgugaacgccggcgugaccacccccgugagcaccuacaugcugaccaacagcgagcugcugagccugaucaacgacaugcccaucaccaacgaccagaagaagcugaugagcaacaacgugcagaucgugagacagcagagcuacagcaucaugugcaucaucaaggaggaggugcuggccuacguggugcagcugccccuguacggcgugaucgacacccccugcuggaagcugcacaccagcccccugugcaccaccaacaccaaggagggcagcaacaucugccugaccagaaccgacagaggcugguacugcgacaacgccggcagcgugagcuucuucccccaggccgagaccugcaaggugcagagcaacagaguguucugcgacaccaugaacagccugacccugcccagcgaggugaaccugugcaacguggacaucuucaaccccaaguacgacugcaagaucaugaccagcaagaccgacgugagcagcagcgugaucaccagccugggcgccaucgugagcugcuacggcaagaccaagugcaccgccagcaacaagaacagaggcaucaucaagaccuucagcaacggcugcgacuacgugagcaacaagggcguggacaccgugagcgugggcaacacccuguacuacgugaacaagcaggagggcaagagccuguacgugaagggcgagcccaucaucaacuucuacgacccccugguguuccccagcgacgaguucgacgccagcaucagccaggugaacgagaagaucaaccagagccuggccuucaucagaaagagcgacgagcugcugcacaacgugaacgccggcaagagcaccaccaacaucaugaucaccaccaucaucaucgugaucaucgugauccugcugagccugaucgccgugggccugcugcuguacugcaaggccagaugaggacuaguacuggcugcaucucccuuuccucuguccuccauccuucucccaggauggugaagggggaccugguacccagugauccccaccccaggauccuaaaucaugacuuaccugcuaauaaaaacucauuggaaaagugagaagaucuaaaaaaaaaaaaaaaaaaaaaaaaaaaaaaaaaaaaaaaaaaaaaaaaaaaaaaaaaaaaaaaaugcaucccccccccccccccccccccccccccccccaaaggcucuuuucagagccaccagaauu

SEQ ID NO: 1481 - RNA, 2031 nt, Artificial Sequence
  mRNA product Design e-6 comprising derived and/or modified sequence from HRSV(A2)__F-del_DSCav1 (opt5)
gggagagcggcucggccauuuugucccagucaguccggaggcugcggcugcagaaguaccgccugcggaguaacugcaaagaagcuuaccauggagcugcucauccugaaggccaacgcuauuaccacaauccuuacggccgugaccuucugcuuugcgagcggccagaauauuacagaagaguucuaccaauccaccuguucugcugucagcaaaggguaucuguccgcccucagaacaggaugguacaccucuguuaucacaauugaacugagcaacaucaaggagaauaaaugcaacggcaccgacgccaaggugaaacuuaucaagcaggaacuggauaaguauaaaaaugcugugacggagcuccagcugcugaugcaguccacccccgccacaaacaaucgggcucgcagagagcucccucgguuuaugaacuacacccugaauaacgccaagaaaacaaaugucacccuuucuaagaaacgcaagagacgguuccugggguuucuccugggagugggcagcgcgauugccuccgggguugcuguguguaagguccuucaccuggaaggagaggugaacaaaaucaagagcgcccuccugucuacgaauaaagcuguugugucccugagcaacggcgucucugugcucacauucaaggugcuggaccuuaaaaauuauauugauaagcaacugcucccgauccugaacaaacaguccugcagcauuucuaacaucgaaaccgucauugaguuucagcagaagaauaaccgccuucuggagaucacaagagaauuuuccguuaaugccggcgugaccacccccgugagcacauacaugcucacgaacuccgagcugcugucucucaucaaugacaugccuauuaccaacgaucaaaagaaacugaugagcaauaacguccagaucgugcggcagcaguccuauagcauuauguguaucauuaaggaagagguucuugcguacgugguccaacugccccucuacggggugaucgacacaccuugcuggaaacugcauaccucuccccuuuguacaaccaauacgaaggaaggauccaacaucugccugacacgcaccgauagaggcugguauugugacaaugccgggagcguuucuuucuucccucaggcugagaccugcaaagugcagagcaaccgggucuuuugugauacaaugaacucccucacccugccgucugaggugaaucugugcaaugucgacauuuucaaccccaaguacgauugcaagaucaugacaagcaaaacggacguguccagcucuguuauuaccucccucggagccaucgugagcuguuauggcaagacaaaaugcaccgcuucuaacaagaaucgcgggauuaucaaaacauuuuccaacggaugugauuacgucagcaauaagggcguggacaccguuuccgugggcaacacgcuguauuacgucaauaagcaagaagggaaaucucuuuaugugaagggagagccuaucauuaacuucuacgacccccugguguucccuagcgaugaauuugacgccuccaucucucagguuaaugagaaaauuaaccagagccucgccuucaucagaaaguccgaugaacugcugcacaaugucaacgcuggcaaaagcaccacaaauauuaugaucaccacaauuaucaucgugauuaucgugauucuucucucucugaucgcggucgggcugcuccuguacugcaaggcccggugaggacuaguacuggcugcaucucccuuuccucuguccuccauccuucucccaggauggugaagggggaccugguacccagugauccccaccccaggauccuaaaucaugacuuaccugcuaauaaaaacucauuggaaaagugagaagaucuaaaaaaaaaaaaaaaaaaaaaaaaaaaaaaaaaaaaaaaaaaaaaaaaaaaaaaaaaaaaaaaaugcaucccccccccccccccccccccccccccccccaaaggcucuuuucagagccaccagaauu

SEQ ID NO: 1482 - RNA, 2031 nt, Artificial Sequence
  mRNA product Design e-6 comprising derived and/or modified sequence from HRSV(A2)__F-del_DSCav1 (opt6)
gggagagcggcucggccauuuugucccagucaguccggaggcugcggcugcagaaguaccgccugcggaguaacugcaaagaagcuuaccauggaacuauuaauauuaaaagcaaaugcuauuaccacaauacuuacugcuguaaccuucugcuuugccucuggccaaaacauaacagaagaauuuuaucaaucaacuugcuccgcuguaagcaaaggcuaccuaucagcauuacgcaccggcugguacacaucaguaauaacaauagaacuauccaacauaaaagaaaauaaaugcaacggaacagacgcaaaaguaaaauuaauaaaacaagaacucgacaaauacaaaaacgcaguaacagaauuacaacuacuaaugcaaaguacuccagccaccaacaacagagcaagaagagaauuaccacgauuuaugaacuacacacuaaacaaugcaaaaaaaacaaacguaacacuaucaaaaaaacguaaacgcagauucuuaggcuuccuccuagguguaggcucagcaaucgccucaggaguggcaguuuguaaaguacuacaccuagaaggagaaguaaacaaaaucaaaucugcccuuuuaucgacaaacaaagcaguaguaucguuauccaauggagucucaguauugacauucaaaguauuagaccuaaaaaauuauauagauaaacaacucuuaccuaucuuaaauaaacaaagcugcucaauaaguaacauagaaaccguaauagaauuucaacaaaaaaacaauagacuccuugagaucacucgagaauuuucaguaaacgcagguguaacaacaccaguaagcacauacaugcuaacaaauagugaacuauuaucucuaauuaacgauaugcccauaaccaacgaucaaaaaaaacucaugaguaacaacguacaaauaguaagacaacaauccuauagcauaaugugcauuauaaaagaagaaguacuagcauauguaguccaacuaccacuauacggcguaauagacacaccaugcuggaaacuacacaccucaccccuaugcacaacaaauacaaaagaaggaucaaacauaugcuuaaccaggacagacagaggcugguacugcgauaacgcaggaucuguuucauucuucccccaagcagaaacaugcaaaguacaaucaaacagaguauuuugugauaccaugaacucacucacauuaccauccgaagucaaccucugcaacguagacauauucaaccccaaauacgacugcaaaauaaugaccucaaaaacagauguaucaucaucaguaaucacaucacuaggagcuaucguaucuuguuauggaaaaacaaaaugcacagcauccaacaaaaacagaggaauuaucaaaacauucucaaauggaugugacuauguaucaaacaaaggaguagacaccguaagcguaggcaauacacuauauuacguaaauaaacaagaaggaaaaucacuauacguaaaaggugaaccaauaauaaacuucuaugacccccuaguauucccaucagaugaauuugacgcaagcauaucacaagucaacgaaaaaauaaaccaaucacuggcauucauucgcaaaucagaugaacuucuccacaacguaaacgcugguaaaagcacuacaaacauaaugauaacaacaaucaucauugucauaauaguuauucuauuaucacuaaucgcaguaggauuacuacuauacuguaaagcgagguaaggacuaguacuggcugcaucucccuuuccucuguccuccauccuucucccaggauggugaagggggaccugguacccagugauccccaccccaggauccuaaaucaugacuuaccugcuaauaaaaacucauuggaaaagugagaagaucuaaaaaaaaaaaaaaaaaaaaaaaaaaaaaaaaaaaaaaaaaaaaaaaaaaaaaaaaaaaaaaaaugcaucccccccccccccccccccccccccccccccaaaggcucuuuucagagccaccagaauu

SEQ ID NO: 1483 - RNA, 2031 nt, Artificial Sequence
  mRNA product Design e-6 comprising derived and/or modified sequence from HRSV(A2)__F-del_DSCav1 (opt11)
gggagagcggcucggccauuuugucccagucaguccggaggcugcggcugcagaaguaccgccugcggaguaacugcaaagaagcuuaccauggagcugcucauccugaaggccaacgccaucaccacaauccugacggcggugaccuucugcuucgccagcggccagaacaucaccgaggaguucuaccaguccacgugcagcgccgucuccaagggguaccucagcgcccugcgaaccggcugguacaccuccgugaucaccaucgagcugucaaacaucaaggagaacaagugcaacgggaccgaugccaagguuaagcucaucaagcaggagcuggacaaguacaagaacgcggucacggagcugcagcuccugaugcaguccacuccggcaaccaacaaccgcgccaggcgcgagcugccccgguucaugaacuacacccucaacaacgccaagaagacgaaugugacccugagcaagaagcgcaagcggcgcuuccugggcuuccuccuaggggugggcuccgccaucgcgagcggcgucgccgugugcaagguguugcaccucgagggggaggucaacaagaucaagagcgcccugcuguccaccaacaaggccgugguaagccucuccaacggcgucagcguucugaccuucaaggugcuggaccucaagaacuauaucgacaagcagcugcugcccauccugaacaagcagagcugcuccaucucaaacaucgaaacggugauugaguuccagcagaagaacaaccggcuccuggaaaucacccgcgaguucagcgugaacgccggggucaccacccccguguccacguacaugcugaccaacagcgagcuccuaucccugaucaacgacaugccgaucaccaacgaccagaagaagcucaugagcaacaacgugcagaucguccggcagcaguccuacagcaucaugugcaucaucaaggaagaggugcuggcguacgugguccagcugccccucuacggcgugaucgacacccccugcuggaagcugcacacgagcccccugugcacaaccaacaccaaggagggguccaacaucugccucacgcgcaccgaccggggcugguacugcgacaacgccggcagcgucuccuucuucccgcaggccgagaccugcaaggugcagagcaaccgcguguucugcgacaccaugaacucccugacgcugcccucugagguaaaccucugcaacgucgacaucuucaaccccaaguacgacugcaagaucaugaccuccaagacagacgugagcuccagcgugaucacaucccugggggccaucgucagcugcuacggcaagacuaaguguacugccagcaacaagaaccgggggaucaucaagaccuucuccaacggcugcgacuacgugagcaacaagggcguggacaccguguccgucgggaacacccuguacuacguuaauaagcaggagggcaagagccucuacgugaaaggggagcccaucauuaacuucuacgacccacugguuuuccccuccgacgaguucgacgcgagcaucucccaggugaacgagaagaucaaccagagccuggccuucauccgcaaguccgacgagcugcuccacaacgugaacgccggcaagagcacgaccaacaucaugaucaccaccaucaucaucgugaucaucgugauucugcugucccucaucgccguggggcugcugcuuuacugcaaggcccggugaggacuaguacuggcugcaucucccuuuccucuguccuccauccuucucccaggauggugaagggggaccugguacccagugauccccaccccaggauccuaaaucaugacuuaccugcuaauaaaaacucauuggaaaagugagaagaucuaaaaaaaaaaaaaaaaaaaaaaaaaaaaaaaaaaaaaaaaaaaaaaaaaaaaaaaaaaaaaaaaugcaucccccccccccccccccccccccccccccccaaaggcucuuuucagagccaccagaauu

SEQ ID NO: 1484 - RNA, 2247 nt, Artificial Sequence
  mRNA product Design f-1 comprising derived and/or modified sequence from HRSV(A2)__F-del_DSCav1 (opt1)
gggagagcggcucggccauuuugucccagucaguccggaggcugcggcugcagaaguaccgccugcggaguaacugcaaagaagcuuaccauggagcugcucauccugaaggccaacgccaucaccaccauccugacggcggugaccuucugcuucgccagcggccagaacaucaccgaggaguucuaccaguccacgugcagcgccgucuccaagggguaccucagcgcccugcggaccggcugguacaccuccgugaucaccaucgagcugagcaacaucaaggagaacaagugcaacgggaccgacgccaaggugaagcucaucaagcaggagcuggacaaguacaagaacgcggucacggagcugcagcuccugaugcaguccaccccggcaaccaacaaccgcgcccggcgcgagcugccccgguucaugaacuacacccucaacaacgccaagaagacgaacgugacccugagcaagaagcgcaagcggcgcuuccugggcuuccuccugggggugggcuccgccaucgcgagcggcgucgccgugugcaaggugcugcaccucgagggggaggucaacaagaucaagagcgcccugcuguccaccaacaaggccguggugagccucuccaacggcgucagcgugcugaccuucaaggugcuggaccucaagaacuacaucgacaagcagcugcugcccauccugaacaagcagagcugcuccaucagcaacaucgagacggugaucgaguuccagcagaagaacaaccggcuccuggagaucacccgcgaguucagcgugaacgccggggucaccacccccguguccacguacaugcugaccaacagcgagcuccugucccugaucaacgacaugccgaucaccaacgaccagaagaagcucaugagcaacaacgugcagaucguccggcagcaguccuacagcaucaugugcaucaucaaggaggaggugcuggcguacgugguccagcugccccucuacggcgugaucgacacccccugcuggaagcugcacacgagcccccugugcaccaccaacaccaaggagggguccaacaucugccucacgcgcaccgaccggggcugguacugcgacaacgccggcagcgucuccuucuucccgcaggccgagaccugcaaggugcagagcaaccgcguguucugcgacaccaugaacucccugacgcugcccagcgagguaaaccucugcaacgucgacaucuucaaccccaaguacgacugcaagaucaugaccuccaagaccgacgugagcuccagcgugaucaccucccugggggccaucgucagcugcuacggcaagacgaagugcaccgccagcaacaagaaccgggggaucaucaagaccuucuccaacggcugcgacuacgugagcaacaagggcguggacaccguguccgucgggaacacccuguacuacgugaacaagcaggagggcaagagccucuacgugaagggggagcccaucaucaacuucuacgacccgcuggucuuccccuccgacgaguucgacgcgagcaucucccaggugaacgagaagaucaaccagagccuggccuucauccgcaaguccgacgagcugcuccacaacgugaacgccggcaagagcacgaccaacaucaugaucaccaccaucaucaucgucaucaucgugauccugcugucccucaucgccguggggcugcugcucuacugcaaggcccggugaggacuagugaagggaacacccaaauuuaauucagccuuaagcacaauuaauuaagagugaaacguaauuguacaagcaguuggucacccaccauagggcaugaucaacaccgcaaccuuuccuuuuucccccagugauucugaaaaaccccucuucccuucagcuugcuuagauguuccaaauuuaguaagcuuaaggcggccuacagaagaaaaagaaaaaaaaggccacaaaaguucccucucacuuucaguaaauaaaauaaaagcagcaacagaaauaaagaaauaaaugaaauucaaaaugaaauaaauauuguguugugcagcauuaaaaaaucaauaaaaauuaaaaaugagcaagaucuaaaaaaaaaaaaaaaaaaaaaaaaaaaaaaaaaaaaaaaaaaaaaaaaaaaaaaaaaaaaaaaaugcaucccccccccccccccccccccccccccccccaaaggcucuuuucagagccaccagaauu

SEQ ID NO: 1485 - RNA, 2247 nt, Artificial Sequence
  mRNA product Design f-1 comprising derived and/or modified sequence from HRSV(A2)__F-del_DSCav1 (opt1)
gggagagcggcucggccauuuugucccagucaguccggaggcugcggcugcagaaguaccgccugcggaguaacugcaaagaagcuuaccauggagcugcucauccugaaggccaacgccaucaccaccauccugacggcggugaccuucugcuucgccagcggccagaacaucaccgaggaguucuaccaguccacgugcagcgccgucuccaagggguaccucagcgcccugcgcaccggcugguacaccuccgugaucaccaucgagcugagcaacaucaaggagaacaagugcaacgggaccgacgccaaggugaagcucaucaagcaggagcuggacaaguacaagaacgcggucacggagcugcagcuccugaugcaguccacccccgccaccaacaaccgggcccgccgggagcugccgcgcuucaugaacuacacccucaacaacgccaagaagacgaacgugacccugagcaagaagcggaagcgccgguuccugggcuuccuccugggggugggcuccgcgaucgccagcggcgucgccgugugcaaggugcugcaccucgagggggaggucaacaagaucaaguccgcccugcugagcaccaacaaggccguggugucccucagcaacggcgucuccgugcugaccuucaaggugcuggaccucaagaacuacaucgacaagcagcugcugcccauccucaacaagcagagcugcuccaucagcaacaucgagacggucaucgaguuccagcagaagaacaaccgccugcuggagaucacccgggaguucuccgugaacgcgggggugaccacccccgucagcacguacaugcucaccaacagcgagcugcugucccucaucaacgacaugcccaucaccaacgaccagaagaagcugaugagcaacaacgugcagaucgugcgccagcaguccuacagcaucaugugcaucaucaaggaggagguccuggccuacguggugcagcucccgcuguacggcgucaucgacacccccugcuggaagcugcacacgagcccccucugcaccaccaacaccaaggaggggagcaacaucugccugacgcggaccgaccgcggcugguacugcgacaacgccggcuccgugagcuucuucccccaggccgagaccugcaagguccaguccaaccggguguucugcgacaccaugaacagccugacgcucccguccgaggugaaccugugcaacgucgacaucuucaaccccaaguacgacugcaagaucaugaccagcaagaccgacguguccagcuccgugaucaccagccugggggccaucgucuccugcuacggcaagacgaagugcaccgcgagcaacaagaaccgcgggaucaucaagaccuucuccaacggcugcgacuacgugagcaacaagggcguggacaccgucagcguggggaacacccucuacuacgugaacaagcaggagggcaagucccuguacgucaagggggagcccaucaucaacuucuacgacccccugguguucccgagcgacgaguucgacgccuccaucagccaggugaacgagaagaucaaccagucccucgccuucauccggaaguccgacgagcugcugcacaacgucaacgccggcaaguccacgaccaacaucaugaucaccaccaucaucaucgugaucaucgugauccugcucagccugaucgccgucgggcugcuccuguacugcaaggcgcgcugaggacuagugaagggaacacccaaauuuaauucagccuuaagcacaauuaauuaagagugaaacguaauuguacaagcaguuggucacccaccauagggcaugaucaacaccgcaaccuuuccuuuuucccccagugauucugaaaaaccccucuucccuucagcuugcuuagauguuccaaauuuaguaagcuuaaggcggccuacagaagaaaaagaaaaaaaaggccacaaaaguucccucucacuuucaguaaauaaaauaaaagcagcaacagaaauaaagaaauaaaugaaauucaaaaugaaauaaauauuguguugugcagcauuaaaaaaucaauaaaaauuaaaaaugagcaagaucuaaaaaaaaaaaaaaaaaaaaaaaaaaaaaaaaaaaaaaaaaaaaaaaaaaaaaaaaaaaaaaaaugcaucccccccccccccccccccccccccccccccaaaggcucuuuucagagccaccagaauu

SEQ ID NO: 1486 - RNA, 2247 nt, Artificial Sequence
  mRNA product Design f-1 comprising derived and/or modified sequence from HRSV(A2)__F-del_DSCav1 (opt2)
gggagagcggcucggccauuuugucccagucaguccggaggcugcggcugcagaaguaccgccugcggaguaacugcaaagaagcuuaccauggagcuccucauccucaaggccaacgccaucaccaccauccucaccgccgucaccuucugcuucgccuccggccagaacaucaccgaggaguucuaccaguccaccugcuccgccgucuccaagggcuaccucuccgcccuccgcaccggcugguacaccuccgucaucaccaucgagcucuccaacaucaaggagaacaagugcaacggcaccgacgccaaggucaagcucaucaagcaggagcucgacaaguacaagaacgccgucaccgagcuccagcuccucaugcaguccacccccgccaccaacaaccgcgcccgccgcgagcucccccgcuucaugaacuacacccucaacaacgccaagaagaccaacgucacccucuccaagaagcgcaagcgccgcuuccucggcuuccuccucggcgucggcuccgccaucgccuccggcgucgccgucugcaagguccuccaccucgagggcgaggucaacaagaucaaguccgcccuccucuccaccaacaaggccgucgucucccucuccaacggcgucuccguccucaccuucaagguccucgaccucaagaacuacaucgacaagcagcuccuccccauccucaacaagcaguccugcuccaucuccaacaucgagaccgucaucgaguuccagcagaagaacaaccgccuccucgagaucacccgcgaguucuccgucaacgccggcgucaccacccccgucuccaccuacaugcucaccaacuccgagcuccucucccucaucaacgacaugcccaucaccaacgaccagaagaagcucauguccaacaacguccagaucguccgccagcaguccuacuccaucaugugcaucaucaaggaggagguccucgccuacgucguccagcucccccucuacggcgucaucgacacccccugcuggaagcuccacaccuccccccucugcaccaccaacaccaaggagggcuccaacaucugccucacccgcaccgaccgcggcugguacugcgacaacgccggcuccgucuccuucuucccccaggccgagaccugcaagguccaguccaaccgcgucuucugcgacaccaugaacucccucacccuccccuccgaggucaaccucugcaacgucgacaucuucaaccccaaguacgacugcaagaucaugaccuccaagaccgacgucuccuccuccgucaucaccucccucggcgccaucgucuccugcuacggcaagaccaagugcaccgccuccaacaagaaccgcggcaucaucaagaccuucuccaacggcugcgacuacgucuccaacaagggcgucgacaccgucuccgucggcaacacccucuacuacgucaacaagcaggagggcaagucccucuacgucaagggcgagcccaucaucaacuucuacgacccccucgucuuccccuccgacgaguucgacgccuccaucucccaggucaacgagaagaucaaccagucccucgccuucauccgcaaguccgacgagcuccuccacaacgucaacgccggcaaguccaccaccaacaucaugaucaccaccaucaucaucgucaucaucgucauccuccucucccucaucgccgucggccuccuccucuacugcaaggcccgcugaggacuagugaagggaacacccaaauuuaauucagccuuaagcacaauuaauuaagagugaaacguaauuguacaagcaguuggucacccaccauagggcaugaucaacaccgcaaccuuuccuuuuucccccagugauucugaaaaaccccucuucccuucagcuugcuuagauguuccaaauuuaguaagcuuaaggcggccuacagaagaaaaagaaaaaaaaggccacaaaaguucccucucacuuucaguaaauaaaauaaaagcagcaacagaaauaaagaaauaaaugaaauucaaaaugaaauaaauauuguguugugcagcauuaaaaaaucaauaaaaauuaaaaaugagcaagaucuaaaaaaaaaaaaaaaaaaaaaaaaaaaaaaaaaaaaaaaaaaaaaaaaaaaaaaaaaaaaaaaaugcaucccccccccccccccccccccccccccccccaaaggcucuuuucagagccaccagaauu

SEQ ID NO: 1487 - RNA, 2247 nt, Artificial Sequence
  mRNA product Design f-1 comprising derived and/or modified sequence from HRSV(A2)__F-del_DSCav1 (opt3)
gggagagcggcucggccauuuugucccagucaguccggaggcugcggcugcagaaguaccgccugcggaguaacugcaaagaagcuuaccauggagcugcucauccuuaaggccaacgcuauuaccacaauacugacugcagugacguucugcuuugccagcggccagaauaucaccgaagaguucuaccaauccacauguucugcggucucaaaaggguauuugagugcuuuaagaacuggaugguacaccagcguuauuacaaucgaacuguccaacauuaaggagaauaaaugcaacgguaccgacgccaaggugaaacuaaucaagcaggaacucgauaaguauaaaaaugcaguaacugagcugcagcuucugaugcagucuacacccgccaccaacaauagggcucggcgcgaguugccucgauuuaugaacuacacgcucaauaacgcaaagaaaacuaaugugacccugucgaagaaacguaagagaagguuccugggcuuucucuuaggggucggaucagccauagcuagcggcguggccguuuguaaggugcugcaccuugaaggugaggucaacaaaaucaagagugcguugcuguccacaaauaaagcagugguaucucuaagcaacgggguuuccgugcucacuuucaagguccuggaccuuaaaaauuauauugauaagcaacuguugccaauccucaacaaacagucaugcaguauuagcaacaucgaaaccgugauagaguuucagcagaagaauaaccggcuguuagagauuacacgcgaguucucugugaaugccggagucaccacgccgguuuccacuuacaugcugacaaacucagaacuccuuagccugaucaaugacaugcccauuaccaacgaucaaaagaaauugaugaguaauaacgugcagaucguaagacagcagucuuauuccaucauguguauuauaaaggaagaggugcuagcuuacgucgugcaacugccucucuacggcguuaucgacacuccaugcuggaaacugcauacaagcccccuuuguaccacgaauaccaaggaaggcucgaacauuugccugacaaggacugaucgggggugguauugugacaaugccggaucuguguccuuuuucccucaggcagagaccugcaaaguccagucaaaccgcguguuuugugauacaaugaauaguuugacucucccaagcgagguaaaccugugcaauguugacaucuucaaccccaaguacgauugcaagauaaugaccuccaaaacagacgugucuagcucagucauuaccaguuuaggugcuaucguguccuguuauggcaagacuaaaugcacggccagcaacaagaaucgagggaucauuaaaacauuuucuaacggaugugauuacgucucaaauaagggcguggacaccguuaguguggguaacacucuguauuacguaaauaagcaagaagggaaaagccuauaugucaagggagagccuaucauuaacuucuacgacccacucguguucccguccgaugaauuugacgcgucuauaucgcagguuaaugagaaaaucaaccagagccuggccuucauuagaaaguccgaugaacuuuugcacaaugugaacgcaggcaaaucaaccacaaauaucaugaucaccacuauuauaaucgucauuaucgugauucugcucagucugaucgcuguaggccuucuguuguacugcaaggccaggugaggacuagugaagggaacacccaaauuuaauucagccuuaagcacaauuaauuaagagugaaacguaauuguacaagcaguuggucacccaccauagggcaugaucaacaccgcaaccuuuccuuuuucccccagugauucugaaaaaccccucuucccuucagcuugcuuagauguuccaaauuuaguaagcuuaaggcggccuacagaagaaaaagaaaaaaaaggccacaaaaguucccucucacuuucaguaaauaaaauaaaagcagcaacagaaauaaagaaauaaaugaaauucaaaaugaaauaaauauuguguugugcagcauuaaaaaaucaauaaaaauuaaaaaugagcaagaucuaaaaaaaaaaaaaaaaaaaaaaaaaaaaaaaaaaaaaaaaaaaaaaaaaaaaaaaaaaaaaaaaugcaucccccccccccccccccccccccccccccccaaaggcucuuuucagagccaccagaauu

SEQ ID NO: 1488 - RNA, 2247 nt, Artificial Sequence
  mRNA product Design f-1 comprising derived and/or modified sequence from HRSV(A2)__F-del_DSCav1 (opt4)
gggagagcggcucggccauuuugucccagucaguccggaggcugcggcugcagaaguaccgccugcggaguaacugcaaagaagcuuaccauggagcugcugauccugaaggccaacgccaucaccaccauccugaccgccgugaccuucugcuucgccagcggccagaacaucaccgaggaguucuaccagagcaccugcagcgccgugagcaagggcuaccugagcgcccugagaaccggcugguacaccagcgugaucaccaucgagcugagcaacaucaaggagaacaagugcaacggcaccgacgccaaggugaagcugaucaagcaggagcuggacaaguacaagaacgccgugaccgagcugcagcugcugaugcagagcacccccgccaccaacaacagagccagaagagagcugcccagauucaugaacuacacccugaacaacgccaagaagaccaacgugacccugagcaagaagagaaagagaagauuccugggcuuccugcugggcgugggcagcgccaucgccagcggcguggccgugugcaaggugcugcaccuggagggcgaggugaacaagaucaagagcgcccugcugagcaccaacaaggccguggugagccugagcaacggcgugagcgugcugaccuucaaggugcuggaccugaagaacuacaucgacaagcagcugcugcccauccugaacaagcagagcugcagcaucagcaacaucgagaccgugaucgaguuccagcagaagaacaacagacugcuggagaucaccagagaguucagcgugaacgccggcgugaccacccccgugagcaccuacaugcugaccaacagcgagcugcugagccugaucaacgacaugcccaucaccaacgaccagaagaagcugaugagcaacaacgugcagaucgugagacagcagagcuacagcaucaugugcaucaucaaggaggaggugcuggccuacguggugcagcugccccuguacggcgugaucgacacccccugcuggaagcugcacaccagcccccugugcaccaccaacaccaaggagggcagcaacaucugccugaccagaaccgacagaggcugguacugcgacaacgccggcagcgugagcuucuucccccaggccgagaccugcaaggugcagagcaacagaguguucugcgacaccaugaacagccugacccugcccagcgaggugaaccugugcaacguggacaucuucaaccccaaguacgacugcaagaucaugaccagcaagaccgacgugagcagcagcgugaucaccagccugggcgccaucgugagcugcuacggcaagaccaagugcaccgccagcaacaagaacagaggcaucaucaagaccuucagcaacggcugcgacuacgugagcaacaagggcguggacaccgugagcgugggcaacacccuguacuacgugaacaagcaggagggcaagagccuguacgugaagggcgagcccaucaucaacuucuacgacccccugguguuccccagcgacgaguucgacgccagcaucagccaggugaacgagaagaucaaccagagccuggccuucaucagaaagagcgacgagcugcugcacaacgugaacgccggcaagagcaccaccaacaucaugaucaccaccaucaucaucgugaucaucgugauccugcugagccugaucgccgugggccugcugcuguacugcaaggccagaugaggacuagugaagggaacacccaaauuuaauucagccuuaagcacaauuaauuaagagugaaacguaauuguacaagcaguuggucacccaccauagggcaugaucaacaccgcaaccuuuccuuuuucccccagugauucugaaaaaccccucuucccuucagcuugcuuagauguuccaaauuuaguaagcuuaaggcggccuacagaagaaaaagaaaaaaaaggccacaaaaguucccucucacuuucaguaaauaaaauaaaagcagcaacagaaauaaagaaauaaaugaaauucaaaaugaaauaaauauuguguugugcagcauuaaaaaaucaauaaaaauuaaaaaugagcaagaucuaaaaaaaaaaaaaaaaaaaaaaaaaaaaaaaaaaaaaaaaaaaaaaaaaaaaaaaaaaaaaaaaugcaucccccccccccccccccccccccccccccccaaaggcucuuuucagagccaccagaauu

SEQ ID NO: 1489 - RNA, 2247 nt, Artificial Sequence
  mRNA product Design f-1 comprising derived and/or modified sequence from HRSV(A2)__F-del_DSCav1 (opt5)
gggagagcggcucggccauuuugucccagucaguccggaggcugcggcugcagaaguaccgccugcggaguaacugcaaagaagcuuaccauggagcugcucauccugaaggccaacgcuauuaccacaauccuuacggccgugaccuucugcuuugcgagcggccagaauauuacagaagaguucuaccaauccaccuguucugcugucagcaaaggguaucuguccgcccucagaacaggaugguacaccucuguuaucacaauugaacugagcaacaucaaggagaauaaaugcaacggcaccgacgccaaggugaaacuuaucaagcaggaacuggauaaguauaaaaaugcugugacggagcuccagcugcugaugcaguccacccccgccacaaacaaucgggcucgcagagagcucccucgguuuaugaacuacacccugaauaacgccaagaaaacaaaugucacccuuucuaagaaacgcaagagacgguuccugggguuucuccugggagugggcagcgcgauugccuccgggguugcuguguguaagguccuucaccuggaaggagaggugaacaaaaucaagagcgcccuccugucuacgaauaaagcuguugugucccugagcaacggcgucucugugcucacauucaaggugcuggaccuuaaaaauuauauugauaagcaacugcucccgauccugaacaaacaguccugcagcauuucuaacaucgaaaccgucauugaguuucagcagaagaauaaccgccuucuggagaucacaagagaauuuuccguuaaugccggcgugaccacccccgugagcacauacaugcucacgaacuccgagcugcugucucucaucaaugacaugccuauuaccaacgaucaaaagaaacugaugagcaauaacguccagaucgugcggcagcaguccuauagcauuauguguaucauuaaggaagagguucuugcguacgugguccaacugccccucuacggggugaucgacacaccuugcuggaaacugcauaccucuccccuuuguacaaccaauacgaaggaaggauccaacaucugccugacacgcaccgauagaggcugguauugugacaaugccgggagcguuucuuucuucccucaggcugagaccugcaaagugcagagcaaccgggucuuuugugauacaaugaacucccucacccugccgucugaggugaaucugugcaaugucgacauuuucaaccccaaguacgauugcaagaucaugacaagcaaaacggacguguccagcucuguuauuaccucccucggagccaucgugagcuguuauggcaagacaaaaugcaccgcuucuaacaagaaucgcgggauuaucaaaacauuuuccaacggaugugauuacgucagcaauaagggcguggacaccguuuccgugggcaacacgcuguauuacgucaauaagcaagaagggaaaucucuuuaugugaagggagagccuaucauuaacuucuacgacccccugguguucccuagcgaugaauuugacgccuccaucucucagguuaaugagaaaauuaaccagagccucgccuucaucagaaaguccgaugaacugcugcacaaugucaacgcuggcaaaagcaccacaaauauuaugaucaccacaauuaucaucgugauuaucgugauucuucucucucugaucgcggucgggcugcuccuguacugcaaggcccggugaggacuagugaagggaacacccaaauuuaauucagccuuaagcacaauuaauuaagagugaaacguaauuguacaagcaguuggucacccaccauagggcaugaucaacaccgcaaccuuuccuuuuucccccagugauucugaaaaaccccucuucccuucagcuugcuuagauguuccaaauuuaguaagcuuaaggcggccuacagaagaaaaagaaaaaaaaggccacaaaaguucccucucacuuucaguaaauaaaauaaaagcagcaacagaaauaaagaaauaaaugaaauucaaaaugaaauaaauauuguguugugcagcauuaaaaaaucaauaaaaauuaaaaaugagcaagaucuaaaaaaaaaaaaaaaaaaaaaaaaaaaaaaaaaaaaaaaaaaaaaaaaaaaaaaaaaaaaaaaaugcaucccccccccccccccccccccccccccccccaaaggcucuuuucagagccaccagaauu

SEQ ID NO: 1490 - RNA, 2247 nt, Artificial Sequence
  mRNA product Design f-1 comprising derived and/or modified sequence from HRSV(A2)__F-del_DSCav1 (opt6)
gggagagcggcucggccauuuugucccagucaguccggaggcugcggcugcagaaguaccgccugcggaguaacugcaaagaagcuuaccauggaacuauuaauauuaaaagcaaaugcuauuaccacaauacuuacugcuguaaccuucugcuuugccucuggccaaaacauaacagaagaauuuuaucaaucaacuugcuccgcuguaagcaaaggcuaccuaucagcauuacgcaccggcugguacacaucaguaauaacaauagaacuauccaacauaaaagaaaauaaaugcaacggaacagacgcaaaaguaaaauuaauaaaacaagaacucgacaaauacaaaaacgcaguaacagaauuacaacuacuaaugcaaaguacuccagccaccaacaacagagcaagaagagaauuaccacgauuuaugaacuacacacuaaacaaugcaaaaaaaacaaacguaacacuaucaaaaaaacguaaacgcagauucuuaggcuuccuccuagguguaggcucagcaaucgccucaggaguggcaguuuguaaaguacuacaccuagaaggagaaguaaacaaaaucaaaucugcccuuuuaucgacaaacaaagcaguaguaucguuauccaauggagucucaguauugacauucaaaguauuagaccuaaaaaauuauauagauaaacaacucuuaccuaucuuaaauaaacaaagcugcucaauaaguaacauagaaaccguaauagaauuucaacaaaaaaacaauagacuccuugagaucacucgagaauuuucaguaaacgcagguguaacaacaccaguaagcacauacaugcuaacaaauagugaacuauuaucucuaauuaacgauaugcccauaaccaacgaucaaaaaaaacucaugaguaacaacguacaaauaguaagacaacaauccuauagcauaaugugcauuauaaaagaagaaguacuagcauauguaguccaacuaccacuauacggcguaauagacacaccaugcuggaaacuacacaccucaccccuaugcacaacaaauacaaaagaaggaucaaacauaugcuuaaccaggacagacagaggcugguacugcgauaacgcaggaucuguuucauucuucccccaagcagaaacaugcaaaguacaaucaaacagaguauuuugugauaccaugaacucacucacauuaccauccgaagucaaccucugcaacguagacauauucaaccccaaauacgacugcaaaauaaugaccucaaaaacagauguaucaucaucaguaaucacaucacuaggagcuaucguaucuuguuauggaaaaacaaaaugcacagcauccaacaaaaacagaggaauuaucaaaacauucucaaauggaugugacuauguaucaaacaaaggaguagacaccguaagcguaggcaauacacuauauuacguaaauaaacaagaaggaaaaucacuauacguaaaaggugaaccaauaauaaacuucuaugacccccuaguauucccaucagaugaauuugacgcaagcauaucacaagucaacgaaaaaauaaaccaaucacuggcauucauucgcaaaucagaugaacuucuccacaacguaaacgcugguaaaagcacuacaaacauaaugauaacaacaaucaucauugucauaauaguuauucuauuaucacuaaucgcaguaggauuacuacuauacuguaaagcgagguaaggacuagugaagggaacacccaaauuuaauucagccuuaagcacaauuaauuaagagugaaacguaauuguacaagcaguuggucacccaccauagggcaugaucaacaccgcaaccuuuccuuuuucccccagugauucugaaaaaccccucuucccuucagcuugcuuagauguuccaaauuuaguaagcuuaaggcggccuacagaagaaaaagaaaaaaaaggccacaaaaguucccucucacuuucaguaaauaaaauaaaagcagcaacagaaauaaagaaauaaaugaaauucaaaaugaaauaaauauuguguugugcagcauuaaaaaaucaauaaaaauuaaaaaugagcaagaucuaaaaaaaaaaaaaaaaaaaaaaaaaaaaaaaaaaaaaaaaaaaaaaaaaaaaaaaaaaaaaaaaugcaucccccccccccccccccccccccccccccccaaaggcucuuuucagagccaccagaauu

SEQ ID NO: 1491 - RNA, 2247 nt, Artificial Sequence
  mRNA product Design f-1 comprising derived and/or modified sequence from HRSV(A2)__F-del_DSCav1 (opt11)
gggagagcggcucggccauuuugucccagucaguccggaggcugcggcugcagaaguaccgccugcggaguaacugcaaagaagcuuaccauggagcugcucauccugaaggccaacgccaucaccacaauccugacggcggugaccuucugcuucgccagcggccagaacaucaccgaggaguucuaccaguccacgugcagcgccgucuccaagggguaccucagcgcccugcgaaccggcugguacaccuccgugaucaccaucgagcugucaaacaucaaggagaacaagugcaacgggaccgaugccaagguuaagcucaucaagcaggagcuggacaaguacaagaacgcggucacggagcugcagcuccugaugcaguccacuccggcaaccaacaaccgcgccaggcgcgagcugccccgguucaugaacuacacccucaacaacgccaagaagacgaaugugacccugagcaagaagcgcaagcggcgcuuccugggcuuccuccuaggggugggcuccgccaucgcgagcggcgucgccgugugcaagguguugcaccucgagggggaggucaacaagaucaagagcgcccugcuguccaccaacaaggccgugguaagccucuccaacggcgucagcguucugaccuucaaggugcuggaccucaagaacuauaucgacaagcagcugcugcccauccugaacaagcagagcugcuccaucucaaacaucgaaacggugauugaguuccagcagaagaacaaccggcuccuggaaaucacccgcgaguucagcgugaacgccggggucaccacccccguguccacguacaugcugaccaacagcgagcuccuaucccugaucaacgacaugccgaucaccaacgaccagaagaagcucaugagcaacaacgugcagaucguccggcagcaguccuacagcaucaugugcaucaucaaggaagaggugcuggcguacgugguccagcugccccucuacggcgugaucgacacccccugcuggaagcugcacacgagcccccugugcacaaccaacaccaaggagggguccaacaucugccucacgcgcaccgaccggggcugguacugcgacaacgccggcagcgucuccuucuucccgcaggccgagaccugcaaggugcagagcaaccgcguguucugcgacaccaugaacucccugacgcugcccucugagguaaaccucugcaacgucgacaucuucaaccccaaguacgacugcaagaucaugaccuccaagacagacgugagcuccagcgugaucacaucccugggggccaucgucagcugcuacggcaagacuaaguguacugccagcaacaagaaccgggggaucaucaagaccuucuccaacggcugcgacuacgugagcaacaagggcguggacaccguguccgucgggaacacccuguacuacguuaauaagcaggagggcaagagccucuacgugaaaggggagcccaucauuaacuucuacgacccacugguuuuccccuccgacgaguucgacgcgagcaucucccaggugaacgagaagaucaaccagagccuggccuucauccgcaaguccgacgagcugcuccacaacgugaacgccggcaagagcacgaccaacaucaugaucaccaccaucaucaucgugaucaucgugauucugcugucccucaucgccguggggcugcugcuuuacugcaaggcccggugaggacuagugaagggaacacccaaauuuaauucagccuuaagcacaauuaauuaagagugaaacguaauuguacaagcaguuggucacccaccauagggcaugaucaacaccgcaaccuuuccuuuuucccccagugauucugaaaaaccccucuucccuucagcuugcuuagauguuccaaauuuaguaagcuuaaggcggccuacagaagaaaaagaaaaaaaaggccacaaaaguucccucucacuuucaguaaauaaaauaaaagcagcaacagaaauaaagaaauaaaugaaauucaaaaugaaauaaauauuguguugugcagcauuaaaaaaucaauaaaaauuaaaaaugagcaagaucuaaaaaaaaaaaaaaaaaaaaaaaaaaaaaaaaaaaaaaaaaaaaaaaaaaaaaaaaaaaaaaaaugcaucccccccccccccccccccccccccccccccaaaggcucuuuucagagccaccagaauu

SEQ ID NO: 1492 - RNA, 2027 nt, Artificial Sequence
  mRNA product Design f-2 comprising derived and/or modified sequence from HRSV(A2)__F-del_DSCav1 (opt1)
gggagagcggcucggccauuuugucccagucaguccggaggcugcggcugcagaaguaccgccugcggaguaacugcaaagaagcuuaccauggagcugcucauccugaaggccaacgccaucaccaccauccugacggcggugaccuucugcuucgccagcggccagaacaucaccgaggaguucuaccaguccacgugcagcgccgucuccaagggguaccucagcgcccugcggaccggcugguacaccuccgugaucaccaucgagcugagcaacaucaaggagaacaagugcaacgggaccgacgccaaggugaagcucaucaagcaggagcuggacaaguacaagaacgcggucacggagcugcagcuccugaugcaguccaccccggcaaccaacaaccgcgcccggcgcgagcugccccgguucaugaacuacacccucaacaacgccaagaagacgaacgugacccugagcaagaagcgcaagcggcgcuuccugggcuuccuccugggggugggcuccgccaucgcgagcggcgucgccgugugcaaggugcugcaccucgagggggaggucaacaagaucaagagcgcccugcuguccaccaacaaggccguggugagccucuccaacggcgucagcgugcugaccuucaaggugcuggaccucaagaacuacaucgacaagcagcugcugcccauccugaacaagcagagcugcuccaucagcaacaucgagacggugaucgaguuccagcagaagaacaaccggcuccuggagaucacccgcgaguucagcgugaacgccggggucaccacccccguguccacguacaugcugaccaacagcgagcuccugucccugaucaacgacaugccgaucaccaacgaccagaagaagcucaugagcaacaacgugcagaucguccggcagcaguccuacagcaucaugugcaucaucaaggaggaggugcuggcguacgugguccagcugccccucuacggcgugaucgacacccccugcuggaagcugcacacgagcccccugugcaccaccaacaccaaggagggguccaacaucugccucacgcgcaccgaccggggcugguacugcgacaacgccggcagcgucuccuucuucccgcaggccgagaccugcaaggugcagagcaaccgcguguucugcgacaccaugaacucccugacgcugcccagcgagguaaaccucugcaacgucgacaucuucaaccccaaguacgacugcaagaucaugaccuccaagaccgacgugagcuccagcgugaucaccucccugggggccaucgucagcugcuacggcaagacgaagugcaccgccagcaacaagaaccgggggaucaucaagaccuucuccaacggcugcgacuacgugagcaacaagggcguggacaccguguccgucgggaacacccuguacuacgugaacaagcaggagggcaagagccucuacgugaagggggagcccaucaucaacuucuacgacccgcuggucuuccccuccgacgaguucgacgcgagcaucucccaggugaacgagaagaucaaccagagccuggccuucauccgcaaguccgacgagcugcuccacaacgugaacgccggcaagagcacgaccaacaucaugaucaccaccaucaucaucgucaucaucgugauccugcugucccucaucgccguggggcugcugcucuacugcaaggcccggugaggacuaguggaagcauuuuccuggcugauuaaaagaaauuacucagcuauggucaucuguuccuguuagaaggcuaugcagcauauuauauacuaugcgcauguuaugaaaugcauaauaaaaaauuuuaaaaaaucuaaaagaucuaaaaaaaaaaaaaaaaaaaaaaaaaaaaaaaaaaaaaaaaaaaaaaaaaaaaaaaaaaaaaaaaugcaucccccccccccccccccccccccccccccccaaaggcucuuuucagagccaccagaauu

SEQ ID NO: 1493 - RNA, 2027 nt, Artificial Sequence
  mRNA product Design f-2 comprising derived and/or modified sequence from HRSV(A2)__F-del_DSCav1 (opt1)
gggagagcggcucggccauuuugucccagucaguccggaggcugcggcugcagaaguaccgccugcggaguaacugcaaagaagcuuaccauggagcugcucauccugaaggccaacgccaucaccaccauccugacggcggugaccuucugcuucgccagcggccagaacaucaccgaggaguucuaccaguccacgugcagcgccgucuccaagggguaccucagcgcccugcgcaccggcugguacaccuccgugaucaccaucgagcugagcaacaucaaggagaacaagugcaacgggaccgacgccaaggugaagcucaucaagcaggagcuggacaaguacaagaacgcggucacggagcugcagcuccugaugcaguccacccccgccaccaacaaccgggcccgccgggagcugccgcgcuucaugaacuacacccucaacaacgccaagaagacgaacgugacccugagcaagaagcggaagcgccgguuccugggcuuccuccugggggugggcuccgcgaucgccagcggcgucgccgugugcaaggugcugcaccucgagggggaggucaacaagaucaaguccgcccugcugagcaccaacaaggccguggugucccucagcaacggcgucuccgugcugaccuucaaggugcuggaccucaagaacuacaucgacaagcagcugcugcccauccucaacaagcagagcugcuccaucagcaacaucgagacggucaucgaguuccagcagaagaacaaccgccugcuggagaucacccgggaguucuccgugaacgcgggggugaccacccccgucagcacguacaugcucaccaacagcgagcugcugucccucaucaacgacaugcccaucaccaacgaccagaagaagcugaugagcaacaacgugcagaucgugcgccagcaguccuacagcaucaugugcaucaucaaggaggagguccuggccuacguggugcagcucccgcuguacggcgucaucgacacccccugcuggaagcugcacacgagcccccucugcaccaccaacaccaaggaggggagcaacaucugccugacgcggaccgaccgcggcugguacugcgacaacgccggcuccgugagcuucuucccccaggccgagaccugcaagguccaguccaaccggguguucugcgacaccaugaacagccugacgcucccguccgaggugaaccugugcaacgucgacaucuucaaccccaaguacgacugcaagaucaugaccagcaagaccgacguguccagcuccgugaucaccagccugggggccaucgucuccugcuacggcaagacgaagugcaccgcgagcaacaagaaccgcgggaucaucaagaccuucuccaacggcugcgacuacgugagcaacaagggcguggacaccgucagcguggggaacacccucuacuacgugaacaagcaggagggcaagucccuguacgucaagggggagcccaucaucaacuucuacgacccccugguguucccgagcgacgaguucgacgccuccaucagccaggugaacgagaagaucaaccagucccucgccuucauccggaaguccgacgagcugcugcacaacgucaacgccggcaaguccacgaccaacaucaugaucaccaccaucaucaucgugaucaucgugauccugcucagccugaucgccgucgggcugcuccuguacugcaaggcgcgcugaggacuaguggaagcauuuuccuggcugauuaaaagaaauuacucagcuauggucaucuguuccuguuagaaggcuaugcagcauauuauauacuaugcgcauguuaugaaaugcauaauaaaaaauuuuaaaaaaucuaaaagaucuaaaaaaaaaaaaaaaaaaaaaaaaaaaaaaaaaaaaaaaaaaaaaaaaaaaaaaaaaaaaaaaaugcaucccccccccccccccccccccccccccccccaaaggcucuuuucagagccaccagaauu

SEQ ID NO: 1494 - RNA, 2027 nt, Artificial Sequence
  mRNA product Design f-2 comprising derived and/or modified sequence from HRSV(A2)__F-del_DSCav1 (opt2)
gggagagcggcucggccauuuugucccagucaguccggaggcugcggcugcagaaguaccgccugcggaguaacugcaaagaagcuuaccauggagcuccucauccucaaggccaacgccaucaccaccauccucaccgccgucaccuucugcuucgccuccggccagaacaucaccgaggaguucuaccaguccaccugcuccgccgucuccaagggcuaccucuccgcccuccgcaccggcugguacaccuccgucaucaccaucgagcucuccaacaucaaggagaacaagugcaacggcaccgacgccaaggucaagcucaucaagcaggagcucgacaaguacaagaacgccgucaccgagcuccagcuccucaugcaguccacccccgccaccaacaaccgcgcccgccgcgagcucccccgcuucaugaacuacacccucaacaacgccaagaagaccaacgucacccucuccaagaagcgcaagcgccgcuuccucggcuuccuccucggcgucggcuccgccaucgccuccggcgucgccgucugcaagguccuccaccucgagggcgaggucaacaagaucaaguccgcccuccucuccaccaacaaggccgucgucucccucuccaacggcgucuccguccucaccuucaagguccucgaccucaagaacuacaucgacaagcagcuccuccccauccucaacaagcaguccugcuccaucuccaacaucgagaccgucaucgaguuccagcagaagaacaaccgccuccucgagaucacccgcgaguucuccgucaacgccggcgucaccacccccgucuccaccuacaugcucaccaacuccgagcuccucucccucaucaacgacaugcccaucaccaacgaccagaagaagcucauguccaacaacguccagaucguccgccagcaguccuacuccaucaugugcaucaucaaggaggagguccucgccuacgucguccagcucccccucuacggcgucaucgacacccccugcuggaagcuccacaccuccccccucugcaccaccaacaccaaggagggcuccaacaucugccucacccgcaccgaccgcggcugguacugcgacaacgccggcuccgucuccuucuucccccaggccgagaccugcaagguccaguccaaccgcgucuucugcgacaccaugaacucccucacccuccccuccgaggucaaccucugcaacgucgacaucuucaaccccaaguacgacugcaagaucaugaccuccaagaccgacgucuccuccuccgucaucaccucccucggcgccaucgucuccugcuacggcaagaccaagugcaccgccuccaacaagaaccgcggcaucaucaagaccuucuccaacggcugcgacuacgucuccaacaagggcgucgacaccgucuccgucggcaacacccucuacuacgucaacaagcaggagggcaagucccucuacgucaagggcgagcccaucaucaacuucuacgacccccucgucuuccccuccgacgaguucgacgccuccaucucccaggucaacgagaagaucaaccagucccucgccuucauccgcaaguccgacgagcuccuccacaacgucaacgccggcaaguccaccaccaacaucaugaucaccaccaucaucaucgucaucaucgucauccuccucucccucaucgccgucggccuccuccucuacugcaaggcccgcugaggacuaguggaagcauuuuccuggcugauuaaaagaaauuacucagcuauggucaucuguuccuguuagaaggcuaugcagcauauuauauacuaugcgcauguuaugaaaugcauaauaaaaaauuuuaaaaaaucuaaaagaucuaaaaaaaaaaaaaaaaaaaaaaaaaaaaaaaaaaaaaaaaaaaaaaaaaaaaaaaaaaaaaaaaugcaucccccccccccccccccccccccccccccccaaaggcucuuuucagagccaccagaauu

SEQ ID NO: 1495 - RNA, 2027 nt, Artificial Sequence
  mRNA product Design f-2 comprising derived and/or modified sequence from HRSV(A2)__F-del_DSCav1 (opt3)
gggagagcggcucggccauuuugucccagucaguccggaggcugcggcugcagaaguaccgccugcggaguaacugcaaagaagcuuaccauggagcugcucauccuuaaggccaacgcuauuaccacaauacugacugcagugacguucugcuuugccagcggccagaauaucaccgaagaguucuaccaauccacauguucugcggucucaaaaggguauuugagugcuuuaagaacuggaugguacaccagcguuauuacaaucgaacuguccaacauuaaggagaauaaaugcaacgguaccgacgccaaggugaaacuaaucaagcaggaacucgauaaguauaaaaaugcaguaacugagcugcagcuucugaugcagucuacacccgccaccaacaauagggcucggcgcgaguugccucgauuuaugaacuacacgcucaauaacgcaaagaaaacuaaugugacccugucgaagaaacguaagagaagguuccugggcuuucucuuaggggucggaucagccauagcuagcggcguggccguuuguaaggugcugcaccuugaaggugaggucaacaaaaucaagagugcguugcuguccacaaauaaagcagugguaucucuaagcaacgggguuuccgugcucacuuucaagguccuggaccuuaaaaauuauauugauaagcaacuguugccaauccucaacaaacagucaugcaguauuagcaacaucgaaaccgugauagaguuucagcagaagaauaaccggcuguuagagauuacacgcgaguucucugugaaugccggagucaccacgccgguuuccacuuacaugcugacaaacucagaacuccuuagccugaucaaugacaugcccauuaccaacgaucaaaagaaauugaugaguaauaacgugcagaucguaagacagcagucuuauuccaucauguguauuauaaaggaagaggugcuagcuuacgucgugcaacugccucucuacggcguuaucgacacuccaugcuggaaacugcauacaagcccccuuuguaccacgaauaccaaggaaggcucgaacauuugccugacaaggacugaucgggggugguauugugacaaugccggaucuguguccuuuuucccucaggcagagaccugcaaaguccagucaaaccgcguguuuugugauacaaugaauaguuugacucucccaagcgagguaaaccugugcaauguugacaucuucaaccccaaguacgauugcaagauaaugaccuccaaaacagacgugucuagcucagucauuaccaguuuaggugcuaucguguccuguuauggcaagacuaaaugcacggccagcaacaagaaucgagggaucauuaaaacauuuucuaacggaugugauuacgucucaaauaagggcguggacaccguuaguguggguaacacucuguauuacguaaauaagcaagaagggaaaagccuauaugucaagggagagccuaucauuaacuucuacgacccacucguguucccguccgaugaauuugacgcgucuauaucgcagguuaaugagaaaaucaaccagagccuggccuucauuagaaaguccgaugaacuuuugcacaaugugaacgcaggcaaaucaaccacaaauaucaugaucaccacuauuauaaucgucauuaucgugauucugcucagucugaucgcuguaggccuucuguuguacugcaaggccaggugaggacuaguggaagcauuuuccuggcugauuaaaagaaauuacucagcuauggucaucuguuccuguuagaaggcuaugcagcauauuauauacuaugcgcauguuaugaaaugcauaauaaaaaauuuuaaaaaaucuaaaagaucuaaaaaaaaaaaaaaaaaaaaaaaaaaaaaaaaaaaaaaaaaaaaaaaaaaaaaaaaaaaaaaaaugcaucccccccccccccccccccccccccccccccaaaggcucuuuucagagccaccagaauu

SEQ ID NO: 1496 - RNA, 2027 nt, Artificial Sequence
  mRNA product Design f-2 comprising derived and/or modified sequence from HRSV(A2)__F-del_DSCav1 (opt4)
gggagagcggcucggccauuuugucccagucaguccggaggcugcggcugcagaaguaccgccugcggaguaacugcaaagaagcuuaccauggagcugcugauccugaaggccaacgccaucaccaccauccugaccgccgugaccuucugcuucgccagcggccagaacaucaccgaggaguucuaccagagcaccugcagcgccgugagcaagggcuaccugagcgcccugagaaccggcugguacaccagcgugaucaccaucgagcugagcaacaucaaggagaacaagugcaacggcaccgacgccaaggugaagcugaucaagcaggagcuggacaaguacaagaacgccgugaccgagcugcagcugcugaugcagagcacccccgccaccaacaacagagccagaagagagcugcccagauucaugaacuacacccugaacaacgccaagaagaccaacgugacccugagcaagaagagaaagagaagauuccugggcuuccugcugggcgugggcagcgccaucgccagcggcguggccgugugcaaggugcugcaccuggagggcgaggugaacaagaucaagagcgcccugcugagcaccaacaaggccguggugagccugagcaacggcgugagcgugcugaccuucaaggugcuggaccugaagaacuacaucgacaagcagcugcugcccauccugaacaagcagagcugcagcaucagcaacaucgagaccgugaucgaguuccagcagaagaacaacagacugcuggagaucaccagagaguucagcgugaacgccggcgugaccacccccgugagcaccuacaugcugaccaacagcgagcugcugagccugaucaacgacaugcccaucaccaacgaccagaagaagcugaugagcaacaacgugcagaucgugagacagcagagcuacagcaucaugugcaucaucaaggaggaggugcuggccuacguggugcagcugccccuguacggcgugaucgacacccccugcuggaagcugcacaccagcccccugugcaccaccaacaccaaggagggcagcaacaucugccugaccagaaccgacagaggcugguacugcgacaacgccggcagcgugagcuucuucccccaggccgagaccugcaaggugcagagcaacagaguguucugcgacaccaugaacagccugacccugcccagcgaggugaaccugugcaacguggacaucuucaaccccaaguacgacugcaagaucaugaccagcaagaccgacgugagcagcagcgugaucaccagccugggcgccaucgugagcugcuacggcaagaccaagugcaccgccagcaacaagaacagaggcaucaucaagaccuucagcaacggcugcgacuacgugagcaacaagggcguggacaccgugagcgugggcaacacccuguacuacgugaacaagcaggagggcaagagccuguacgugaagggcgagcccaucaucaacuucuacgacccccugguguuccccagcgacgaguucgacgccagcaucagccaggugaacgagaagaucaaccagagccuggccuucaucagaaagagcgacgagcugcugcacaacgugaacgccggcaagagcaccaccaacaucaugaucaccaccaucaucaucgugaucaucgugauccugcugagccugaucgccgugggccugcugcuguacugcaaggccagaugaggacuaguggaagcauuuuccuggcugauuaaaagaaauuacucagcuauggucaucuguuccuguuagaaggcuaugcagcauauuauauacuaugcgcauguuaugaaaugcauaauaaaaaauuuuaaaaaaucuaaaagaucuaaaaaaaaaaaaaaaaaaaaaaaaaaaaaaaaaaaaaaaaaaaaaaaaaaaaaaaaaaaaaaaaugcaucccccccccccccccccccccccccccccccaaaggcucuuuucagagccaccagaauu

SEQ ID NO: 1497 - RNA, 2027 nt, Artificial Sequence
  mRNA product Design f-2 comprising derived and/or modified sequence from HRSV(A2)__F-del_DSCav1 (opt5)
gggagagcggcucggccauuuugucccagucaguccggaggcugcggcugcagaaguaccgccugcggaguaacugcaaagaagcuuaccauggagcugcucauccugaaggccaacgcuauuaccacaauccuuacggccgugaccuucugcuuugcgagcggccagaauauuacagaagaguucuaccaauccaccuguucugcugucagcaaaggguaucuguccgcccucagaacaggaugguacaccucuguuaucacaauugaacugagcaacaucaaggagaauaaaugcaacggcaccgacgccaaggugaaacuuaucaagcaggaacuggauaaguauaaaaaugcugugacggagcuccagcugcugaugcaguccacccccgccacaaacaaucgggcucgcagagagcucccucgguuuaugaacuacacccugaauaacgccaagaaaacaaaugucacccuuucuaagaaacgcaagagacgguuccugggguuucuccugggagugggcagcgcgauugccuccgggguugcuguguguaagguccuucaccuggaaggagaggugaacaaaaucaagagcgcccuccugucuacgaauaaagcuguugugucccugagcaacggcgucucugugcucacauucaaggugcuggaccuuaaaaauuauauugauaagcaacugcucccgauccugaacaaacaguccugcagcauuucuaacaucgaaaccgucauugaguuucagcagaagaauaaccgccuucuggagaucacaagagaauuuuccguuaaugccggcgugaccacccccgugagcacauacaugcucacgaacuccgagcugcugucucucaucaaugacaugccuauuaccaacgaucaaaagaaacugaugagcaauaacguccagaucgugcggcagcaguccuauagcauuauguguaucauuaaggaagagguucuugcguacgugguccaacugccccucuacggggugaucgacacaccuugcuggaaacugcauaccucuccccuuuguacaaccaauacgaaggaaggauccaacaucugccugacacgcaccgauagaggcugguauugugacaaugccgggagcguuucuuucuucccucaggcugagaccugcaaagugcagagcaaccgggucuuuugugauacaaugaacucccucacccugccgucugaggugaaucugugcaaugucgacauuuucaaccccaaguacgauugcaagaucaugacaagcaaaacggacguguccagcucuguuauuaccucccucggagccaucgugagcuguuauggcaagacaaaaugcaccgcuucuaacaagaaucgcgggauuaucaaaacauuuuccaacggaugugauuacgucagcaauaagggcguggacaccguuuccgugggcaacacgcuguauuacgucaauaagcaagaagggaaaucucuuuaugugaagggagagccuaucauuaacuucuacgacccccugguguucccuagcgaugaauuugacgccuccaucucucagguuaaugagaaaauuaaccagagccucgccuucaucagaaaguccgaugaacugcugcacaaugucaacgcuggcaaaagcaccacaaauauuaugaucaccacaauuaucaucgugauuaucgugauucuucucucucugaucgcggucgggcugcuccuguacugcaaggcccggugaggacuaguggaagcauuuuccuggcugauuaaaagaaauuacucagcuauggucaucuguuccuguuagaaggcuaugcagcauauuauauacuaugcgcauguuaugaaaugcauaauaaaaaauuuuaaaaaaucuaaaagaucuaaaaaaaaaaaaaaaaaaaaaaaaaaaaaaaaaaaaaaaaaaaaaaaaaaaaaaaaaaaaaaaaugcaucccccccccccccccccccccccccccccccaaaggcucuuuucagagccaccagaauu

SEQ ID NO: 1498 - RNA, 2027 nt, Artificial Sequence
  mRNA product Design f-2 comprising derived and/or modified sequence from HRSV(A2)__F-del_DSCav1 (opt6)
gggagagcggcucggccauuuugucccagucaguccggaggcugcggcugcagaaguaccgccugcggaguaacugcaaagaagcuuaccauggaacuauuaauauuaaaagcaaaugcuauuaccacaauacuuacugcuguaaccuucugcuuugccucuggccaaaacauaacagaagaauuuuaucaaucaacuugcuccgcuguaagcaaaggcuaccuaucagcauuacgcaccggcugguacacaucaguaauaacaauagaacuauccaacauaaaagaaaauaaaugcaacggaacagacgcaaaaguaaaauuaauaaaacaagaacucgacaaauacaaaaacgcaguaacagaauuacaacuacuaaugcaaaguacuccagccaccaacaacagagcaagaagagaauuaccacgauuuaugaacuacacacuaaacaaugcaaaaaaaacaaacguaacacuaucaaaaaaacguaaacgcagauucuuaggcuuccuccuagguguaggcucagcaaucgccucaggaguggcaguuuguaaaguacuacaccuagaaggagaaguaaacaaaaucaaaucugcccuuuuaucgacaaacaaagcaguaguaucguuauccaauggagucucaguauugacauucaaaguauuagaccuaaaaaauuauauagauaaacaacucuuaccuaucuuaaauaaacaaagcugcucaauaaguaacauagaaaccguaauagaauuucaacaaaaaaacaauagacuccuugagaucacucgagaauuuucaguaaacgcagguguaacaacaccaguaagcacauacaugcuaacaaauagugaacuauuaucucuaauuaacgauaugcccauaaccaacgaucaaaaaaaacucaugaguaacaacguacaaauaguaagacaacaauccuauagcauaaugugcauuauaaaagaagaaguacuagcauauguaguccaacuaccacuauacggcguaauagacacaccaugcuggaaacuacacaccucaccccuaugcacaacaaauacaaaagaaggaucaaacauaugcuuaaccaggacagacagaggcugguacugcgauaacgcaggaucuguuucauucuucccccaagcagaaacaugcaaaguacaaucaaacagaguauuuugugauaccaugaacucacucacauuaccauccgaagucaaccucugcaacguagacauauucaaccccaaauacgacugcaaaauaaugaccucaaaaacagauguaucaucaucaguaaucacaucacuaggagcuaucguaucuuguuauggaaaaacaaaaugcacagcauccaacaaaaacagaggaauuaucaaaacauucucaaauggaugugacuauguaucaaacaaaggaguagacaccguaagcguaggcaauacacuauauuacguaaauaaacaagaaggaaaaucacuauacguaaaaggugaaccaauaauaaacuucuaugacccccuaguauucccaucagaugaauuugacgcaagcauaucacaagucaacgaaaaaauaaaccaaucacuggcauucauucgcaaaucagaugaacuucuccacaacguaaacgcugguaaaagcacuacaaacauaaugauaacaacaaucaucauugucauaauaguuauucuauuaucacuaaucgcaguaggauuacuacuauacuguaaagcgagguaaggacuaguggaagcauuuuccuggcugauuaaaagaaauuacucagcuauggucaucuguuccuguuagaaggcuaugcagcauauuauauacuaugcgcauguuaugaaaugcauaauaaaaaauuuuaaaaaaucuaaaagaucuaaaaaaaaaaaaaaaaaaaaaaaaaaaaaaaaaaaaaaaaaaaaaaaaaaaaaaaaaaaaaaaaugcaucccccccccccccccccccccccccccccccaaaggcucuuuucagagccaccagaauu

SEQ ID NO: 1499 - RNA, 2027 nt, Artificial Sequence
  mRNA product Design f-2 comprising derived and/or modified sequence from HRSV(A2)__F-del_DSCav1 (opt11)
gggagagcggcucggccauuuugucccagucaguccggaggcugcggcugcagaaguaccgccugcggaguaacugcaaagaagcuuaccauggagcugcucauccugaaggccaacgccaucaccacaauccugacggcggugaccuucugcuucgccagcggccagaacaucaccgaggaguucuaccaguccacgugcagcgccgucuccaagggguaccucagcgcccugcgaaccggcugguacaccuccgugaucaccaucgagcugucaaacaucaaggagaacaagugcaacgggaccgaugccaagguuaagcucaucaagcaggagcuggacaaguacaagaacgcggucacggagcugcagcuccugaugcaguccacuccggcaaccaacaaccgcgccaggcgcgagcugccccgguucaugaacuacacccucaacaacgccaagaagacgaaugugacccugagcaagaagcgcaagcggcgcuuccugggcuuccuccuaggggugggcuccgccaucgcgagcggcgucgccgugugcaagguguugcaccucgagggggaggucaacaagaucaagagcgcccugcuguccaccaacaaggccgugguaagccucuccaacggcgucagcguucugaccuucaaggugcuggaccucaagaacuauaucgacaagcagcugcugcccauccugaacaagcagagcugcuccaucucaaacaucgaaacggugauugaguuccagcagaagaacaaccggcuccuggaaaucacccgcgaguucagcgugaacgccggggucaccacccccguguccacguacaugcugaccaacagcgagcuccuaucccugaucaacgacaugccgaucaccaacgaccagaagaagcucaugagcaacaacgugcagaucguccggcagcaguccuacagcaucaugugcaucaucaaggaagaggugcuggcguacgugguccagcugccccucuacggcgugaucgacacccccugcuggaagcugcacacgagcccccugugcacaaccaacaccaaggagggguccaacaucugccucacgcgcaccgaccggggcugguacugcgacaacgccggcagcgucuccuucuucccgcaggccgagaccugcaaggugcagagcaaccgcguguucugcgacaccaugaacucccugacgcugcccucugagguaaaccucugcaacgucgacaucuucaaccccaaguacgacugcaagaucaugaccuccaagacagacgugagcuccagcgugaucacaucccugggggccaucgucagcugcuacggcaagacuaaguguacugccagcaacaagaaccgggggaucaucaagaccuucuccaacggcugcgacuacgugagcaacaagggcguggacaccguguccgucgggaacacccuguacuacguuaauaagcaggagggcaagagccucuacgugaaaggggagcccaucauuaacuucuacgacccacugguuuuccccuccgacgaguucgacgcgagcaucucccaggugaacgagaagaucaaccagagccuggccuucauccgcaaguccgacgagcugcuccacaacgugaacgccggcaagagcacgaccaacaucaugaucaccaccaucaucaucgugaucaucgugauucugcugucccucaucgccguggggcugcugcuuuacugcaaggcccggugaggacuaguggaagcauuuuccuggcugauuaaaagaaauuacucagcuauggucaucuguuccuguuagaaggcuaugcagcauauuauauacuaugcgcauguuaugaaaugcauaauaaaaaauuuuaaaaaaucuaaaagaucuaaaaaaaaaaaaaaaaaaaaaaaaaaaaaaaaaaaaaaaaaaaaaaaaaaaaaaaaaaaaaaaaugcaucccccccccccccccccccccccccccccccaaaggcucuuuucagagccaccagaauu

SEQ ID NO: 1500 - RNA, 2018 nt, Artificial Sequence
  mRNA product Design f-3 comprising derived and/or modified sequence from HRSV(A2)__F-del_DSCav1 (opt1)
gggagagucccgcagucggcguccagcggcucugcuuguucgugugugugucguugcaggccuuauucaagcuuaccauggagcugcucauccugaaggccaacgccaucaccaccauccugacggcggugaccuucugcuucgccagcggccagaacaucaccgaggaguucuaccaguccacgugcagcgccgucuccaagggguaccucagcgcccugcggaccggcugguacaccuccgugaucaccaucgagcugagcaacaucaaggagaacaagugcaacgggaccgacgccaaggugaagcucaucaagcaggagcuggacaaguacaagaacgcggucacggagcugcagcuccugaugcaguccaccccggcaaccaacaaccgcgcccggcgcgagcugccccgguucaugaacuacacccucaacaacgccaagaagacgaacgugacccugagcaagaagcgcaagcggcgcuuccugggcuuccuccugggggugggcuccgccaucgcgagcggcgucgccgugugcaaggugcugcaccucgagggggaggucaacaagaucaagagcgcccugcuguccaccaacaaggccguggugagccucuccaacggcgucagcgugcugaccuucaaggugcuggaccucaagaacuacaucgacaagcagcugcugcccauccugaacaagcagagcugcuccaucagcaacaucgagacggugaucgaguuccagcagaagaacaaccggcuccuggagaucacccgcgaguucagcgugaacgccggggucaccacccccguguccacguacaugcugaccaacagcgagcuccugucccugaucaacgacaugccgaucaccaacgaccagaagaagcucaugagcaacaacgugcagaucguccggcagcaguccuacagcaucaugugcaucaucaaggaggaggugcuggcguacgugguccagcugccccucuacggcgugaucgacacccccugcuggaagcugcacacgagcccccugugcaccaccaacaccaaggagggguccaacaucugccucacgcgcaccgaccggggcugguacugcgacaacgccggcagcgucuccuucuucccgcaggccgagaccugcaaggugcagagcaaccgcguguucugcgacaccaugaacucccugacgcugcccagcgagguaaaccucugcaacgucgacaucuucaaccccaaguacgacugcaagaucaugaccuccaagaccgacgugagcuccagcgugaucaccucccugggggccaucgucagcugcuacggcaagacgaagugcaccgccagcaacaagaaccgggggaucaucaagaccuucuccaacggcugcgacuacgugagcaacaagggcguggacaccguguccgucgggaacacccuguacuacgugaacaagcaggagggcaagagccucuacgugaagggggagcccaucaucaacuucuacgacccgcuggucuuccccuccgacgaguucgacgcgagcaucucccaggugaacgagaagaucaaccagagccuggccuucauccgcaaguccgacgagcugcuccacaacgugaacgccggcaagagcacgaccaacaucaugaucaccaccaucaucaucgucaucaucgugauccugcugucccucaucgccguggggcugcugcucuacugcaaggcccggugaggacuaguacuggcugcaucucccuuuccucuguccuccauccuucucccaggauggugaagggggaccugguacccagugauccccaccccaggauccuaaaucaugacuuaccugcuaauaaaaacucauuggaaaagugagaagaucuaaaaaaaaaaaaaaaaaaaaaaaaaaaaaaaaaaaaaaaaaaaaaaaaaaaaaaaaaaaaaaaaugcaucccccccccccccccccccccccccccccccaaaggcucuuuucagagccaccagaauu

SEQ ID NO: 1501 - RNA, 2018 nt, Artificial Sequence
  mRNA product Design f-3 comprising derived and/or modified sequence from HRSV(A2)__F-del_DSCav1 (opt1)
gggagagucccgcagucggcguccagcggcucugcuuguucgugugugugucguugcaggccuuauucaagcuuaccauggagcugcucauccugaaggccaacgccaucaccaccauccugacggcggugaccuucugcuucgccagcggccagaacaucaccgaggaguucuaccaguccacgugcagcgccgucuccaagggguaccucagcgcccugcgcaccggcugguacaccuccgugaucaccaucgagcugagcaacaucaaggagaacaagugcaacgggaccgacgccaaggugaagcucaucaagcaggagcuggacaaguacaagaacgcggucacggagcugcagcuccugaugcaguccacccccgccaccaacaaccgggcccgccgggagcugccgcgcuucaugaacuacacccucaacaacgccaagaagacgaacgugacccugagcaagaagcggaagcgccgguuccugggcuuccuccugggggugggcuccgcgaucgccagcggcgucgccgugugcaaggugcugcaccucgagggggaggucaacaagaucaaguccgcccugcugagcaccaacaaggccguggugucccucagcaacggcgucuccgugcugaccuucaaggugcuggaccucaagaacuacaucgacaagcagcugcugcccauccucaacaagcagagcugcuccaucagcaacaucgagacggucaucgaguuccagcagaagaacaaccgccugcuggagaucacccgggaguucuccgugaacgcgggggugaccacccccgucagcacguacaugcucaccaacagcgagcugcugucccucaucaacgacaugcccaucaccaacgaccagaagaagcugaugagcaacaacgugcagaucgugcgccagcaguccuacagcaucaugugcaucaucaaggaggagguccuggccuacguggugcagcucccgcuguacggcgucaucgacacccccugcuggaagcugcacacgagcccccucugcaccaccaacaccaaggaggggagcaacaucugccugacgcggaccgaccgcggcugguacugcgacaacgccggcuccgugagcuucuucccccaggccgagaccugcaagguccaguccaaccggguguucugcgacaccaugaacagccugacgcucccguccgaggugaaccugugcaacgucgacaucuucaaccccaaguacgacugcaagaucaugaccagcaagaccgacguguccagcuccgugaucaccagccugggggccaucgucuccugcuacggcaagacgaagugcaccgcgagcaacaagaaccgcgggaucaucaagaccuucuccaacggcugcgacuacgugagcaacaagggcguggacaccgucagcguggggaacacccucuacuacgugaacaagcaggagggcaagucccuguacgucaagggggagcccaucaucaacuucuacgacccccugguguucccgagcgacgaguucgacgccuccaucagccaggugaacgagaagaucaaccagucccucgccuucauccggaaguccgacgagcugcugcacaacgucaacgccggcaaguccacgaccaacaucaugaucaccaccaucaucaucgugaucaucgugauccugcucagccugaucgccgucgggcugcuccuguacugcaaggcgcgcugaggacuaguacuggcugcaucucccuuuccucuguccuccauccuucucccaggauggugaagggggaccugguacccagugauccccaccccaggauccuaaaucaugacuuaccugcuaauaaaaacucauuggaaaagugagaagaucuaaaaaaaaaaaaaaaaaaaaaaaaaaaaaaaaaaaaaaaaaaaaaaaaaaaaaaaaaaaaaaaaugcaucccccccccccccccccccccccccccccccaaaggcucuuuucagagccaccagaauu

SEQ ID NO: 1502 - RNA, 2018 nt, Artificial Sequence
  mRNA product Design f-3 comprising derived and/or modified sequence from HRSV(A2)__F-del_DSCav1 (opt2)
gggagagucccgcagucggcguccagcggcucugcuuguucgugugugugucguugcaggccuuauucaagcuuaccauggagcuccucauccucaaggccaacgccaucaccaccauccucaccgccgucaccuucugcuucgccuccggccagaacaucaccgaggaguucuaccaguccaccugcuccgccgucuccaagggcuaccucuccgcccuccgcaccggcugguacaccuccgucaucaccaucgagcucuccaacaucaaggagaacaagugcaacggcaccgacgccaaggucaagcucaucaagcaggagcucgacaaguacaagaacgccgucaccgagcuccagcuccucaugcaguccacccccgccaccaacaaccgcgcccgccgcgagcucccccgcuucaugaacuacacccucaacaacgccaagaagaccaacgucacccucuccaagaagcgcaagcgccgcuuccucggcuuccuccucggcgucggcuccgccaucgccuccggcgucgccgucugcaagguccuccaccucgagggcgaggucaacaagaucaaguccgcccuccucuccaccaacaaggccgucgucucccucuccaacggcgucuccguccucaccuucaagguccucgaccucaagaacuacaucgacaagcagcuccuccccauccucaacaagcaguccugcuccaucuccaacaucgagaccgucaucgaguuccagcagaagaacaaccgccuccucgagaucacccgcgaguucuccgucaacgccggcgucaccacccccgucuccaccuacaugcucaccaacuccgagcuccucucccucaucaacgacaugcccaucaccaacgaccagaagaagcucauguccaacaacguccagaucguccgccagcaguccuacuccaucaugugcaucaucaaggaggagguccucgccuacgucguccagcucccccucuacggcgucaucgacacccccugcuggaagcuccacaccuccccccucugcaccaccaacaccaaggagggcuccaacaucugccucacccgcaccgaccgcggcugguacugcgacaacgccggcuccgucuccuucuucccccaggccgagaccugcaagguccaguccaaccgcgucuucugcgacaccaugaacucccucacccuccccuccgaggucaaccucugcaacgucgacaucuucaaccccaaguacgacugcaagaucaugaccuccaagaccgacgucuccuccuccgucaucaccucccucggcgccaucgucuccugcuacggcaagaccaagugcaccgccuccaacaagaaccgcggcaucaucaagaccuucuccaacggcugcgacuacgucuccaacaagggcgucgacaccgucuccgucggcaacacccucuacuacgucaacaagcaggagggcaagucccucuacgucaagggcgagcccaucaucaacuucuacgacccccucgucuuccccuccgacgaguucgacgccuccaucucccaggucaacgagaagaucaaccagucccucgccuucauccgcaaguccgacgagcuccuccacaacgucaacgccggcaaguccaccaccaacaucaugaucaccaccaucaucaucgucaucaucgucauccuccucucccucaucgccgucggccuccuccucuacugcaaggcccgcugaggacuaguacuggcugcaucucccuuuccucuguccuccauccuucucccaggauggugaagggggaccugguacccagugauccccaccccaggauccuaaaucaugacuuaccugcuaauaaaaacucauuggaaaagugagaagaucuaaaaaaaaaaaaaaaaaaaaaaaaaaaaaaaaaaaaaaaaaaaaaaaaaaaaaaaaaaaaaaaaugcaucccccccccccccccccccccccccccccccaaaggcucuuuucagagccaccagaauu

SEQ ID NO: 1503 - RNA, 2018 nt, Artificial Sequence
  mRNA product Design f-3 comprising derived and/or modified sequence from HRSV(A2)__F-del_DSCav1 (opt3)
gggagagucccgcagucggcguccagcggcucugcuuguucgugugugugucguugcaggccuuauucaagcuuaccauggagcugcucauccuuaaggccaacgcuauuaccacaauacugacugcagugacguucugcuuugccagcggccagaauaucaccgaagaguucuaccaauccacauguucugcggucucaaaaggguauuugagugcuuuaagaacuggaugguacaccagcguuauuacaaucgaacuguccaacauuaaggagaauaaaugcaacgguaccgacgccaaggugaaacuaaucaagcaggaacucgauaaguauaaaaaugcaguaacugagcugcagcuucugaugcagucuacacccgccaccaacaauagggcucggcgcgaguugccucgauuuaugaacuacacgcucaauaacgcaaagaaaacuaaugugacccugucgaagaaacguaagagaagguuccugggcuuucucuuaggggucggaucagccauagcuagcggcguggccguuuguaaggugcugcaccuugaaggugaggucaacaaaaucaagagugcguugcuguccacaaauaaagcagugguaucucuaagcaacgggguuuccgugcucacuuucaagguccuggaccuuaaaaauuauauugauaagcaacuguugccaauccucaacaaacagucaugcaguauuagcaacaucgaaaccgugauagaguuucagcagaagaauaaccggcuguuagagauuacacgcgaguucucugugaaugccggagucaccacgccgguuuccacuuacaugcugacaaacucagaacuccuuagccugaucaaugacaugcccauuaccaacgaucaaaagaaauugaugaguaauaacgugcagaucguaagacagcagucuuauuccaucauguguauuauaaaggaagaggugcuagcuuacgucgugcaacugccucucuacggcguuaucgacacuccaugcuggaaacugcauacaagcccccuuuguaccacgaauaccaaggaaggcucgaacauuugccugacaaggacugaucgggggugguauugugacaaugccggaucuguguccuuuuucccucaggcagagaccugcaaaguccagucaaaccgcguguuuugugauacaaugaauaguuugacucucccaagcgagguaaaccugugcaauguugacaucuucaaccccaaguacgauugcaagauaaugaccuccaaaacagacgugucuagcucagucauuaccaguuuaggugcuaucguguccuguuauggcaagacuaaaugcacggccagcaacaagaaucgagggaucauuaaaacauuuucuaacggaugugauuacgucucaaauaagggcguggacaccguuaguguggguaacacucuguauuacguaaauaagcaagaagggaaaagccuauaugucaagggagagccuaucauuaacuucuacgacccacucguguucccguccgaugaauuugacgcgucuauaucgcagguuaaugagaaaaucaaccagagccuggccuucauuagaaaguccgaugaacuuuugcacaaugugaacgcaggcaaaucaaccacaaauaucaugaucaccacuauuauaaucgucauuaucgugauucugcucagucugaucgcuguaggccuucuguuguacugcaaggccaggugaggacuaguacuggcugcaucucccuuuccucuguccuccauccuucucccaggauggugaagggggaccugguacccagugauccccaccccaggauccuaaaucaugacuuaccugcuaauaaaaacucauuggaaaagugagaagaucuaaaaaaaaaaaaaaaaaaaaaaaaaaaaaaaaaaaaaaaaaaaaaaaaaaaaaaaaaaaaaaaaugcaucccccccccccccccccccccccccccccccaaaggcucuuuucagagccaccagaauu

SEQ ID NO: 1504 - RNA, 2018 nt, Artificial Sequence
  mRNA product Design f-3 comprising derived and/or modified sequence from HRSV(A2)__F-del_DSCav1 (opt4)
gggagagucccgcagucggcguccagcggcucugcuuguucgugugugugucguugcaggccuuauucaagcuuaccauggagcugcugauccugaaggccaacgccaucaccaccauccugaccgccgugaccuucugcuucgccagcggccagaacaucaccgaggaguucuaccagagcaccugcagcgccgugagcaagggcuaccugagcgcccugagaaccggcugguacaccagcgugaucaccaucgagcugagcaacaucaaggagaacaagugcaacggcaccgacgccaaggugaagcugaucaagcaggagcuggacaaguacaagaacgccgugaccgagcugcagcugcugaugcagagcacccccgccaccaacaacagagccagaagagagcugcccagauucaugaacuacacccugaacaacgccaagaagaccaacgugacccugagcaagaagagaaagagaagauuccugggcuuccugcugggcgugggcagcgccaucgccagcggcguggccgugugcaaggugcugcaccuggagggcgaggugaacaagaucaagagcgcccugcugagcaccaacaaggccguggugagccugagcaacggcgugagcgugcugaccuucaaggugcuggaccugaagaacuacaucgacaagcagcugcugcccauccugaacaagcagagcugcagcaucagcaacaucgagaccgugaucgaguuccagcagaagaacaacagacugcuggagaucaccagagaguucagcgugaacgccggcgugaccacccccgugagcaccuacaugcugaccaacagcgagcugcugagccugaucaacgacaugcccaucaccaacgaccagaagaagcugaugagcaacaacgugcagaucgugagacagcagagcuacagcaucaugugcaucaucaaggaggaggugcuggccuacguggugcagcugccccuguacggcgugaucgacacccccugcuggaagcugcacaccagcccccugugcaccaccaacaccaaggagggcagcaacaucugccugaccagaaccgacagaggcugguacugcgacaacgccggcagcgugagcuucuucccccaggccgagaccugcaaggugcagagcaacagaguguucugcgacaccaugaacagccugacccugcccagcgaggugaaccugugcaacguggacaucuucaaccccaaguacgacugcaagaucaugaccagcaagaccgacgugagcagcagcgugaucaccagccugggcgccaucgugagcugcuacggcaagaccaagugcaccgccagcaacaagaacagaggcaucaucaagaccuucagcaacggcugcgacuacgugagcaacaagggcguggacaccgugagcgugggcaacacccuguacuacgugaacaagcaggagggcaagagccuguacgugaagggcgagcccaucaucaacuucuacgacccccugguguuccccagcgacgaguucgacgccagcaucagccaggugaacgagaagaucaaccagagccuggccuucaucagaaagagcgacgagcugcugcacaacgugaacgccggcaagagcaccaccaacaucaugaucaccaccaucaucaucgugaucaucgugauccugcugagccugaucgccgugggccugcugcuguacugcaaggccagaugaggacuaguacuggcugcaucucccuuuccucuguccuccauccuucucccaggauggugaagggggaccugguacccagugauccccaccccaggauccuaaaucaugacuuaccugcuaauaaaaacucauuggaaaagugagaagaucuaaaaaaaaaaaaaaaaaaaaaaaaaaaaaaaaaaaaaaaaaaaaaaaaaaaaaaaaaaaaaaaaugcaucccccccccccccccccccccccccccccccaaaggcucuuuucagagccaccagaauu

SEQ ID NO: 1505 - RNA, 2018 nt, Artificial Sequence
  mRNA product Design f-3 comprising derived and/or modified sequence from HRSV(A2)__F-del_DSCav1 (opt5)
gggagagucccgcagucggcguccagcggcucugcuuguucgugugugugucguugcaggccuuauucaagcuuaccauggagcugcucauccugaaggccaacgcuauuaccacaauccuuacggccgugaccuucugcuuugcgagcggccagaauauuacagaagaguucuaccaauccaccuguucugcugucagcaaaggguaucuguccgcccucagaacaggaugguacaccucuguuaucacaauugaacugagcaacaucaaggagaauaaaugcaacggcaccgacgccaaggugaaacuuaucaagcaggaacuggauaaguauaaaaaugcugugacggagcuccagcugcugaugcaguccacccccgccacaaacaaucgggcucgcagagagcucccucgguuuaugaacuacacccugaauaacgccaagaaaacaaaugucacccuuucuaagaaacgcaagagacgguuccugggguuucuccugggagugggcagcgcgauugccuccgggguugcuguguguaagguccuucaccuggaaggagaggugaacaaaaucaagagcgcccuccugucuacgaauaaagcuguugugucccugagcaacggcgucucugugcucacauucaaggugcuggaccuuaaaaauuauauugauaagcaacugcucccgauccugaacaaacaguccugcagcauuucuaacaucgaaaccgucauugaguuucagcagaagaauaaccgccuucuggagaucacaagagaauuuuccguuaaugccggcgugaccacccccgugagcacauacaugcucacgaacuccgagcugcugucucucaucaaugacaugccuauuaccaacgaucaaaagaaacugaugagcaauaacguccagaucgugcggcagcaguccuauagcauuauguguaucauuaaggaagagguucuugcguacgugguccaacugccccucuacggggugaucgacacaccuugcuggaaacugcauaccucuccccuuuguacaaccaauacgaaggaaggauccaacaucugccugacacgcaccgauagaggcugguauugugacaaugccgggagcguuucuuucuucccucaggcugagaccugcaaagugcagagcaaccgggucuuuugugauacaaugaacucccucacccugccgucugaggugaaucugugcaaugucgacauuuucaaccccaaguacgauugcaagaucaugacaagcaaaacggacguguccagcucuguuauuaccucccucggagccaucgugagcuguuauggcaagacaaaaugcaccgcuucuaacaagaaucgcgggauuaucaaaacauuuuccaacggaugugauuacgucagcaauaagggcguggacaccguuuccgugggcaacacgcuguauuacgucaauaagcaagaagggaaaucucuuuaugugaagggagagccuaucauuaacuucuacgacccccugguguucccuagcgaugaauuugacgccuccaucucucagguuaaugagaaaauuaaccagagccucgccuucaucagaaaguccgaugaacugcugcacaaugucaacgcuggcaaaagcaccacaaauauuaugaucaccacaauuaucaucgugauuaucgugauucuucucucucugaucgcggucgggcugcuccuguacugcaaggcccggugaggacuaguacuggcugcaucucccuuuccucuguccuccauccuucucccaggauggugaagggggaccugguacccagugauccccaccccaggauccuaaaucaugacuuaccugcuaauaaaaacucauuggaaaagugagaagaucuaaaaaaaaaaaaaaaaaaaaaaaaaaaaaaaaaaaaaaaaaaaaaaaaaaaaaaaaaaaaaaaaugcaucccccccccccccccccccccccccccccccaaaggcucuuuucagagccaccagaauu

SEQ ID NO: 1506 - RNA, 2018 nt, Artificial Sequence
  mRNA product Design f-3 comprising derived and/or modified sequence from HRSV(A2)__F-del_DSCav1 (opt6)
gggagagucccgcagucggcguccagcggcucugcuuguucgugugugugucguugcaggccuuauucaagcuuaccauggaacuauuaauauuaaaagcaaaugcuauuaccacaauacuuacugcuguaaccuucugcuuugccucuggccaaaacauaacagaagaauuuuaucaaucaacuugcuccgcuguaagcaaaggcuaccuaucagcauuacgcaccggcugguacacaucaguaauaacaauagaacuauccaacauaaaagaaaauaaaugcaacggaacagacgcaaaaguaaaauuaauaaaacaagaacucgacaaauacaaaaacgcaguaacagaauuacaacuacuaaugcaaaguacuccagccaccaacaacagagcaagaagagaauuaccacgauuuaugaacuacacacuaaacaaugcaaaaaaaacaaacguaacacuaucaaaaaaacguaaacgcagauucuuaggcuuccuccuagguguaggcucagcaaucgccucaggaguggcaguuuguaaaguacuacaccuagaaggagaaguaaacaaaaucaaaucugcccuuuuaucgacaaacaaagcaguaguaucguuauccaauggagucucaguauugacauucaaaguauuagaccuaaaaaauuauauagauaaacaacucuuaccuaucuuaaauaaacaaagcugcucaauaaguaacauagaaaccguaauagaauuucaacaaaaaaacaauagacuccuugagaucacucgagaauuuucaguaaacgcagguguaacaacaccaguaagcacauacaugcuaacaaauagugaacuauuaucucuaauuaacgauaugcccauaaccaacgaucaaaaaaaacucaugaguaacaacguacaaauaguaagacaacaauccuauagcauaaugugcauuauaaaagaagaaguacuagcauauguaguccaacuaccacuauacggcguaauagacacaccaugcuggaaacuacacaccucaccccuaugcacaacaaauacaaaagaaggaucaaacauaugcuuaaccaggacagacagaggcugguacugcgauaacgcaggaucuguuucauucuucccccaagcagaaacaugcaaaguacaaucaaacagaguauuuugugauaccaugaacucacucacauuaccauccgaagucaaccucugcaacguagacauauucaaccccaaauacgacugcaaaauaaugaccucaaaaacagauguaucaucaucaguaaucacaucacuaggagcuaucguaucuuguuauggaaaaacaaaaugcacagcauccaacaaaaacagaggaauuaucaaaacauucucaaauggaugugacuauguaucaaacaaaggaguagacaccguaagcguaggcaauacacuauauuacguaaauaaacaagaaggaaaaucacuauacguaaaaggugaaccaauaauaaacuucuaugacccccuaguauucccaucagaugaauuugacgcaagcauaucacaagucaacgaaaaaauaaaccaaucacuggcauucauucgcaaaucagaugaacuucuccacaacguaaacgcugguaaaagcacuacaaacauaaugauaacaacaaucaucauugucauaauaguuauucuauuaucacuaaucgcaguaggauuacuacuauacuguaaagcgagguaaggacuaguacuggcugcaucucccuuuccucuguccuccauccuucucccaggauggugaagggggaccugguacccagugauccccaccccaggauccuaaaucaugacuuaccugcuaauaaaaacucauuggaaaagugagaagaucuaaaaaaaaaaaaaaaaaaaaaaaaaaaaaaaaaaaaaaaaaaaaaaaaaaaaaaaaaaaaaaaaugcaucccccccccccccccccccccccccccccccaaaggcucuuuucagagccaccagaauu

SEQ ID NO: 1507 - RNA, 2018 nt, Artificial Sequence
  mRNA product Design f-3 comprising derived and/or modified sequence from HRSV(A2)__F-del_DSCav1 (opt11)
gggagagucccgcagucggcguccagcggcucugcuuguucgugugugugucguugcaggccuuauucaagcuuaccauggagcugcucauccugaaggccaacgccaucaccacaauccugacggcggugaccuucugcuucgccagcggccagaacaucaccgaggaguucuaccaguccacgugcagcgccgucuccaagggguaccucagcgcccugcgaaccggcugguacaccuccgugaucaccaucgagcugucaaacaucaaggagaacaagugcaacgggaccgaugccaagguuaagcucaucaagcaggagcuggacaaguacaagaacgcggucacggagcugcagcuccugaugcaguccacuccggcaaccaacaaccgcgccaggcgcgagcugccccgguucaugaacuacacccucaacaacgccaagaagacgaaugugacccugagcaagaagcgcaagcggcgcuuccugggcuuccuccuaggggugggcuccgccaucgcgagcggcgucgccgugugcaagguguugcaccucgagggggaggucaacaagaucaagagcgcccugcuguccaccaacaaggccgugguaagccucuccaacggcgucagcguucugaccuucaaggugcuggaccucaagaacuauaucgacaagcagcugcugcccauccugaacaagcagagcugcuccaucucaaacaucgaaacggugauugaguuccagcagaagaacaaccggcuccuggaaaucacccgcgaguucagcgugaacgccggggucaccacccccguguccacguacaugcugaccaacagcgagcuccuaucccugaucaacgacaugccgaucaccaacgaccagaagaagcucaugagcaacaacgugcagaucguccggcagcaguccuacagcaucaugugcaucaucaaggaagaggugcuggcguacgugguccagcugccccucuacggcgugaucgacacccccugcuggaagcugcacacgagcccccugugcacaaccaacaccaaggagggguccaacaucugccucacgcgcaccgaccggggcugguacugcgacaacgccggcagcgucuccuucuucccgcaggccgagaccugcaaggugcagagcaaccgcguguucugcgacaccaugaacucccugacgcugcccucugagguaaaccucugcaacgucgacaucuucaaccccaaguacgacugcaagaucaugaccuccaagacagacgugagcuccagcgugaucacaucccugggggccaucgucagcugcuacggcaagacuaaguguacugccagcaacaagaaccgggggaucaucaagaccuucuccaacggcugcgacuacgugagcaacaagggcguggacaccguguccgucgggaacacccuguacuacguuaauaagcaggagggcaagagccucuacgugaaaggggagcccaucauuaacuucuacgacccacugguuuuccccuccgacgaguucgacgcgagcaucucccaggugaacgagaagaucaaccagagccuggccuucauccgcaaguccgacgagcugcuccacaacgugaacgccggcaagagcacgaccaacaucaugaucaccaccaucaucaucgugaucaucgugauucugcugucccucaucgccguggggcugcugcuuuacugcaaggcccggugaggacuaguacuggcugcaucucccuuuccucuguccuccauccuucucccaggauggugaagggggaccugguacccagugauccccaccccaggauccuaaaucaugacuuaccugcuaauaaaaacucauuggaaaagugagaagaucuaaaaaaaaaaaaaaaaaaaaaaaaaaaaaaaaaaaaaaaaaaaaaaaaaaaaaaaaaaaaaaaaugcaucccccccccccccccccccccccccccccccaaaggcucuuuucagagccaccagaauu

SEQ ID NO: 1508 - RNA, 2234 nt, Artificial Sequence
  mRNA product Design f-4 comprising derived and/or modified sequence from HRSV(A2)__F-del_DSCav1 (opt1)
gggagagucccgcagucggcguccagcggcucugcuuguucgugugugugucguugcaggccuuauucaagcuuaccauggagcugcucauccugaaggccaacgccaucaccaccauccugacggcggugaccuucugcuucgccagcggccagaacaucaccgaggaguucuaccaguccacgugcagcgccgucuccaagggguaccucagcgcccugcggaccggcugguacaccuccgugaucaccaucgagcugagcaacaucaaggagaacaagugcaacgggaccgacgccaaggugaagcucaucaagcaggagcuggacaaguacaagaacgcggucacggagcugcagcuccugaugcaguccaccccggcaaccaacaaccgcgcccggcgcgagcugccccgguucaugaacuacacccucaacaacgccaagaagacgaacgugacccugagcaagaagcgcaagcggcgcuuccugggcuuccuccugggggugggcuccgccaucgcgagcggcgucgccgugugcaaggugcugcaccucgagggggaggucaacaagaucaagagcgcccugcuguccaccaacaaggccguggugagccucuccaacggcgucagcgugcugaccuucaaggugcuggaccucaagaacuacaucgacaagcagcugcugcccauccugaacaagcagagcugcuccaucagcaacaucgagacggugaucgaguuccagcagaagaacaaccggcuccuggagaucacccgcgaguucagcgugaacgccggggucaccacccccguguccacguacaugcugaccaacagcgagcuccugucccugaucaacgacaugccgaucaccaacgaccagaagaagcucaugagcaacaacgugcagaucguccggcagcaguccuacagcaucaugugcaucaucaaggaggaggugcuggcguacgugguccagcugccccucuacggcgugaucgacacccccugcuggaagcugcacacgagcccccugugcaccaccaacaccaaggagggguccaacaucugccucacgcgcaccgaccggggcugguacugcgacaacgccggcagcgucuccuucuucccgcaggccgagaccugcaaggugcagagcaaccgcguguucugcgacaccaugaacucccugacgcugcccagcgagguaaaccucugcaacgucgacaucuucaaccccaaguacgacugcaagaucaugaccuccaagaccgacgugagcuccagcgugaucaccucccugggggccaucgucagcugcuacggcaagacgaagugcaccgccagcaacaagaaccgggggaucaucaagaccuucuccaacggcugcgacuacgugagcaacaagggcguggacaccguguccgucgggaacacccuguacuacgugaacaagcaggagggcaagagccucuacgugaagggggagcccaucaucaacuucuacgacccgcuggucuuccccuccgacgaguucgacgcgagcaucucccaggugaacgagaagaucaaccagagccuggccuucauccgcaaguccgacgagcugcuccacaacgugaacgccggcaagagcacgaccaacaucaugaucaccaccaucaucaucgucaucaucgugauccugcugucccucaucgccguggggcugcugcucuacugcaaggcccggugaggacuagugaagggaacacccaaauuuaauucagccuuaagcacaauuaauuaagagugaaacguaauuguacaagcaguuggucacccaccauagggcaugaucaacaccgcaaccuuuccuuuuucccccagugauucugaaaaaccccucuucccuucagcuugcuuagauguuccaaauuuaguaagcuuaaggcggccuacagaagaaaaagaaaaaaaaggccacaaaaguucccucucacuuucaguaaauaaaauaaaagcagcaacagaaauaaagaaauaaaugaaauucaaaaugaaauaaauauuguguugugcagcauuaaaaaaucaauaaaaauuaaaaaugagcaagaucuaaaaaaaaaaaaaaaaaaaaaaaaaaaaaaaaaaaaaaaaaaaaaaaaaaaaaaaaaaaaaaaaugcaucccccccccccccccccccccccccccccccaaaggcucuuuucagagccaccagaauu

SEQ ID NO: 1509 - RNA, 2234 nt, Artificial Sequence
  mRNA product Design f-4 comprising derived and/or modified sequence from HRSV(A2)__F-del_DSCav1 (opt1)
gggagagucccgcagucggcguccagcggcucugcuuguucgugugugugucguugcaggccuuauucaagcuuaccauggagcugcucauccugaaggccaacgccaucaccaccauccugacggcggugaccuucugcuucgccagcggccagaacaucaccgaggaguucuaccaguccacgugcagcgccgucuccaagggguaccucagcgcccugcgcaccggcugguacaccuccgugaucaccaucgagcugagcaacaucaaggagaacaagugcaacgggaccgacgccaaggugaagcucaucaagcaggagcuggacaaguacaagaacgcggucacggagcugcagcuccugaugcaguccacccccgccaccaacaaccgggcccgccgggagcugccgcgcuucaugaacuacacccucaacaacgccaagaagacgaacgugacccugagcaagaagcggaagcgccgguuccugggcuuccuccugggggugggcuccgcgaucgccagcggcgucgccgugugcaaggugcugcaccucgagggggaggucaacaagaucaaguccgcccugcugagcaccaacaaggccguggugucccucagcaacggcgucuccgugcugaccuucaaggugcuggaccucaagaacuacaucgacaagcagcugcugcccauccucaacaagcagagcugcuccaucagcaacaucgagacggucaucgaguuccagcagaagaacaaccgccugcuggagaucacccgggaguucuccgugaacgcgggggugaccacccccgucagcacguacaugcucaccaacagcgagcugcugucccucaucaacgacaugcccaucaccaacgaccagaagaagcugaugagcaacaacgugcagaucgugcgccagcaguccuacagcaucaugugcaucaucaaggaggagguccuggccuacguggugcagcucccgcuguacggcgucaucgacacccccugcuggaagcugcacacgagcccccucugcaccaccaacaccaaggaggggagcaacaucugccugacgcggaccgaccgcggcugguacugcgacaacgccggcuccgugagcuucuucccccaggccgagaccugcaagguccaguccaaccggguguucugcgacaccaugaacagccugacgcucccguccgaggugaaccugugcaacgucgacaucuucaaccccaaguacgacugcaagaucaugaccagcaagaccgacguguccagcuccgugaucaccagccugggggccaucgucuccugcuacggcaagacgaagugcaccgcgagcaacaagaaccgcgggaucaucaagaccuucuccaacggcugcgacuacgugagcaacaagggcguggacaccgucagcguggggaacacccucuacuacgugaacaagcaggagggcaagucccuguacgucaagggggagcccaucaucaacuucuacgacccccugguguucccgagcgacgaguucgacgccuccaucagccaggugaacgagaagaucaaccagucccucgccuucauccggaaguccgacgagcugcugcacaacgucaacgccggcaaguccacgaccaacaucaugaucaccaccaucaucaucgugaucaucgugauccugcucagccugaucgccgucgggcugcuccuguacugcaaggcgcgcugaggacuagugaagggaacacccaaauuuaauucagccuuaagcacaauuaauuaagagugaaacguaauuguacaagcaguuggucacccaccauagggcaugaucaacaccgcaaccuuuccuuuuucccccagugauucugaaaaaccccucuucccuucagcuugcuuagauguuccaaauuuaguaagcuuaaggcggccuacagaagaaaaagaaaaaaaaggccacaaaaguucccucucacuuucaguaaauaaaauaaaagcagcaacagaaauaaagaaauaaaugaaauucaaaaugaaauaaauauuguguugugcagcauuaaaaaaucaauaaaaauuaaaaaugagcaagaucuaaaaaaaaaaaaaaaaaaaaaaaaaaaaaaaaaaaaaaaaaaaaaaaaaaaaaaaaaaaaaaaaugcaucccccccccccccccccccccccccccccccaaaggcucuuuucagagccaccagaauu

SEQ ID NO: 1510 - RNA, 2234 nt, Artificial Sequence
  mRNA product Design f-4 comprising derived and/or modified sequence from HRSV(A2)__F-del_DSCav1 (opt2)
gggagagucccgcagucggcguccagcggcucugcuuguucgugugugugucguugcaggccuuauucaagcuuaccauggagcuccucauccucaaggccaacgccaucaccaccauccucaccgccgucaccuucugcuucgccuccggccagaacaucaccgaggaguucuaccaguccaccugcuccgccgucuccaagggcuaccucuccgcccuccgcaccggcugguacaccuccgucaucaccaucgagcucuccaacaucaaggagaacaagugcaacggcaccgacgccaaggucaagcucaucaagcaggagcucgacaaguacaagaacgccgucaccgagcuccagcuccucaugcaguccacccccgccaccaacaaccgcgcccgccgcgagcucccccgcuucaugaacuacacccucaacaacgccaagaagaccaacgucacccucuccaagaagcgcaagcgccgcuuccucggcuuccuccucggcgucggcuccgccaucgccuccggcgucgccgucugcaagguccuccaccucgagggcgaggucaacaagaucaaguccgcccuccucuccaccaacaaggccgucgucucccucuccaacggcgucuccguccucaccuucaagguccucgaccucaagaacuacaucgacaagcagcuccuccccauccucaacaagcaguccugcuccaucuccaacaucgagaccgucaucgaguuccagcagaagaacaaccgccuccucgagaucacccgcgaguucuccgucaacgccggcgucaccacccccgucuccaccuacaugcucaccaacuccgagcuccucucccucaucaacgacaugcccaucaccaacgaccagaagaagcucauguccaacaacguccagaucguccgccagcaguccuacuccaucaugugcaucaucaaggaggagguccucgccuacgucguccagcucccccucuacggcgucaucgacacccccugcuggaagcuccacaccuccccccucugcaccaccaacaccaaggagggcuccaacaucugccucacccgcaccgaccgcggcugguacugcgacaacgccggcuccgucuccuucuucccccaggccgagaccugcaagguccaguccaaccgcgucuucugcgacaccaugaacucccucacccuccccuccgaggucaaccucugcaacgucgacaucuucaaccccaaguacgacugcaagaucaugaccuccaagaccgacgucuccuccuccgucaucaccucccucggcgccaucgucuccugcuacggcaagaccaagugcaccgccuccaacaagaaccgcggcaucaucaagaccuucuccaacggcugcgacuacgucuccaacaagggcgucgacaccgucuccgucggcaacacccucuacuacgucaacaagcaggagggcaagucccucuacgucaagggcgagcccaucaucaacuucuacgacccccucgucuuccccuccgacgaguucgacgccuccaucucccaggucaacgagaagaucaaccagucccucgccuucauccgcaaguccgacgagcuccuccacaacgucaacgccggcaaguccaccaccaacaucaugaucaccaccaucaucaucgucaucaucgucauccuccucucccucaucgccgucggccuccuccucuacugcaaggcccgcugaggacuagugaagggaacacccaaauuuaauucagccuuaagcacaauuaauuaagagugaaacguaauuguacaagcaguuggucacccaccauagggcaugaucaacaccgcaaccuuuccuuuuucccccagugauucugaaaaaccccucuucccuucagcuugcuuagauguuccaaauuuaguaagcuuaaggcggccuacagaagaaaaagaaaaaaaaggccacaaaaguucccucucacuuucaguaaauaaaauaaaagcagcaacagaaauaaagaaauaaaugaaauucaaaaugaaauaaauauuguguugugcagcauuaaaaaaucaauaaaaauuaaaaaugagcaagaucuaaaaaaaaaaaaaaaaaaaaaaaaaaaaaaaaaaaaaaaaaaaaaaaaaaaaaaaaaaaaaaaaugcaucccccccccccccccccccccccccccccccaaaggcucuuuucagagccaccagaauu

SEQ ID NO: 1511 - RNA, 2234 nt, Artificial Sequence
  mRNA product Design f-4 comprising derived and/or modified sequence from HRSV(A2)__F-del_DSCav1 (opt3)
gggagagucccgcagucggcguccagcggcucugcuuguucgugugugugucguugcaggccuuauucaagcuuaccauggagcugcucauccuuaaggccaacgcuauuaccacaauacugacugcagugacguucugcuuugccagcggccagaauaucaccgaagaguucuaccaauccacauguucugcggucucaaaaggguauuugagugcuuuaagaacuggaugguacaccagcguuauuacaaucgaacuguccaacauuaaggagaauaaaugcaacgguaccgacgccaaggugaaacuaaucaagcaggaacucgauaaguauaaaaaugcaguaacugagcugcagcuucugaugcagucuacacccgccaccaacaauagggcucggcgcgaguugccucgauuuaugaacuacacgcucaauaacgcaaagaaaacuaaugugacccugucgaagaaacguaagagaagguuccugggcuuucucuuaggggucggaucagccauagcuagcggcguggccguuuguaaggugcugcaccuugaaggugaggucaacaaaaucaagagugcguugcuguccacaaauaaagcagugguaucucuaagcaacgggguuuccgugcucacuuucaagguccuggaccuuaaaaauuauauugauaagcaacuguugccaauccucaacaaacagucaugcaguauuagcaacaucgaaaccgugauagaguuucagcagaagaauaaccggcuguuagagauuacacgcgaguucucugugaaugccggagucaccacgccgguuuccacuuacaugcugacaaacucagaacuccuuagccugaucaaugacaugcccauuaccaacgaucaaaagaaauugaugaguaauaacgugcagaucguaagacagcagucuuauuccaucauguguauuauaaaggaagaggugcuagcuuacgucgugcaacugccucucuacggcguuaucgacacuccaugcuggaaacugcauacaagcccccuuuguaccacgaauaccaaggaaggcucgaacauuugccugacaaggacugaucgggggugguauugugacaaugccggaucuguguccuuuuucccucaggcagagaccugcaaaguccagucaaaccgcguguuuugugauacaaugaauaguuugacucucccaagcgagguaaaccugugcaauguugacaucuucaaccccaaguacgauugcaagauaaugaccuccaaaacagacgugucuagcucagucauuaccaguuuaggugcuaucguguccuguuauggcaagacuaaaugcacggccagcaacaagaaucgagggaucauuaaaacauuuucuaacggaugugauuacgucucaaauaagggcguggacaccguuaguguggguaacacucuguauuacguaaauaagcaagaagggaaaagccuauaugucaagggagagccuaucauuaacuucuacgacccacucguguucccguccgaugaauuugacgcgucuauaucgcagguuaaugagaaaaucaaccagagccuggccuucauuagaaaguccgaugaacuuuugcacaaugugaacgcaggcaaaucaaccacaaauaucaugaucaccacuauuauaaucgucauuaucgugauucugcucagucugaucgcuguaggccuucuguuguacugcaaggccaggugaggacuagugaagggaacacccaaauuuaauucagccuuaagcacaauuaauuaagagugaaacguaauuguacaagcaguuggucacccaccauagggcaugaucaacaccgcaaccuuuccuuuuucccccagugauucugaaaaaccccucuucccuucagcuugcuuagauguuccaaauuuaguaagcuuaaggcggccuacagaagaaaaagaaaaaaaaggccacaaaaguucccucucacuuucaguaaauaaaauaaaagcagcaacagaaauaaagaaauaaaugaaauucaaaaugaaauaaauauuguguugugcagcauuaaaaaaucaauaaaaauuaaaaaugagcaagaucuaaaaaaaaaaaaaaaaaaaaaaaaaaaaaaaaaaaaaaaaaaaaaaaaaaaaaaaaaaaaaaaaugcaucccccccccccccccccccccccccccccccaaaggcucuuuucagagccaccagaauu

SEQ ID NO: 1512 - RNA, 2234 nt, Artificial Sequence
  mRNA product Design f-4 comprising derived and/or modified sequence from HRSV(A2)__F-del_DSCav1 (opt4)
gggagagucccgcagucggcguccagcggcucugcuuguucgugugugugucguugcaggccuuauucaagcuuaccauggagcugcugauccugaaggccaacgccaucaccaccauccugaccgccgugaccuucugcuucgccagcggccagaacaucaccgaggaguucuaccagagcaccugcagcgccgugagcaagggcuaccugagcgcccugagaaccggcugguacaccagcgugaucaccaucgagcugagcaacaucaaggagaacaagugcaacggcaccgacgccaaggugaagcugaucaagcaggagcuggacaaguacaagaacgccgugaccgagcugcagcugcugaugcagagcacccccgccaccaacaacagagccagaagagagcugcccagauucaugaacuacacccugaacaacgccaagaagaccaacgugacccugagcaagaagagaaagagaagauuccugggcuuccugcugggcgugggcagcgccaucgccagcggcguggccgugugcaaggugcugcaccuggagggcgaggugaacaagaucaagagcgcccugcugagcaccaacaaggccguggugagccugagcaacggcgugagcgugcugaccuucaaggugcuggaccugaagaacuacaucgacaagcagcugcugcccauccugaacaagcagagcugcagcaucagcaacaucgagaccgugaucgaguuccagcagaagaacaacagacugcuggagaucaccagagaguucagcgugaacgccggcgugaccacccccgugagcaccuacaugcugaccaacagcgagcugcugagccugaucaacgacaugcccaucaccaacgaccagaagaagcugaugagcaacaacgugcagaucgugagacagcagagcuacagcaucaugugcaucaucaaggaggaggugcuggccuacguggugcagcugccccuguacggcgugaucgacacccccugcuggaagcugcacaccagcccccugugcaccaccaacaccaaggagggcagcaacaucugccugaccagaaccgacagaggcugguacugcgacaacgccggcagcgugagcuucuucccccaggccgagaccugcaaggugcagagcaacagaguguucugcgacaccaugaacagccugacccugcccagcgaggugaaccugugcaacguggacaucuucaaccccaaguacgacugcaagaucaugaccagcaagaccgacgugagcagcagcgugaucaccagccugggcgccaucgugagcugcuacggcaagaccaagugcaccgccagcaacaagaacagaggcaucaucaagaccuucagcaacggcugcgacuacgugagcaacaagggcguggacaccgugagcgugggcaacacccuguacuacgugaacaagcaggagggcaagagccuguacgugaagggcgagcccaucaucaacuucuacgacccccugguguuccccagcgacgaguucgacgccagcaucagccaggugaacgagaagaucaaccagagccuggccuucaucagaaagagcgacgagcugcugcacaacgugaacgccggcaagagcaccaccaacaucaugaucaccaccaucaucaucgugaucaucgugauccugcugagccugaucgccgugggccugcugcuguacugcaaggccagaugaggacuagugaagggaacacccaaauuuaauucagccuuaagcacaauuaauuaagagugaaacguaauuguacaagcaguuggucacccaccauagggcaugaucaacaccgcaaccuuuccuuuuucccccagugauucugaaaaaccccucuucccuucagcuugcuuagauguuccaaauuuaguaagcuuaaggcggccuacagaagaaaaagaaaaaaaaggccacaaaaguucccucucacuuucaguaaauaaaauaaaagcagcaacagaaauaaagaaauaaaugaaauucaaaaugaaauaaauauuguguugugcagcauuaaaaaaucaauaaaaauuaaaaaugagcaagaucuaaaaaaaaaaaaaaaaaaaaaaaaaaaaaaaaaaaaaaaaaaaaaaaaaaaaaaaaaaaaaaaaugcaucccccccccccccccccccccccccccccccaaaggcucuuuucagagccaccagaauu

SEQ ID NO: 1513 - RNA, 2234 nt, Artificial Sequence
  mRNA product Design f-4 comprising derived and/or modified sequence from HRSV(A2)__F-del_DSCav1 (opt5)
gggagagucccgcagucggcguccagcggcucugcuuguucgugugugugucguugcaggccuuauucaagcuuaccauggagcugcucauccugaaggccaacgcuauuaccacaauccuuacggccgugaccuucugcuuugcgagcggccagaauauuacagaagaguucuaccaauccaccuguucugcugucagcaaaggguaucuguccgcccucagaacaggaugguacaccucuguuaucacaauugaacugagcaacaucaaggagaauaaaugcaacggcaccgacgccaaggugaaacuuaucaagcaggaacuggauaaguauaaaaaugcugugacggagcuccagcugcugaugcaguccacccccgccacaaacaaucgggcucgcagagagcucccucgguuuaugaacuacacccugaauaacgccaagaaaacaaaugucacccuuucuaagaaacgcaagagacgguuccugggguuucuccugggagugggcagcgcgauugccuccgggguugcuguguguaagguccuucaccuggaaggagaggugaacaaaaucaagagcgcccuccugucuacgaauaaagcuguugugucccugagcaacggcgucucugugcucacauucaaggugcuggaccuuaaaaauuauauugauaagcaacugcucccgauccugaacaaacaguccugcagcauuucuaacaucgaaaccgucauugaguuucagcagaagaauaaccgccuucuggagaucacaagagaauuuuccguuaaugccggcgugaccacccccgugagcacauacaugcucacgaacuccgagcugcugucucucaucaaugacaugccuauuaccaacgaucaaaagaaacugaugagcaauaacguccagaucgugcggcagcaguccuauagcauuauguguaucauuaaggaagagguucuugcguacgugguccaacugccccucuacggggugaucgacacaccuugcuggaaacugcauaccucuccccuuuguacaaccaauacgaaggaaggauccaacaucugccugacacgcaccgauagaggcugguauugugacaaugccgggagcguuucuuucuucccucaggcugagaccugcaaagugcagagcaaccgggucuuuugugauacaaugaacucccucacccugccgucugaggugaaucugugcaaugucgacauuuucaaccccaaguacgauugcaagaucaugacaagcaaaacggacguguccagcucuguuauuaccucccucggagccaucgugagcuguuauggcaagacaaaaugcaccgcuucuaacaagaaucgcgggauuaucaaaacauuuuccaacggaugugauuacgucagcaauaagggcguggacaccguuuccgugggcaacacgcuguauuacgucaauaagcaagaagggaaaucucuuuaugugaagggagagccuaucauuaacuucuacgacccccugguguucccuagcgaugaauuugacgccuccaucucucagguuaaugagaaaauuaaccagagccucgccuucaucagaaaguccgaugaacugcugcacaaugucaacgcuggcaaaagcaccacaaauauuaugaucaccacaauuaucaucgugauuaucgugauucuucucucucugaucgcggucgggcugcuccuguacugcaaggcccggugaggacuagugaagggaacacccaaauuuaauucagccuuaagcacaauuaauuaagagugaaacguaauuguacaagcaguuggucacccaccauagggcaugaucaacaccgcaaccuuuccuuuuucccccagugauucugaaaaaccccucuucccuucagcuugcuuagauguuccaaauuuaguaagcuuaaggcggccuacagaagaaaaagaaaaaaaaggccacaaaaguucccucucacuuucaguaaauaaaauaaaagcagcaacagaaauaaagaaauaaaugaaauucaaaaugaaauaaauauuguguugugcagcauuaaaaaaucaauaaaaauuaaaaaugagcaagaucuaaaaaaaaaaaaaaaaaaaaaaaaaaaaaaaaaaaaaaaaaaaaaaaaaaaaaaaaaaaaaaaaugcaucccccccccccccccccccccccccccccccaaaggcucuuuucagagccaccagaauu

SEQ ID NO: 1514 - RNA, 2234 nt, Artificial Sequence
  mRNA product Design f-4 comprising derived and/or modified sequence from HRSV(A2)__F-del_DSCav1 (opt6)
gggagagucccgcagucggcguccagcggcucugcuuguucgugugugugucguugcaggccuuauucaagcuuaccauggaacuauuaauauuaaaagcaaaugcuauuaccacaauacuuacugcuguaaccuucugcuuugccucuggccaaaacauaacagaagaauuuuaucaaucaacuugcuccgcuguaagcaaaggcuaccuaucagcauuacgcaccggcugguacacaucaguaauaacaauagaacuauccaacauaaaagaaaauaaaugcaacggaacagacgcaaaaguaaaauuaauaaaacaagaacucgacaaauacaaaaacgcaguaacagaauuacaacuacuaaugcaaaguacuccagccaccaacaacagagcaagaagagaauuaccacgauuuaugaacuacacacuaaacaaugcaaaaaaaacaaacguaacacuaucaaaaaaacguaaacgcagauucuuaggcuuccuccuagguguaggcucagcaaucgccucaggaguggcaguuuguaaaguacuacaccuagaaggagaaguaaacaaaaucaaaucugcccuuuuaucgacaaacaaagcaguaguaucguuauccaauggagucucaguauugacauucaaaguauuagaccuaaaaaauuauauagauaaacaacucuuaccuaucuuaaauaaacaaagcugcucaauaaguaacauagaaaccguaauagaauuucaacaaaaaaacaauagacuccuugagaucacucgagaauuuucaguaaacgcagguguaacaacaccaguaagcacauacaugcuaacaaauagugaacuauuaucucuaauuaacgauaugcccauaaccaacgaucaaaaaaaacucaugaguaacaacguacaaauaguaagacaacaauccuauagcauaaugugcauuauaaaagaagaaguacuagcauauguaguccaacuaccacuauacggcguaauagacacaccaugcuggaaacuacacaccucaccccuaugcacaacaaauacaaaagaaggaucaaacauaugcuuaaccaggacagacagaggcugguacugcgauaacgcaggaucuguuucauucuucccccaagcagaaacaugcaaaguacaaucaaacagaguauuuugugauaccaugaacucacucacauuaccauccgaagucaaccucugcaacguagacauauucaaccccaaauacgacugcaaaauaaugaccucaaaaacagauguaucaucaucaguaaucacaucacuaggagcuaucguaucuuguuauggaaaaacaaaaugcacagcauccaacaaaaacagaggaauuaucaaaacauucucaaauggaugugacuauguaucaaacaaaggaguagacaccguaagcguaggcaauacacuauauuacguaaauaaacaagaaggaaaaucacuauacguaaaaggugaaccaauaauaaacuucuaugacccccuaguauucccaucagaugaauuugacgcaagcauaucacaagucaacgaaaaaauaaaccaaucacuggcauucauucgcaaaucagaugaacuucuccacaacguaaacgcugguaaaagcacuacaaacauaaugauaacaacaaucaucauugucauaauaguuauucuauuaucacuaaucgcaguaggauuacuacuauacuguaaagcgagguaaggacuagugaagggaacacccaaauuuaauucagccuuaagcacaauuaauuaagagugaaacguaauuguacaagcaguuggucacccaccauagggcaugaucaacaccgcaaccuuuccuuuuucccccagugauucugaaaaaccccucuucccuucagcuugcuuagauguuccaaauuuaguaagcuuaaggcggccuacagaagaaaaagaaaaaaaaggccacaaaaguucccucucacuuucaguaaauaaaauaaaagcagcaacagaaauaaagaaauaaaugaaauucaaaaugaaauaaauauuguguugugcagcauuaaaaaaucaauaaaaauuaaaaaugagcaagaucuaaaaaaaaaaaaaaaaaaaaaaaaaaaaaaaaaaaaaaaaaaaaaaaaaaaaaaaaaaaaaaaaugcaucccccccccccccccccccccccccccccccaaaggcucuuuucagagccaccagaauu

SEQ ID NO: 1515 - RNA, 2234 nt, Artificial Sequence
  mRNA product Design f-4 comprising derived and/or modified sequence from HRSV(A2)__F-del_DSCav1 (opt11)
gggagagucccgcagucggcguccagcggcucugcuuguucgugugugugucguugcaggccuuauucaagcuuaccauggagcugcucauccugaaggccaacgccaucaccacaauccugacggcggugaccuucugcuucgccagcggccagaacaucaccgaggaguucuaccaguccacgugcagcgccgucuccaagggguaccucagcgcccugcgaaccggcugguacaccuccgugaucaccaucgagcugucaaacaucaaggagaacaagugcaacgggaccgaugccaagguuaagcucaucaagcaggagcuggacaaguacaagaacgcggucacggagcugcagcuccugaugcaguccacuccggcaaccaacaaccgcgccaggcgcgagcugccccgguucaugaacuacacccucaacaacgccaagaagacgaaugugacccugagcaagaagcgcaagcggcgcuuccugggcuuccuccuaggggugggcuccgccaucgcgagcggcgucgccgugugcaagguguugcaccucgagggggaggucaacaagaucaagagcgcccugcuguccaccaacaaggccgugguaagccucuccaacggcgucagcguucugaccuucaaggugcuggaccucaagaacuauaucgacaagcagcugcugcccauccugaacaagcagagcugcuccaucucaaacaucgaaacggugauugaguuccagcagaagaacaaccggcuccuggaaaucacccgcgaguucagcgugaacgccggggucaccacccccguguccacguacaugcugaccaacagcgagcuccuaucccugaucaacgacaugccgaucaccaacgaccagaagaagcucaugagcaacaacgugcagaucguccggcagcaguccuacagcaucaugugcaucaucaaggaagaggugcuggcguacgugguccagcugccccucuacggcgugaucgacacccccugcuggaagcugcacacgagcccccugugcacaaccaacaccaaggagggguccaacaucugccucacgcgcaccgaccggggcugguacugcgacaacgccggcagcgucuccuucuucccgcaggccgagaccugcaaggugcagagcaaccgcguguucugcgacaccaugaacucccugacgcugcccucugagguaaaccucugcaacgucgacaucuucaaccccaaguacgacugcaagaucaugaccuccaagacagacgugagcuccagcgugaucacaucccugggggccaucgucagcugcuacggcaagacuaaguguacugccagcaacaagaaccgggggaucaucaagaccuucuccaacggcugcgacuacgugagcaacaagggcguggacaccguguccgucgggaacacccuguacuacguuaauaagcaggagggcaagagccucuacgugaaaggggagcccaucauuaacuucuacgacccacugguuuuccccuccgacgaguucgacgcgagcaucucccaggugaacgagaagaucaaccagagccuggccuucauccgcaaguccgacgagcugcuccacaacgugaacgccggcaagagcacgaccaacaucaugaucaccaccaucaucaucgugaucaucgugauucugcugucccucaucgccguggggcugcugcuuuacugcaaggcccggugaggacuagugaagggaacacccaaauuuaauucagccuuaagcacaauuaauuaagagugaaacguaauuguacaagcaguuggucacccaccauagggcaugaucaacaccgcaaccuuuccuuuuucccccagugauucugaaaaaccccucuucccuucagcuugcuuagauguuccaaauuuaguaagcuuaaggcggccuacagaagaaaaagaaaaaaaaggccacaaaaguucccucucacuuucaguaaauaaaauaaaagcagcaacagaaauaaagaaauaaaugaaauucaaaaugaaauaaauauuguguugugcagcauuaaaaaaucaauaaaaauuaaaaaugagcaagaucuaaaaaaaaaaaaaaaaaaaaaaaaaaaaaaaaaaaaaaaaaaaaaaaaaaaaaaaaaaaaaaaaugcaucccccccccccccccccccccccccccccccaaaggcucuuuucagagccaccagaauu

SEQ ID NO: 1516 - RNA, 2010 nt, Artificial Sequence
  mRNA product Design f-5 comprising derived and/or modified sequence from HRSV(A2)__F-del_DSCav1 (opt1)
gggagacuuucccauucuguagcagaauuugguguugccuguggucuuggucccgcggagaagcuuaccauggagcugcucauccugaaggccaacgccaucaccaccauccugacggcggugaccuucugcuucgccagcggccagaacaucaccgaggaguucuaccaguccacgugcagcgccgucuccaagggguaccucagcgcccugcggaccggcugguacaccuccgugaucaccaucgagcugagcaacaucaaggagaacaagugcaacgggaccgacgccaaggugaagcucaucaagcaggagcuggacaaguacaagaacgcggucacggagcugcagcuccugaugcaguccaccccggcaaccaacaaccgcgcccggcgcgagcugccccgguucaugaacuacacccucaacaacgccaagaagacgaacgugacccugagcaagaagcgcaagcggcgcuuccugggcuuccuccugggggugggcuccgccaucgcgagcggcgucgccgugugcaaggugcugcaccucgagggggaggucaacaagaucaagagcgcccugcuguccaccaacaaggccguggugagccucuccaacggcgucagcgugcugaccuucaaggugcuggaccucaagaacuacaucgacaagcagcugcugcccauccugaacaagcagagcugcuccaucagcaacaucgagacggugaucgaguuccagcagaagaacaaccggcuccuggagaucacccgcgaguucagcgugaacgccggggucaccacccccguguccacguacaugcugaccaacagcgagcuccugucccugaucaacgacaugccgaucaccaacgaccagaagaagcucaugagcaacaacgugcagaucguccggcagcaguccuacagcaucaugugcaucaucaaggaggaggugcuggcguacgugguccagcugccccucuacggcgugaucgacacccccugcuggaagcugcacacgagcccccugugcaccaccaacaccaaggagggguccaacaucugccucacgcgcaccgaccggggcugguacugcgacaacgccggcagcgucuccuucuucccgcaggccgagaccugcaaggugcagagcaaccgcguguucugcgacaccaugaacucccugacgcugcccagcgagguaaaccucugcaacgucgacaucuucaaccccaaguacgacugcaagaucaugaccuccaagaccgacgugagcuccagcgugaucaccucccugggggccaucgucagcugcuacggcaagacgaagugcaccgccagcaacaagaaccgggggaucaucaagaccuucuccaacggcugcgacuacgugagcaacaagggcguggacaccguguccgucgggaacacccuguacuacgugaacaagcaggagggcaagagccucuacgugaagggggagcccaucaucaacuucuacgacccgcuggucuuccccuccgacgaguucgacgcgagcaucucccaggugaacgagaagaucaaccagagccuggccuucauccgcaaguccgacgagcugcuccacaacgugaacgccggcaagagcacgaccaacaucaugaucaccaccaucaucaucgucaucaucgugauccugcugucccucaucgccguggggcugcugcucuacugcaaggcccggugaggacuaguacuggcugcaucucccuuuccucuguccuccauccuucucccaggauggugaagggggaccugguacccagugauccccaccccaggauccuaaaucaugacuuaccugcuaauaaaaacucauuggaaaagugagaagaucuaaaaaaaaaaaaaaaaaaaaaaaaaaaaaaaaaaaaaaaaaaaaaaaaaaaaaaaaaaaaaaaaugcaucccccccccccccccccccccccccccccccaaaggcucuuuucagagccaccagaauu

SEQ ID NO: 1517 - RNA, 2010 nt, Artificial Sequence
  mRNA product Design f-5 comprising derived and/or modified sequence from HRSV(A2)__F-del_DSCav1 (opt1)
gggagacuuucccauucuguagcagaauuugguguugccuguggucuuggucccgcggagaagcuuaccauggagcugcucauccugaaggccaacgccaucaccaccauccugacggcggugaccuucugcuucgccagcggccagaacaucaccgaggaguucuaccaguccacgugcagcgccgucuccaagggguaccucagcgcccugcgcaccggcugguacaccuccgugaucaccaucgagcugagcaacaucaaggagaacaagugcaacgggaccgacgccaaggugaagcucaucaagcaggagcuggacaaguacaagaacgcggucacggagcugcagcuccugaugcaguccacccccgccaccaacaaccgggcccgccgggagcugccgcgcuucaugaacuacacccucaacaacgccaagaagacgaacgugacccugagcaagaagcggaagcgccgguuccugggcuuccuccugggggugggcuccgcgaucgccagcggcgucgccgugugcaaggugcugcaccucgagggggaggucaacaagaucaaguccgcccugcugagcaccaacaaggccguggugucccucagcaacggcgucuccgugcugaccuucaaggugcuggaccucaagaacuacaucgacaagcagcugcugcccauccucaacaagcagagcugcuccaucagcaacaucgagacggucaucgaguuccagcagaagaacaaccgccugcuggagaucacccgggaguucuccgugaacgcgggggugaccacccccgucagcacguacaugcucaccaacagcgagcugcugucccucaucaacgacaugcccaucaccaacgaccagaagaagcugaugagcaacaacgugcagaucgugcgccagcaguccuacagcaucaugugcaucaucaaggaggagguccuggccuacguggugcagcucccgcuguacggcgucaucgacacccccugcuggaagcugcacacgagcccccucugcaccaccaacaccaaggaggggagcaacaucugccugacgcggaccgaccgcggcugguacugcgacaacgccggcuccgugagcuucuucccccaggccgagaccugcaagguccaguccaaccggguguucugcgacaccaugaacagccugacgcucccguccgaggugaaccugugcaacgucgacaucuucaaccccaaguacgacugcaagaucaugaccagcaagaccgacguguccagcuccgugaucaccagccugggggccaucgucuccugcuacggcaagacgaagugcaccgcgagcaacaagaaccgcgggaucaucaagaccuucuccaacggcugcgacuacgugagcaacaagggcguggacaccgucagcguggggaacacccucuacuacgugaacaagcaggagggcaagucccuguacgucaagggggagcccaucaucaacuucuacgacccccugguguucccgagcgacgaguucgacgccuccaucagccaggugaacgagaagaucaaccagucccucgccuucauccggaaguccgacgagcugcugcacaacgucaacgccggcaaguccacgaccaacaucaugaucaccaccaucaucaucgugaucaucgugauccugcucagccugaucgccgucgggcugcuccuguacugcaaggcgcgcugaggacuaguacuggcugcaucucccuuuccucuguccuccauccuucucccaggauggugaagggggaccugguacccagugauccccaccccaggauccuaaaucaugacuuaccugcuaauaaaaacucauuggaaaagugagaagaucuaaaaaaaaaaaaaaaaaaaaaaaaaaaaaaaaaaaaaaaaaaaaaaaaaaaaaaaaaaaaaaaaugcaucccccccccccccccccccccccccccccccaaaggcucuuuucagagccaccagaauu

SEQ ID NO: 1518 - RNA, 2010 nt, Artificial Sequence
  mRNA product Design f-5 comprising derived and/or modified sequence from HRSV(A2)__F-del_DSCav1 (opt2)
gggagacuuucccauucuguagcagaauuugguguugccuguggucuuggucccgcggagaagcuuaccauggagcuccucauccucaaggccaacgccaucaccaccauccucaccgccgucaccuucugcuucgccuccggccagaacaucaccgaggaguucuaccaguccaccugcuccgccgucuccaagggcuaccucuccgcccuccgcaccggcugguacaccuccgucaucaccaucgagcucuccaacaucaaggagaacaagugcaacggcaccgacgccaaggucaagcucaucaagcaggagcucgacaaguacaagaacgccgucaccgagcuccagcuccucaugcaguccacccccgccaccaacaaccgcgcccgccgcgagcucccccgcuucaugaacuacacccucaacaacgccaagaagaccaacgucacccucuccaagaagcgcaagcgccgcuuccucggcuuccuccucggcgucggcuccgccaucgccuccggcgucgccgucugcaagguccuccaccucgagggcgaggucaacaagaucaaguccgcccuccucuccaccaacaaggccgucgucucccucuccaacggcgucuccguccucaccuucaagguccucgaccucaagaacuacaucgacaagcagcuccuccccauccucaacaagcaguccugcuccaucuccaacaucgagaccgucaucgaguuccagcagaagaacaaccgccuccucgagaucacccgcgaguucuccgucaacgccggcgucaccacccccgucuccaccuacaugcucaccaacuccgagcuccucucccucaucaacgacaugcccaucaccaacgaccagaagaagcucauguccaacaacguccagaucguccgccagcaguccuacuccaucaugugcaucaucaaggaggagguccucgccuacgucguccagcucccccucuacggcgucaucgacacccccugcuggaagcuccacaccuccccccucugcaccaccaacaccaaggagggcuccaacaucugccucacccgcaccgaccgcggcugguacugcgacaacgccggcuccgucuccuucuucccccaggccgagaccugcaagguccaguccaaccgcgucuucugcgacaccaugaacucccucacccuccccuccgaggucaaccucugcaacgucgacaucuucaaccccaaguacgacugcaagaucaugaccuccaagaccgacgucuccuccuccgucaucaccucccucggcgccaucgucuccugcuacggcaagaccaagugcaccgccuccaacaagaaccgcggcaucaucaagaccuucuccaacggcugcgacuacgucuccaacaagggcgucgacaccgucuccgucggcaacacccucuacuacgucaacaagcaggagggcaagucccucuacgucaagggcgagcccaucaucaacuucuacgacccccucgucuuccccuccgacgaguucgacgccuccaucucccaggucaacgagaagaucaaccagucccucgccuucauccgcaaguccgacgagcuccuccacaacgucaacgccggcaaguccaccaccaacaucaugaucaccaccaucaucaucgucaucaucgucauccuccucucccucaucgccgucggccuccuccucuacugcaaggcccgcugaggacuaguacuggcugcaucucccuuuccucuguccuccauccuucucccaggauggugaagggggaccugguacccagugauccccaccccaggauccuaaaucaugacuuaccugcuaauaaaaacucauuggaaaagugagaagaucuaaaaaaaaaaaaaaaaaaaaaaaaaaaaaaaaaaaaaaaaaaaaaaaaaaaaaaaaaaaaaaaaugcaucccccccccccccccccccccccccccccccaaaggcucuuuucagagccaccagaauu

SEQ ID NO: 1519 - RNA, 2010 nt, Artificial Sequence
  mRNA product Design f-5 comprising derived and/or modified sequence from HRSV(A2)__F-del_DSCav1 (opt3)
gggagacuuucccauucuguagcagaauuugguguugccuguggucuuggucccgcggagaagcuuaccauggagcugcucauccuuaaggccaacgcuauuaccacaauacugacugcagugacguucugcuuugccagcggccagaauaucaccgaagaguucuaccaauccacauguucugcggucucaaaaggguauuugagugcuuuaagaacuggaugguacaccagcguuauuacaaucgaacuguccaacauuaaggagaauaaaugcaacgguaccgacgccaaggugaaacuaaucaagcaggaacucgauaaguauaaaaaugcaguaacugagcugcagcuucugaugcagucuacacccgccaccaacaauagggcucggcgcgaguugccucgauuuaugaacuacacgcucaauaacgcaaagaaaacuaaugugacccugucgaagaaacguaagagaagguuccugggcuuucucuuaggggucggaucagccauagcuagcggcguggccguuuguaaggugcugcaccuugaaggugaggucaacaaaaucaagagugcguugcuguccacaaauaaagcagugguaucucuaagcaacgggguuuccgugcucacuuucaagguccuggaccuuaaaaauuauauugauaagcaacuguugccaauccucaacaaacagucaugcaguauuagcaacaucgaaaccgugauagaguuucagcagaagaauaaccggcuguuagagauuacacgcgaguucucugugaaugccggagucaccacgccgguuuccacuuacaugcugacaaacucagaacuccuuagccugaucaaugacaugcccauuaccaacgaucaaaagaaauugaugaguaauaacgugcagaucguaagacagcagucuuauuccaucauguguauuauaaaggaagaggugcuagcuuacgucgugcaacugccucucuacggcguuaucgacacuccaugcuggaaacugcauacaagcccccuuuguaccacgaauaccaaggaaggcucgaacauuugccugacaaggacugaucgggggugguauugugacaaugccggaucuguguccuuuuucccucaggcagagaccugcaaaguccagucaaaccgcguguuuugugauacaaugaauaguuugacucucccaagcgagguaaaccugugcaauguugacaucuucaaccccaaguacgauugcaagauaaugaccuccaaaacagacgugucuagcucagucauuaccaguuuaggugcuaucguguccuguuauggcaagacuaaaugcacggccagcaacaagaaucgagggaucauuaaaacauuuucuaacggaugugauuacgucucaaauaagggcguggacaccguuaguguggguaacacucuguauuacguaaauaagcaagaagggaaaagccuauaugucaagggagagccuaucauuaacuucuacgacccacucguguucccguccgaugaauuugacgcgucuauaucgcagguuaaugagaaaaucaaccagagccuggccuucauuagaaaguccgaugaacuuuugcacaaugugaacgcaggcaaaucaaccacaaauaucaugaucaccacuauuauaaucgucauuaucgugauucugcucagucugaucgcuguaggccuucuguuguacugcaaggccaggugaggacuaguacuggcugcaucucccuuuccucuguccuccauccuucucccaggauggugaagggggaccugguacccagugauccccaccccaggauccuaaaucaugacuuaccugcuaauaaaaacucauuggaaaagugagaagaucuaaaaaaaaaaaaaaaaaaaaaaaaaaaaaaaaaaaaaaaaaaaaaaaaaaaaaaaaaaaaaaaaugcaucccccccccccccccccccccccccccccccaaaggcucuuuucagagccaccagaauu

SEQ ID NO: 1520 - RNA, 2010 nt, Artificial Sequence
  mRNA product Design f-5 comprising derived and/or modified sequence from HRSV(A2)__F-del_DSCav1 (opt4)
gggagacuuucccauucuguagcagaauuugguguugccuguggucuuggucccgcggagaagcuuaccauggagcugcugauccugaaggccaacgccaucaccaccauccugaccgccgugaccuucugcuucgccagcggccagaacaucaccgaggaguucuaccagagcaccugcagcgccgugagcaagggcuaccugagcgcccugagaaccggcugguacaccagcgugaucaccaucgagcugagcaacaucaaggagaacaagugcaacggcaccgacgccaaggugaagcugaucaagcaggagcuggacaaguacaagaacgccgugaccgagcugcagcugcugaugcagagcacccccgccaccaacaacagagccagaagagagcugcccagauucaugaacuacacccugaacaacgccaagaagaccaacgugacccugagcaagaagagaaagagaagauuccugggcuuccugcugggcgugggcagcgccaucgccagcggcguggccgugugcaaggugcugcaccuggagggcgaggugaacaagaucaagagcgcccugcugagcaccaacaaggccguggugagccugagcaacggcgugagcgugcugaccuucaaggugcuggaccugaagaacuacaucgacaagcagcugcugcccauccugaacaagcagagcugcagcaucagcaacaucgagaccgugaucgaguuccagcagaagaacaacagacugcuggagaucaccagagaguucagcgugaacgccggcgugaccacccccgugagcaccuacaugcugaccaacagcgagcugcugagccugaucaacgacaugcccaucaccaacgaccagaagaagcugaugagcaacaacgugcagaucgugagacagcagagcuacagcaucaugugcaucaucaaggaggaggugcuggccuacguggugcagcugccccuguacggcgugaucgacacccccugcuggaagcugcacaccagcccccugugcaccaccaacaccaaggagggcagcaacaucugccugaccagaaccgacagaggcugguacugcgacaacgccggcagcgugagcuucuucccccaggccgagaccugcaaggugcagagcaacagaguguucugcgacaccaugaacagccugacccugcccagcgaggugaaccugugcaacguggacaucuucaaccccaaguacgacugcaagaucaugaccagcaagaccgacgugagcagcagcgugaucaccagccugggcgccaucgugagcugcuacggcaagaccaagugcaccgccagcaacaagaacagaggcaucaucaagaccuucagcaacggcugcgacuacgugagcaacaagggcguggacaccgugagcgugggcaacacccuguacuacgugaacaagcaggagggcaagagccuguacgugaagggcgagcccaucaucaacuucuacgacccccugguguuccccagcgacgaguucgacgccagcaucagccaggugaacgagaagaucaaccagagccuggccuucaucagaaagagcgacgagcugcugcacaacgugaacgccggcaagagcaccaccaacaucaugaucaccaccaucaucaucgugaucaucgugauccugcugagccugaucgccgugggccugcugcuguacugcaaggccagaugaggacuaguacuggcugcaucucccuuuccucuguccuccauccuucucccaggauggugaagggggaccugguacccagugauccccaccccaggauccuaaaucaugacuuaccugcuaauaaaaacucauuggaaaagugagaagaucuaaaaaaaaaaaaaaaaaaaaaaaaaaaaaaaaaaaaaaaaaaaaaaaaaaaaaaaaaaaaaaaaugcaucccccccccccccccccccccccccccccccaaaggcucuuuucagagccaccagaauu

SEQ ID NO: 1521 - RNA, 2010 nt, Artificial Sequence
  mRNA product Design f-5 comprising derived and/or modified sequence from HRSV(A2)__F-del_DSCav1 (opt5)
gggagacuuucccauucuguagcagaauuugguguugccuguggucuuggucccgcggagaagcuuaccauggagcugcucauccugaaggccaacgcuauuaccacaauccuuacggccgugaccuucugcuuugcgagcggccagaauauuacagaagaguucuaccaauccaccuguucugcugucagcaaaggguaucuguccgcccucagaacaggaugguacaccucuguuaucacaauugaacugagcaacaucaaggagaauaaaugcaacggcaccgacgccaaggugaaacuuaucaagcaggaacuggauaaguauaaaaaugcugugacggagcuccagcugcugaugcaguccacccccgccacaaacaaucgggcucgcagagagcucccucgguuuaugaacuacacccugaauaacgccaagaaaacaaaugucacccuuucuaagaaacgcaagagacgguuccugggguuucuccugggagugggcagcgcgauugccuccgggguugcuguguguaagguccuucaccuggaaggagaggugaacaaaaucaagagcgcccuccugucuacgaauaaagcuguugugucccugagcaacggcgucucugugcucacauucaaggugcuggaccuuaaaaauuauauugauaagcaacugcucccgauccugaacaaacaguccugcagcauuucuaacaucgaaaccgucauugaguuucagcagaagaauaaccgccuucuggagaucacaagagaauuuuccguuaaugccggcgugaccacccccgugagcacauacaugcucacgaacuccgagcugcugucucucaucaaugacaugccuauuaccaacgaucaaaagaaacugaugagcaauaacguccagaucgugcggcagcaguccuauagcauuauguguaucauuaaggaagagguucuugcguacgugguccaacugccccucuacggggugaucgacacaccuugcuggaaacugcauaccucuccccuuuguacaaccaauacgaaggaaggauccaacaucugccugacacgcaccgauagaggcugguauugugacaaugccgggagcguuucuuucuucccucaggcugagaccugcaaagugcagagcaaccgggucuuuugugauacaaugaacucccucacccugccgucugaggugaaucugugcaaugucgacauuuucaaccccaaguacgauugcaagaucaugacaagcaaaacggacguguccagcucuguuauuaccucccucggagccaucgugagcuguuauggcaagacaaaaugcaccgcuucuaacaagaaucgcgggauuaucaaaacauuuuccaacggaugugauuacgucagcaauaagggcguggacaccguuuccgugggcaacacgcuguauuacgucaauaagcaagaagggaaaucucuuuaugugaagggagagccuaucauuaacuucuacgacccccugguguucccuagcgaugaauuugacgccuccaucucucagguuaaugagaaaauuaaccagagccucgccuucaucagaaaguccgaugaacugcugcacaaugucaacgcuggcaaaagcaccacaaauauuaugaucaccacaauuaucaucgugauuaucgugauucuucucucucugaucgcggucgggcugcuccuguacugcaaggcccggugaggacuaguacuggcugcaucucccuuuccucuguccuccauccuucucccaggauggugaagggggaccugguacccagugauccccaccccaggauccuaaaucaugacuuaccugcuaauaaaaacucauuggaaaagugagaagaucuaaaaaaaaaaaaaaaaaaaaaaaaaaaaaaaaaaaaaaaaaaaaaaaaaaaaaaaaaaaaaaaaugcaucccccccccccccccccccccccccccccccaaaggcucuuuucagagccaccagaauu

SEQ ID NO: 1522 - RNA, 2010 nt, Artificial Sequence
  mRNA product Design f-5 comprising derived and/or modified sequence from HRSV(A2)__F-del_DSCav1 (opt6)
gggagacuuucccauucuguagcagaauuugguguugccuguggucuuggucccgcggagaagcuuaccauggaacuauuaauauuaaaagcaaaugcuauuaccacaauacuuacugcuguaaccuucugcuuugccucuggccaaaacauaacagaagaauuuuaucaaucaacuugcuccgcuguaagcaaaggcuaccuaucagcauuacgcaccggcugguacacaucaguaauaacaauagaacuauccaacauaaaagaaaauaaaugcaacggaacagacgcaaaaguaaaauuaauaaaacaagaacucgacaaauacaaaaacgcaguaacagaauuacaacuacuaaugcaaaguacuccagccaccaacaacagagcaagaagagaauuaccacgauuuaugaacuacacacuaaacaaugcaaaaaaaacaaacguaacacuaucaaaaaaacguaaacgcagauucuuaggcuuccuccuagguguaggcucagcaaucgccucaggaguggcaguuuguaaaguacuacaccuagaaggagaaguaaacaaaaucaaaucugcccuuuuaucgacaaacaaagcaguaguaucguuauccaauggagucucaguauugacauucaaaguauuagaccuaaaaaauuauauagauaaacaacucuuaccuaucuuaaauaaacaaagcugcucaauaaguaacauagaaaccguaauagaauuucaacaaaaaaacaauagacuccuugagaucacucgagaauuuucaguaaacgcagguguaacaacaccaguaagcacauacaugcuaacaaauagugaacuauuaucucuaauuaacgauaugcccauaaccaacgaucaaaaaaaacucaugaguaacaacguacaaauaguaagacaacaauccuauagcauaaugugcauuauaaaagaagaaguacuagcauauguaguccaacuaccacuauacggcguaauagacacaccaugcuggaaacuacacaccucaccccuaugcacaacaaauacaaaagaaggaucaaacauaugcuuaaccaggacagacagaggcugguacugcgauaacgcaggaucuguuucauucuucccccaagcagaaacaugcaaaguacaaucaaacagaguauuuugugauaccaugaacucacucacauuaccauccgaagucaaccucugcaacguagacauauucaaccccaaauacgacugcaaaauaaugaccucaaaaacagauguaucaucaucaguaaucacaucacuaggagcuaucguaucuuguuauggaaaaacaaaaugcacagcauccaacaaaaacagaggaauuaucaaaacauucucaaauggaugugacuauguaucaaacaaaggaguagacaccguaagcguaggcaauacacuauauuacguaaauaaacaagaaggaaaaucacuauacguaaaaggugaaccaauaauaaacuucuaugacccccuaguauucccaucagaugaauuugacgcaagcauaucacaagucaacgaaaaaauaaaccaaucacuggcauucauucgcaaaucagaugaacuucuccacaacguaaacgcugguaaaagcacuacaaacauaaugauaacaacaaucaucauugucauaauaguuauucuauuaucacuaaucgcaguaggauuacuacuauacuguaaagcgagguaaggacuaguacuggcugcaucucccuuuccucuguccuccauccuucucccaggauggugaagggggaccugguacccagugauccccaccccaggauccuaaaucaugacuuaccugcuaauaaaaacucauuggaaaagugagaagaucuaaaaaaaaaaaaaaaaaaaaaaaaaaaaaaaaaaaaaaaaaaaaaaaaaaaaaaaaaaaaaaaaugcaucccccccccccccccccccccccccccccccaaaggcucuuuucagagccaccagaauu

SEQ ID NO: 1523 - RNA, 2010 nt, Artificial Sequence
  mRNA product Design f-5 comprising derived and/or modified sequence from HRSV(A2)__F-del_DSCav1 (opt11)
gggagacuuucccauucuguagcagaauuugguguugccuguggucuuggucccgcggagaagcuuaccauggagcugcucauccugaaggccaacgccaucaccacaauccugacggcggugaccuucugcuucgccagcggccagaacaucaccgaggaguucuaccaguccacgugcagcgccgucuccaagggguaccucagcgcccugcgaaccggcugguacaccuccgugaucaccaucgagcugucaaacaucaaggagaacaagugcaacgggaccgaugccaagguuaagcucaucaagcaggagcuggacaaguacaagaacgcggucacggagcugcagcuccugaugcaguccacuccggcaaccaacaaccgcgccaggcgcgagcugccccgguucaugaacuacacccucaacaacgccaagaagacgaaugugacccugagcaagaagcgcaagcggcgcuuccugggcuuccuccuaggggugggcuccgccaucgcgagcggcgucgccgugugcaagguguugcaccucgagggggaggucaacaagaucaagagcgcccugcuguccaccaacaaggccgugguaagccucuccaacggcgucagcguucugaccuucaaggugcuggaccucaagaacuauaucgacaagcagcugcugcccauccugaacaagcagagcugcuccaucucaaacaucgaaacggugauugaguuccagcagaagaacaaccggcuccuggaaaucacccgcgaguucagcgugaacgccggggucaccacccccguguccacguacaugcugaccaacagcgagcuccuaucccugaucaacgacaugccgaucaccaacgaccagaagaagcucaugagcaacaacgugcagaucguccggcagcaguccuacagcaucaugugcaucaucaaggaagaggugcuggcguacgugguccagcugccccucuacggcgugaucgacacccccugcuggaagcugcacacgagcccccugugcacaaccaacaccaaggagggguccaacaucugccucacgcgcaccgaccggggcugguacugcgacaacgccggcagcgucuccuucuucccgcaggccgagaccugcaaggugcagagcaaccgcguguucugcgacaccaugaacucccugacgcugcccucugagguaaaccucugcaacgucgacaucuucaaccccaaguacgacugcaagaucaugaccuccaagacagacgugagcuccagcgugaucacaucccugggggccaucgucagcugcuacggcaagacuaaguguacugccagcaacaagaaccgggggaucaucaagaccuucuccaacggcugcgacuacgugagcaacaagggcguggacaccguguccgucgggaacacccuguacuacguuaauaagcaggagggcaagagccucuacgugaaaggggagcccaucauuaacuucuacgacccacugguuuuccccuccgacgaguucgacgcgagcaucucccaggugaacgagaagaucaaccagagccuggccuucauccgcaaguccgacgagcugcuccacaacgugaacgccggcaagagcacgaccaacaucaugaucaccaccaucaucaucgugaucaucgugauucugcugucccucaucgccguggggcugcugcuuuacugcaaggcccggugaggacuaguacuggcugcaucucccuuuccucuguccuccauccuucucccaggauggugaagggggaccugguacccagugauccccaccccaggauccuaaaucaugacuuaccugcuaauaaaaacucauuggaaaagugagaagaucuaaaaaaaaaaaaaaaaaaaaaaaaaaaaaaaaaaaaaaaaaaaaaaaaaaaaaaaaaaaaaaaaugcaucccccccccccccccccccccccccccccccaaaggcucuuuucagagccaccagaauu

SEQ ID NO: 1524 - RNA, 2006 nt, Artificial Sequence
  mRNA product Design g-1 comprising derived and/or modified sequence from HRSV(A2)__F-del_DSCav1 (opt1)
gggagacuuucccauucuguagcagaauuugguguugccuguggucuuggucccgcggagaagcuuaccauggagcugcucauccugaaggccaacgccaucaccaccauccugacggcggugaccuucugcuucgccagcggccagaacaucaccgaggaguucuaccaguccacgugcagcgccgucuccaagggguaccucagcgcccugcggaccggcugguacaccuccgugaucaccaucgagcugagcaacaucaaggagaacaagugcaacgggaccgacgccaaggugaagcucaucaagcaggagcuggacaaguacaagaacgcggucacggagcugcagcuccugaugcaguccaccccggcaaccaacaaccgcgcccggcgcgagcugccccgguucaugaacuacacccucaacaacgccaagaagacgaacgugacccugagcaagaagcgcaagcggcgcuuccugggcuuccuccugggggugggcuccgccaucgcgagcggcgucgccgugugcaaggugcugcaccucgagggggaggucaacaagaucaagagcgcccugcuguccaccaacaaggccguggugagccucuccaacggcgucagcgugcugaccuucaaggugcuggaccucaagaacuacaucgacaagcagcugcugcccauccugaacaagcagagcugcuccaucagcaacaucgagacggugaucgaguuccagcagaagaacaaccggcuccuggagaucacccgcgaguucagcgugaacgccggggucaccacccccguguccacguacaugcugaccaacagcgagcuccugucccugaucaacgacaugccgaucaccaacgaccagaagaagcucaugagcaacaacgugcagaucguccggcagcaguccuacagcaucaugugcaucaucaaggaggaggugcuggcguacgugguccagcugccccucuacggcgugaucgacacccccugcuggaagcugcacacgagcccccugugcaccaccaacaccaaggagggguccaacaucugccucacgcgcaccgaccggggcugguacugcgacaacgccggcagcgucuccuucuucccgcaggccgagaccugcaaggugcagagcaaccgcguguucugcgacaccaugaacucccugacgcugcccagcgagguaaaccucugcaacgucgacaucuucaaccccaaguacgacugcaagaucaugaccuccaagaccgacgugagcuccagcgugaucaccucccugggggccaucgucagcugcuacggcaagacgaagugcaccgccagcaacaagaaccgggggaucaucaagaccuucuccaacggcugcgacuacgugagcaacaagggcguggacaccguguccgucgggaacacccuguacuacgugaacaagcaggagggcaagagccucuacgugaagggggagcccaucaucaacuucuacgacccgcuggucuuccccuccgacgaguucgacgcgagcaucucccaggugaacgagaagaucaaccagagccuggccuucauccgcaaguccgacgagcugcuccacaacgugaacgccggcaagagcacgaccaacaucaugaucaccaccaucaucaucgucaucaucgugauccugcugucccucaucgccguggggcugcugcucuacugcaaggcccggugaggacuaguggaagcauuuuccuggcugauuaaaagaaauuacucagcuauggucaucuguuccuguuagaaggcuaugcagcauauuauauacuaugcgcauguuaugaaaugcauaauaaaaaauuuuaaaaaaucuaaaagaucuaaaaaaaaaaaaaaaaaaaaaaaaaaaaaaaaaaaaaaaaaaaaaaaaaaaaaaaaaaaaaaaaugcaucccccccccccccccccccccccccccccccaaaggcucuuuucagagccaccagaauu

SEQ ID NO: 1525 - RNA, 2006 nt, Artificial Sequence
  mRNA product Design g-1 comprising derived and/or modified sequence from HRSV(A2)__F-del_DSCav1 (opt1)
gggagacuuucccauucuguagcagaauuugguguugccuguggucuuggucccgcggagaagcuuaccauggagcugcucauccugaaggccaacgccaucaccaccauccugacggcggugaccuucugcuucgccagcggccagaacaucaccgaggaguucuaccaguccacgugcagcgccgucuccaagggguaccucagcgcccugcgcaccggcugguacaccuccgugaucaccaucgagcugagcaacaucaaggagaacaagugcaacgggaccgacgccaaggugaagcucaucaagcaggagcuggacaaguacaagaacgcggucacggagcugcagcuccugaugcaguccacccccgccaccaacaaccgggcccgccgggagcugccgcgcuucaugaacuacacccucaacaacgccaagaagacgaacgugacccugagcaagaagcggaagcgccgguuccugggcuuccuccugggggugggcuccgcgaucgccagcggcgucgccgugugcaaggugcugcaccucgagggggaggucaacaagaucaaguccgcccugcugagcaccaacaaggccguggugucccucagcaacggcgucuccgugcugaccuucaaggugcuggaccucaagaacuacaucgacaagcagcugcugcccauccucaacaagcagagcugcuccaucagcaacaucgagacggucaucgaguuccagcagaagaacaaccgccugcuggagaucacccgggaguucuccgugaacgcgggggugaccacccccgucagcacguacaugcucaccaacagcgagcugcugucccucaucaacgacaugcccaucaccaacgaccagaagaagcugaugagcaacaacgugcagaucgugcgccagcaguccuacagcaucaugugcaucaucaaggaggagguccuggccuacguggugcagcucccgcuguacggcgucaucgacacccccugcuggaagcugcacacgagcccccucugcaccaccaacaccaaggaggggagcaacaucugccugacgcggaccgaccgcggcugguacugcgacaacgccggcuccgugagcuucuucccccaggccgagaccugcaagguccaguccaaccggguguucugcgacaccaugaacagccugacgcucccguccgaggugaaccugugcaacgucgacaucuucaaccccaaguacgacugcaagaucaugaccagcaagaccgacguguccagcuccgugaucaccagccugggggccaucgucuccugcuacggcaagacgaagugcaccgcgagcaacaagaaccgcgggaucaucaagaccuucuccaacggcugcgacuacgugagcaacaagggcguggacaccgucagcguggggaacacccucuacuacgugaacaagcaggagggcaagucccuguacgucaagggggagcccaucaucaacuucuacgacccccugguguucccgagcgacgaguucgacgccuccaucagccaggugaacgagaagaucaaccagucccucgccuucauccggaaguccgacgagcugcugcacaacgucaacgccggcaaguccacgaccaacaucaugaucaccaccaucaucaucgugaucaucgugauccugcucagccugaucgccgucgggcugcuccuguacugcaaggcgcgcugaggacuaguggaagcauuuuccuggcugauuaaaagaaauuacucagcuauggucaucuguuccuguuagaaggcuaugcagcauauuauauacuaugcgcauguuaugaaaugcauaauaaaaaauuuuaaaaaaucuaaaagaucuaaaaaaaaaaaaaaaaaaaaaaaaaaaaaaaaaaaaaaaaaaaaaaaaaaaaaaaaaaaaaaaaugcaucccccccccccccccccccccccccccccccaaaggcucuuuucagagccaccagaauu

SEQ ID NO: 1526 - RNA, 2006 nt, Artificial Sequence
  mRNA product Design g-1 comprising derived and/or modified sequence from HRSV(A2)__F-del_DSCav1 (opt2)
gggagacuuucccauucuguagcagaauuugguguugccuguggucuuggucccgcggagaagcuuaccauggagcuccucauccucaaggccaacgccaucaccaccauccucaccgccgucaccuucugcuucgccuccggccagaacaucaccgaggaguucuaccaguccaccugcuccgccgucuccaagggcuaccucuccgcccuccgcaccggcugguacaccuccgucaucaccaucgagcucuccaacaucaaggagaacaagugcaacggcaccgacgccaaggucaagcucaucaagcaggagcucgacaaguacaagaacgccgucaccgagcuccagcuccucaugcaguccacccccgccaccaacaaccgcgcccgccgcgagcucccccgcuucaugaacuacacccucaacaacgccaagaagaccaacgucacccucuccaagaagcgcaagcgccgcuuccucggcuuccuccucggcgucggcuccgccaucgccuccggcgucgccgucugcaagguccuccaccucgagggcgaggucaacaagaucaaguccgcccuccucuccaccaacaaggccgucgucucccucuccaacggcgucuccguccucaccuucaagguccucgaccucaagaacuacaucgacaagcagcuccuccccauccucaacaagcaguccugcuccaucuccaacaucgagaccgucaucgaguuccagcagaagaacaaccgccuccucgagaucacccgcgaguucuccgucaacgccggcgucaccacccccgucuccaccuacaugcucaccaacuccgagcuccucucccucaucaacgacaugcccaucaccaacgaccagaagaagcucauguccaacaacguccagaucguccgccagcaguccuacuccaucaugugcaucaucaaggaggagguccucgccuacgucguccagcucccccucuacggcgucaucgacacccccugcuggaagcuccacaccuccccccucugcaccaccaacaccaaggagggcuccaacaucugccucacccgcaccgaccgcggcugguacugcgacaacgccggcuccgucuccuucuucccccaggccgagaccugcaagguccaguccaaccgcgucuucugcgacaccaugaacucccucacccuccccuccgaggucaaccucugcaacgucgacaucuucaaccccaaguacgacugcaagaucaugaccuccaagaccgacgucuccuccuccgucaucaccucccucggcgccaucgucuccugcuacggcaagaccaagugcaccgccuccaacaagaaccgcggcaucaucaagaccuucuccaacggcugcgacuacgucuccaacaagggcgucgacaccgucuccgucggcaacacccucuacuacgucaacaagcaggagggcaagucccucuacgucaagggcgagcccaucaucaacuucuacgacccccucgucuuccccuccgacgaguucgacgccuccaucucccaggucaacgagaagaucaaccagucccucgccuucauccgcaaguccgacgagcuccuccacaacgucaacgccggcaaguccaccaccaacaucaugaucaccaccaucaucaucgucaucaucgucauccuccucucccucaucgccgucggccuccuccucuacugcaaggcccgcugaggacuaguggaagcauuuuccuggcugauuaaaagaaauuacucagcuauggucaucuguuccuguuagaaggcuaugcagcauauuauauacuaugcgcauguuaugaaaugcauaauaaaaaauuuuaaaaaaucuaaaagaucuaaaaaaaaaaaaaaaaaaaaaaaaaaaaaaaaaaaaaaaaaaaaaaaaaaaaaaaaaaaaaaaaugcaucccccccccccccccccccccccccccccccaaaggcucuuuucagagccaccagaauu

SEQ ID NO: 1527 - RNA, 2006 nt, Artificial Sequence
  mRNA product Design g-1 comprising derived and/or modified sequence from HRSV(A2)__F-del_DSCav1 (opt3)
gggagacuuucccauucuguagcagaauuugguguugccuguggucuuggucccgcggagaagcuuaccauggagcugcucauccuuaaggccaacgcuauuaccacaauacugacugcagugacguucugcuuugccagcggccagaauaucaccgaagaguucuaccaauccacauguucugcggucucaaaaggguauuugagugcuuuaagaacuggaugguacaccagcguuauuacaaucgaacuguccaacauuaaggagaauaaaugcaacgguaccgacgccaaggugaaacuaaucaagcaggaacucgauaaguauaaaaaugcaguaacugagcugcagcuucugaugcagucuacacccgccaccaacaauagggcucggcgcgaguugccucgauuuaugaacuacacgcucaauaacgcaaagaaaacuaaugugacccugucgaagaaacguaagagaagguuccugggcuuucucuuaggggucggaucagccauagcuagcggcguggccguuuguaaggugcugcaccuugaaggugaggucaacaaaaucaagagugcguugcuguccacaaauaaagcagugguaucucuaagcaacgggguuuccgugcucacuuucaagguccuggaccuuaaaaauuauauugauaagcaacuguugccaauccucaacaaacagucaugcaguauuagcaacaucgaaaccgugauagaguuucagcagaagaauaaccggcuguuagagauuacacgcgaguucucugugaaugccggagucaccacgccgguuuccacuuacaugcugacaaacucagaacuccuuagccugaucaaugacaugcccauuaccaacgaucaaaagaaauugaugaguaauaacgugcagaucguaagacagcagucuuauuccaucauguguauuauaaaggaagaggugcuagcuuacgucgugcaacugccucucuacggcguuaucgacacuccaugcuggaaacugcauacaagcccccuuuguaccacgaauaccaaggaaggcucgaacauuugccugacaaggacugaucgggggugguauugugacaaugccggaucuguguccuuuuucccucaggcagagaccugcaaaguccagucaaaccgcguguuuugugauacaaugaauaguuugacucucccaagcgagguaaaccugugcaauguugacaucuucaaccccaaguacgauugcaagauaaugaccuccaaaacagacgugucuagcucagucauuaccaguuuaggugcuaucguguccuguuauggcaagacuaaaugcacggccagcaacaagaaucgagggaucauuaaaacauuuucuaacggaugugauuacgucucaaauaagggcguggacaccguuaguguggguaacacucuguauuacguaaauaagcaagaagggaaaagccuauaugucaagggagagccuaucauuaacuucuacgacccacucguguucccguccgaugaauuugacgcgucuauaucgcagguuaaugagaaaaucaaccagagccuggccuucauuagaaaguccgaugaacuuuugcacaaugugaacgcaggcaaaucaaccacaaauaucaugaucaccacuauuauaaucgucauuaucgugauucugcucagucugaucgcuguaggccuucuguuguacugcaaggccaggugaggacuaguggaagcauuuuccuggcugauuaaaagaaauuacucagcuauggucaucuguuccuguuagaaggcuaugcagcauauuauauacuaugcgcauguuaugaaaugcauaauaaaaaauuuuaaaaaaucuaaaagaucuaaaaaaaaaaaaaaaaaaaaaaaaaaaaaaaaaaaaaaaaaaaaaaaaaaaaaaaaaaaaaaaaugcaucccccccccccccccccccccccccccccccaaaggcucuuuucagagccaccagaauu

SEQ ID NO: 1528 - RNA, 2006 nt, Artificial Sequence
  mRNA product Design g-1 comprising derived and/or modified sequence from HRSV(A2)__F-del_DSCav1 (opt4)
gggagacuuucccauucuguagcagaauuugguguugccuguggucuuggucccgcggagaagcuuaccauggagcugcugauccugaaggccaacgccaucaccaccauccugaccgccgugaccuucugcuucgccagcggccagaacaucaccgaggaguucuaccagagcaccugcagcgccgugagcaagggcuaccugagcgcccugagaaccggcugguacaccagcgugaucaccaucgagcugagcaacaucaaggagaacaagugcaacggcaccgacgccaaggugaagcugaucaagcaggagcuggacaaguacaagaacgccgugaccgagcugcagcugcugaugcagagcacccccgccaccaacaacagagccagaagagagcugcccagauucaugaacuacacccugaacaacgccaagaagaccaacgugacccugagcaagaagagaaagagaagauuccugggcuuccugcugggcgugggcagcgccaucgccagcggcguggccgugugcaaggugcugcaccuggagggcgaggugaacaagaucaagagcgcccugcugagcaccaacaaggccguggugagccugagcaacggcgugagcgugcugaccuucaaggugcuggaccugaagaacuacaucgacaagcagcugcugcccauccugaacaagcagagcugcagcaucagcaacaucgagaccgugaucgaguuccagcagaagaacaacagacugcuggagaucaccagagaguucagcgugaacgccggcgugaccacccccgugagcaccuacaugcugaccaacagcgagcugcugagccugaucaacgacaugcccaucaccaacgaccagaagaagcugaugagcaacaacgugcagaucgugagacagcagagcuacagcaucaugugcaucaucaaggaggaggugcuggccuacguggugcagcugccccuguacggcgugaucgacacccccugcuggaagcugcacaccagcccccugugcaccaccaacaccaaggagggcagcaacaucugccugaccagaaccgacagaggcugguacugcgacaacgccggcagcgugagcuucuucccccaggccgagaccugcaaggugcagagcaacagaguguucugcgacaccaugaacagccugacccugcccagcgaggugaaccugugcaacguggacaucuucaaccccaaguacgacugcaagaucaugaccagcaagaccgacgugagcagcagcgugaucaccagccugggcgccaucgugagcugcuacggcaagaccaagugcaccgccagcaacaagaacagaggcaucaucaagaccuucagcaacggcugcgacuacgugagcaacaagggcguggacaccgugagcgugggcaacacccuguacuacgugaacaagcaggagggcaagagccuguacgugaagggcgagcccaucaucaacuucuacgacccccugguguuccccagcgacgaguucgacgccagcaucagccaggugaacgagaagaucaaccagagccuggccuucaucagaaagagcgacgagcugcugcacaacgugaacgccggcaagagcaccaccaacaucaugaucaccaccaucaucaucgugaucaucgugauccugcugagccugaucgccgugggccugcugcuguacugcaaggccagaugaggacuaguggaagcauuuuccuggcugauuaaaagaaauuacucagcuauggucaucuguuccuguuagaaggcuaugcagcauauuauauacuaugcgcauguuaugaaaugcauaauaaaaaauuuuaaaaaaucuaaaagaucuaaaaaaaaaaaaaaaaaaaaaaaaaaaaaaaaaaaaaaaaaaaaaaaaaaaaaaaaaaaaaaaaugcaucccccccccccccccccccccccccccccccaaaggcucuuuucagagccaccagaauu

SEQ ID NO: 1529 - RNA, 2006 nt, Artificial Sequence
  mRNA product Design g-1 comprising derived and/or modified sequence from HRSV(A2)__F-del_DSCav1 (opt5)
gggagacuuucccauucuguagcagaauuugguguugccuguggucuuggucccgcggagaagcuuaccauggagcugcucauccugaaggccaacgcuauuaccacaauccuuacggccgugaccuucugcuuugcgagcggccagaauauuacagaagaguucuaccaauccaccuguucugcugucagcaaaggguaucuguccgcccucagaacaggaugguacaccucuguuaucacaauugaacugagcaacaucaaggagaauaaaugcaacggcaccgacgccaaggugaaacuuaucaagcaggaacuggauaaguauaaaaaugcugugacggagcuccagcugcugaugcaguccacccccgccacaaacaaucgggcucgcagagagcucccucgguuuaugaacuacacccugaauaacgccaagaaaacaaaugucacccuuucuaagaaacgcaagagacgguuccugggguuucuccugggagugggcagcgcgauugccuccgggguugcuguguguaagguccuucaccuggaaggagaggugaacaaaaucaagagcgcccuccugucuacgaauaaagcuguugugucccugagcaacggcgucucugugcucacauucaaggugcuggaccuuaaaaauuauauugauaagcaacugcucccgauccugaacaaacaguccugcagcauuucuaacaucgaaaccgucauugaguuucagcagaagaauaaccgccuucuggagaucacaagagaauuuuccguuaaugccggcgugaccacccccgugagcacauacaugcucacgaacuccgagcugcugucucucaucaaugacaugccuauuaccaacgaucaaaagaaacugaugagcaauaacguccagaucgugcggcagcaguccuauagcauuauguguaucauuaaggaagagguucuugcguacgugguccaacugccccucuacggggugaucgacacaccuugcuggaaacugcauaccucuccccuuuguacaaccaauacgaaggaaggauccaacaucugccugacacgcaccgauagaggcugguauugugacaaugccgggagcguuucuuucuucccucaggcugagaccugcaaagugcagagcaaccgggucuuuugugauacaaugaacucccucacccugccgucugaggugaaucugugcaaugucgacauuuucaaccccaaguacgauugcaagaucaugacaagcaaaacggacguguccagcucuguuauuaccucccucggagccaucgugagcuguuauggcaagacaaaaugcaccgcuucuaacaagaaucgcgggauuaucaaaacauuuuccaacggaugugauuacgucagcaauaagggcguggacaccguuuccgugggcaacacgcuguauuacgucaauaagcaagaagggaaaucucuuuaugugaagggagagccuaucauuaacuucuacgacccccugguguucccuagcgaugaauuugacgccuccaucucucagguuaaugagaaaauuaaccagagccucgccuucaucagaaaguccgaugaacugcugcacaaugucaacgcuggcaaaagcaccacaaauauuaugaucaccacaauuaucaucgugauuaucgugauucuucucucucugaucgcggucgggcugcuccuguacugcaaggcccggugaggacuaguggaagcauuuuccuggcugauuaaaagaaauuacucagcuauggucaucuguuccuguuagaaggcuaugcagcauauuauauacuaugcgcauguuaugaaaugcauaauaaaaaauuuuaaaaaaucuaaaagaucuaaaaaaaaaaaaaaaaaaaaaaaaaaaaaaaaaaaaaaaaaaaaaaaaaaaaaaaaaaaaaaaaugcaucccccccccccccccccccccccccccccccaaaggcucuuuucagagccaccagaauu

SEQ ID NO: 1530 - RNA, 2006 nt, Artificial Sequence
  mRNA product Design g-1 comprising derived and/or modified sequence from HRSV(A2)__F-del_DSCav1 (opt6)
gggagacuuucccauucuguagcagaauuugguguugccuguggucuuggucccgcggagaagcuuaccauggaacuauuaauauuaaaagcaaaugcuauuaccacaauacuuacugcuguaaccuucugcuuugccucuggccaaaacauaacagaagaauuuuaucaaucaacuugcuccgcuguaagcaaaggcuaccuaucagcauuacgcaccggcugguacacaucaguaauaacaauagaacuauccaacauaaaagaaaauaaaugcaacggaacagacgcaaaaguaaaauuaauaaaacaagaacucgacaaauacaaaaacgcaguaacagaauuacaacuacuaaugcaaaguacuccagccaccaacaacagagcaagaagagaauuaccacgauuuaugaacuacacacuaaacaaugcaaaaaaaacaaacguaacacuaucaaaaaaacguaaacgcagauucuuaggcuuccuccuagguguaggcucagcaaucgccucaggaguggcaguuuguaaaguacuacaccuagaaggagaaguaaacaaaaucaaaucugcccuuuuaucgacaaacaaagcaguaguaucguuauccaauggagucucaguauugacauucaaaguauuagaccuaaaaaauuauauagauaaacaacucuuaccuaucuuaaauaaacaaagcugcucaauaaguaacauagaaaccguaauagaauuucaacaaaaaaacaauagacuccuugagaucacucgagaauuuucaguaaacgcagguguaacaacaccaguaagcacauacaugcuaacaaauagugaacuauuaucucuaauuaacgauaugcccauaaccaacgaucaaaaaaaacucaugaguaacaacguacaaauaguaagacaacaauccuauagcauaaugugcauuauaaaagaagaaguacuagcauauguaguccaacuaccacuauacggcguaauagacacaccaugcuggaaacuacacaccucaccccuaugcacaacaaauacaaaagaaggaucaaacauaugcuuaaccaggacagacagaggcugguacugcgauaacgcaggaucuguuucauucuucccccaagcagaaacaugcaaaguacaaucaaacagaguauuuugugauaccaugaacucacucacauuaccauccgaagucaaccucugcaacguagacauauucaaccccaaauacgacugcaaaauaaugaccucaaaaacagauguaucaucaucaguaaucacaucacuaggagcuaucguaucuuguuauggaaaaacaaaaugcacagcauccaacaaaaacagaggaauuaucaaaacauucucaaauggaugugacuauguaucaaacaaaggaguagacaccguaagcguaggcaauacacuauauuacguaaauaaacaagaaggaaaaucacuauacguaaaaggugaaccaauaauaaacuucuaugacccccuaguauucccaucagaugaauuugacgcaagcauaucacaagucaacgaaaaaauaaaccaaucacuggcauucauucgcaaaucagaugaacuucuccacaacguaaacgcugguaaaagcacuacaaacauaaugauaacaacaaucaucauugucauaauaguuauucuauuaucacuaaucgcaguaggauuacuacuauacuguaaagcgagguaaggacuaguggaagcauuuuccuggcugauuaaaagaaauuacucagcuauggucaucuguuccuguuagaaggcuaugcagcauauuauauacuaugcgcauguuaugaaaugcauaauaaaaaauuuuaaaaaaucuaaaagaucuaaaaaaaaaaaaaaaaaaaaaaaaaaaaaaaaaaaaaaaaaaaaaaaaaaaaaaaaaaaaaaaaugcaucccccccccccccccccccccccccccccccaaaggcucuuuucagagccaccagaauu

SEQ ID NO: 1531 - RNA, 2006 nt, Artificial Sequence
  mRNA product Design g-1 comprising derived and/or modified sequence from HRSV(A2)__F-del_DSCav1 (opt11)
gggagacuuucccauucuguagcagaauuugguguugccuguggucuuggucccgcggagaagcuuaccauggagcugcucauccugaaggccaacgccaucaccacaauccugacggcggugaccuucugcuucgccagcggccagaacaucaccgaggaguucuaccaguccacgugcagcgccgucuccaagggguaccucagcgcccugcgaaccggcugguacaccuccgugaucaccaucgagcugucaaacaucaaggagaacaagugcaacgggaccgaugccaagguuaagcucaucaagcaggagcuggacaaguacaagaacgcggucacggagcugcagcuccugaugcaguccacuccggcaaccaacaaccgcgccaggcgcgagcugccccgguucaugaacuacacccucaacaacgccaagaagacgaaugugacccugagcaagaagcgcaagcggcgcuuccugggcuuccuccuaggggugggcuccgccaucgcgagcggcgucgccgugugcaagguguugcaccucgagggggaggucaacaagaucaagagcgcccugcuguccaccaacaaggccgugguaagccucuccaacggcgucagcguucugaccuucaaggugcuggaccucaagaacuauaucgacaagcagcugcugcccauccugaacaagcagagcugcuccaucucaaacaucgaaacggugauugaguuccagcagaagaacaaccggcuccuggaaaucacccgcgaguucagcgugaacgccggggucaccacccccguguccacguacaugcugaccaacagcgagcuccuaucccugaucaacgacaugccgaucaccaacgaccagaagaagcucaugagcaacaacgugcagaucguccggcagcaguccuacagcaucaugugcaucaucaaggaagaggugcuggcguacgugguccagcugccccucuacggcgugaucgacacccccugcuggaagcugcacacgagcccccugugcacaaccaacaccaaggagggguccaacaucugccucacgcgcaccgaccggggcugguacugcgacaacgccggcagcgucuccuucuucccgcaggccgagaccugcaaggugcagagcaaccgcguguucugcgacaccaugaacucccugacgcugcccucugagguaaaccucugcaacgucgacaucuucaaccccaaguacgacugcaagaucaugaccuccaagacagacgugagcuccagcgugaucacaucccugggggccaucgucagcugcuacggcaagacuaaguguacugccagcaacaagaaccgggggaucaucaagaccuucuccaacggcugcgacuacgugagcaacaagggcguggacaccguguccgucgggaacacccuguacuacguuaauaagcaggagggcaagagccucuacgugaaaggggagcccaucauuaacuucuacgacccacugguuuuccccuccgacgaguucgacgcgagcaucucccaggugaacgagaagaucaaccagagccuggccuucauccgcaaguccgacgagcugcuccacaacgugaacgccggcaagagcacgaccaacaucaugaucaccaccaucaucaucgugaucaucgugauucugcugucccucaucgccguggggcugcugcuuuacugcaaggcccggugaggacuaguggaagcauuuuccuggcugauuaaaagaaauuacucagcuauggucaucuguuccuguuagaaggcuaugcagcauauuauauacuaugcgcauguuaugaaaugcauaauaaaaaauuuuaaaaaaucuaaaagaucuaaaaaaaaaaaaaaaaaaaaaaaaaaaaaaaaaaaaaaaaaaaaaaaaaaaaaaaaaaaaaaaaugcaucccccccccccccccccccccccccccccccaaaggcucuuuucagagccaccagaauu

SEQ ID NO: 1532 - RNA, 2021 nt, Artificial Sequence
  mRNA product Design g-2 comprising derived and/or modified sequence from HRSV(A2)__F-del_DSCav1 (opt1)
gggagaguccgcucagccagguugcagaagcggcuuagcguguguccuaaucuucucucugcguguagguaggccugugccgcaaacaagcuuaccauggagcugcucauccugaaggccaacgccaucaccaccauccugacggcggugaccuucugcuucgccagcggccagaacaucaccgaggaguucuaccaguccacgugcagcgccgucuccaagggguaccucagcgcccugcggaccggcugguacaccuccgugaucaccaucgagcugagcaacaucaaggagaacaagugcaacgggaccgacgccaaggugaagcucaucaagcaggagcuggacaaguacaagaacgcggucacggagcugcagcuccugaugcaguccaccccggcaaccaacaaccgcgcccggcgcgagcugccccgguucaugaacuacacccucaacaacgccaagaagacgaacgugacccugagcaagaagcgcaagcggcgcuuccugggcuuccuccugggggugggcuccgccaucgcgagcggcgucgccgugugcaaggugcugcaccucgagggggaggucaacaagaucaagagcgcccugcuguccaccaacaaggccguggugagccucuccaacggcgucagcgugcugaccuucaaggugcuggaccucaagaacuacaucgacaagcagcugcugcccauccugaacaagcagagcugcuccaucagcaacaucgagacggugaucgaguuccagcagaagaacaaccggcuccuggagaucacccgcgaguucagcgugaacgccggggucaccacccccguguccacguacaugcugaccaacagcgagcuccugucccugaucaacgacaugccgaucaccaacgaccagaagaagcucaugagcaacaacgugcagaucguccggcagcaguccuacagcaucaugugcaucaucaaggaggaggugcuggcguacgugguccagcugccccucuacggcgugaucgacacccccugcuggaagcugcacacgagcccccugugcaccaccaacaccaaggagggguccaacaucugccucacgcgcaccgaccggggcugguacugcgacaacgccggcagcgucuccuucuucccgcaggccgagaccugcaaggugcagagcaaccgcguguucugcgacaccaugaacucccugacgcugcccagcgagguaaaccucugcaacgucgacaucuucaaccccaaguacgacugcaagaucaugaccuccaagaccgacgugagcuccagcgugaucaccucccugggggccaucgucagcugcuacggcaagacgaagugcaccgccagcaacaagaaccgggggaucaucaagaccuucuccaacggcugcgacuacgugagcaacaagggcguggacaccguguccgucgggaacacccuguacuacgugaacaagcaggagggcaagagccucuacgugaagggggagcccaucaucaacuucuacgacccgcuggucuuccccuccgacgaguucgacgcgagcaucucccaggugaacgagaagaucaaccagagccuggccuucauccgcaaguccgacgagcugcuccacaacgugaacgccggcaagagcacgaccaacaucaugaucaccaccaucaucaucgucaucaucgugauccugcugucccucaucgccguggggcugcugcucuacugcaaggcccggugaggacuaguaauaaggaaacuguaugaaugucugugggcaggaagugaagagauccuucuguaaagguuuuuggaauuaugucugcugaauaauaaacuuuuuugaaauaauaaaucugguagaaaaaugagaucuaaaaaaaaaaaaaaaaaaaaaaaaaaaaaaaaaaaaaaaaaaaaaaaaaaaaaaaaaaaaaaaaugcaucccccccccccccccccccccccccccccccaaaggcucuuuucagagccaccagaauu

SEQ ID NO: 1533 - RNA, 2021 nt, Artificial Sequence
  mRNA product Design g-2 comprising derived and/or modified sequence from HRSV(A2)__F-del_DSCav1 (opt1)
gggagaguccgcucagccagguugcagaagcggcuuagcguguguccuaaucuucucucugcguguagguaggccugugccgcaaacaagcuuaccauggagcugcucauccugaaggccaacgccaucaccaccauccugacggcggugaccuucugcuucgccagcggccagaacaucaccgaggaguucuaccaguccacgugcagcgccgucuccaagggguaccucagcgcccugcgcaccggcugguacaccuccgugaucaccaucgagcugagcaacaucaaggagaacaagugcaacgggaccgacgccaaggugaagcucaucaagcaggagcuggacaaguacaagaacgcggucacggagcugcagcuccugaugcaguccacccccgccaccaacaaccgggcccgccgggagcugccgcgcuucaugaacuacacccucaacaacgccaagaagacgaacgugacccugagcaagaagcggaagcgccgguuccugggcuuccuccugggggugggcuccgcgaucgccagcggcgucgccgugugcaaggugcugcaccucgagggggaggucaacaagaucaaguccgcccugcugagcaccaacaaggccguggugucccucagcaacggcgucuccgugcugaccuucaaggugcuggaccucaagaacuacaucgacaagcagcugcugcccauccucaacaagcagagcugcuccaucagcaacaucgagacggucaucgaguuccagcagaagaacaaccgccugcuggagaucacccgggaguucuccgugaacgcgggggugaccacccccgucagcacguacaugcucaccaacagcgagcugcugucccucaucaacgacaugcccaucaccaacgaccagaagaagcugaugagcaacaacgugcagaucgugcgccagcaguccuacagcaucaugugcaucaucaaggaggagguccuggccuacguggugcagcucccgcuguacggcgucaucgacacccccugcuggaagcugcacacgagcccccucugcaccaccaacaccaaggaggggagcaacaucugccugacgcggaccgaccgcggcugguacugcgacaacgccggcuccgugagcuucuucccccaggccgagaccugcaagguccaguccaaccggguguucugcgacaccaugaacagccugacgcucccguccgaggugaaccugugcaacgucgacaucuucaaccccaaguacgacugcaagaucaugaccagcaagaccgacguguccagcuccgugaucaccagccugggggccaucgucuccugcuacggcaagacgaagugcaccgcgagcaacaagaaccgcgggaucaucaagaccuucuccaacggcugcgacuacgugagcaacaagggcguggacaccgucagcguggggaacacccucuacuacgugaacaagcaggagggcaagucccuguacgucaagggggagcccaucaucaacuucuacgacccccugguguucccgagcgacgaguucgacgccuccaucagccaggugaacgagaagaucaaccagucccucgccuucauccggaaguccgacgagcugcugcacaacgucaacgccggcaaguccacgaccaacaucaugaucaccaccaucaucaucgugaucaucgugauccugcucagccugaucgccgucgggcugcuccuguacugcaaggcgcgcugaggacuaguaauaaggaaacuguaugaaugucugugggcaggaagugaagagauccuucuguaaagguuuuuggaauuaugucugcugaauaauaaacuuuuuugaaauaauaaaucugguagaaaaaugagaucuaaaaaaaaaaaaaaaaaaaaaaaaaaaaaaaaaaaaaaaaaaaaaaaaaaaaaaaaaaaaaaaaugcaucccccccccccccccccccccccccccccccaaaggcucuuuucagagccaccagaauu

SEQ ID NO: 1534 - RNA, 2021 nt, Artificial Sequence
  mRNA product Design g-2 comprising derived and/or modified sequence from HRSV(A2)__F-del_DSCav1 (opt2)
gggagaguccgcucagccagguugcagaagcggcuuagcguguguccuaaucuucucucugcguguagguaggccugugccgcaaacaagcuuaccauggagcuccucauccucaaggccaacgccaucaccaccauccucaccgccgucaccuucugcuucgccuccggccagaacaucaccgaggaguucuaccaguccaccugcuccgccgucuccaagggcuaccucuccgcccuccgcaccggcugguacaccuccgucaucaccaucgagcucuccaacaucaaggagaacaagugcaacggcaccgacgccaaggucaagcucaucaagcaggagcucgacaaguacaagaacgccgucaccgagcuccagcuccucaugcaguccacccccgccaccaacaaccgcgcccgccgcgagcucccccgcuucaugaacuacacccucaacaacgccaagaagaccaacgucacccucuccaagaagcgcaagcgccgcuuccucggcuuccuccucggcgucggcuccgccaucgccuccggcgucgccgucugcaagguccuccaccucgagggcgaggucaacaagaucaaguccgcccuccucuccaccaacaaggccgucgucucccucuccaacggcgucuccguccucaccuucaagguccucgaccucaagaacuacaucgacaagcagcuccuccccauccucaacaagcaguccugcuccaucuccaacaucgagaccgucaucgaguuccagcagaagaacaaccgccuccucgagaucacccgcgaguucuccgucaacgccggcgucaccacccccgucuccaccuacaugcucaccaacuccgagcuccucucccucaucaacgacaugcccaucaccaacgaccagaagaagcucauguccaacaacguccagaucguccgccagcaguccuacuccaucaugugcaucaucaaggaggagguccucgccuacgucguccagcucccccucuacggcgucaucgacacccccugcuggaagcuccacaccuccccccucugcaccaccaacaccaaggagggcuccaacaucugccucacccgcaccgaccgcggcugguacugcgacaacgccggcuccgucuccuucuucccccaggccgagaccugcaagguccaguccaaccgcgucuucugcgacaccaugaacucccucacccuccccuccgaggucaaccucugcaacgucgacaucuucaaccccaaguacgacugcaagaucaugaccuccaagaccgacgucuccuccuccgucaucaccucccucggcgccaucgucuccugcuacggcaagaccaagugcaccgccuccaacaagaaccgcggcaucaucaagaccuucuccaacggcugcgacuacgucuccaacaagggcgucgacaccgucuccgucggcaacacccucuacuacgucaacaagcaggagggcaagucccucuacgucaagggcgagcccaucaucaacuucuacgacccccucgucuuccccuccgacgaguucgacgccuccaucucccaggucaacgagaagaucaaccagucccucgccuucauccgcaaguccgacgagcuccuccacaacgucaacgccggcaaguccaccaccaacaucaugaucaccaccaucaucaucgucaucaucgucauccuccucucccucaucgccgucggccuccuccucuacugcaaggcccgcugaggacuaguaauaaggaaacuguaugaaugucugugggcaggaagugaagagauccuucuguaaagguuuuuggaauuaugucugcugaauaauaaacuuuuuugaaauaauaaaucugguagaaaaaugagaucuaaaaaaaaaaaaaaaaaaaaaaaaaaaaaaaaaaaaaaaaaaaaaaaaaaaaaaaaaaaaaaaaugcaucccccccccccccccccccccccccccccccaaaggcucuuuucagagccaccagaauu

SEQ ID NO: 1535 - RNA, 2021 nt, Artificial Sequence
  mRNA product Design g-2 comprising derived and/or modified sequence from HRSV(A2)__F-del_DSCav1 (opt3)
gggagaguccgcucagccagguugcagaagcggcuuagcguguguccuaaucuucucucugcguguagguaggccugugccgcaaacaagcuuaccauggagcugcucauccuuaaggccaacgcuauuaccacaauacugacugcagugacguucugcuuugccagcggccagaauaucaccgaagaguucuaccaauccacauguucugcggucucaaaaggguauuugagugcuuuaagaacuggaugguacaccagcguuauuacaaucgaacuguccaacauuaaggagaauaaaugcaacgguaccgacgccaaggugaaacuaaucaagcaggaacucgauaaguauaaaaaugcaguaacugagcugcagcuucugaugcagucuacacccgccaccaacaauagggcucggcgcgaguugccucgauuuaugaacuacacgcucaauaacgcaaagaaaacuaaugugacccugucgaagaaacguaagagaagguuccugggcuuucucuuaggggucggaucagccauagcuagcggcguggccguuuguaaggugcugcaccuugaaggugaggucaacaaaaucaagagugcguugcuguccacaaauaaagcagugguaucucuaagcaacgggguuuccgugcucacuuucaagguccuggaccuuaaaaauuauauugauaagcaacuguugccaauccucaacaaacagucaugcaguauuagcaacaucgaaaccgugauagaguuucagcagaagaauaaccggcuguuagagauuacacgcgaguucucugugaaugccggagucaccacgccgguuuccacuuacaugcugacaaacucagaacuccuuagccugaucaaugacaugcccauuaccaacgaucaaaagaaauugaugaguaauaacgugcagaucguaagacagcagucuuauuccaucauguguauuauaaaggaagaggugcuagcuuacgucgugcaacugccucucuacggcguuaucgacacuccaugcuggaaacugcauacaagcccccuuuguaccacgaauaccaaggaaggcucgaacauuugccugacaaggacugaucgggggugguauugugacaaugccggaucuguguccuuuuucccucaggcagagaccugcaaaguccagucaaaccgcguguuuugugauacaaugaauaguuugacucucccaagcgagguaaaccugugcaauguugacaucuucaaccccaaguacgauugcaagauaaugaccuccaaaacagacgugucuagcucagucauuaccaguuuaggugcuaucguguccuguuauggcaagacuaaaugcacggccagcaacaagaaucgagggaucauuaaaacauuuucuaacggaugugauuacgucucaaauaagggcguggacaccguuaguguggguaacacucuguauuacguaaauaagcaagaagggaaaagccuauaugucaagggagagccuaucauuaacuucuacgacccacucguguucccguccgaugaauuugacgcgucuauaucgcagguuaaugagaaaaucaaccagagccuggccuucauuagaaaguccgaugaacuuuugcacaaugugaacgcaggcaaaucaaccacaaauaucaugaucaccacuauuauaaucgucauuaucgugauucugcucagucugaucgcuguaggccuucuguuguacugcaaggccaggugaggacuaguaauaaggaaacuguaugaaugucugugggcaggaagugaagagauccuucuguaaagguuuuuggaauuaugucugcugaauaauaaacuuuuuugaaauaauaaaucugguagaaaaaugagaucuaaaaaaaaaaaaaaaaaaaaaaaaaaaaaaaaaaaaaaaaaaaaaaaaaaaaaaaaaaaaaaaaugcaucccccccccccccccccccccccccccccccaaaggcucuuuucagagccaccagaauu

SEQ ID NO: 1536 - RNA, 2021 nt, Artificial Sequence
  mRNA product Design g-2 comprising derived and/or modified sequence from HRSV(A2)__F-del_DSCav1 (opt4)
gggagaguccgcucagccagguugcagaagcggcuuagcguguguccuaaucuucucucugcguguagguaggccugugccgcaaacaagcuuaccauggagcugcugauccugaaggccaacgccaucaccaccauccugaccgccgugaccuucugcuucgccagcggccagaacaucaccgaggaguucuaccagagcaccugcagcgccgugagcaagggcuaccugagcgcccugagaaccggcugguacaccagcgugaucaccaucgagcugagcaacaucaaggagaacaagugcaacggcaccgacgccaaggugaagcugaucaagcaggagcuggacaaguacaagaacgccgugaccgagcugcagcugcugaugcagagcacccccgccaccaacaacagagccagaagagagcugcccagauucaugaacuacacccugaacaacgccaagaagaccaacgugacccugagcaagaagagaaagagaagauuccugggcuuccugcugggcgugggcagcgccaucgccagcggcguggccgugugcaaggugcugcaccuggagggcgaggugaacaagaucaagagcgcccugcugagcaccaacaaggccguggugagccugagcaacggcgugagcgugcugaccuucaaggugcuggaccugaagaacuacaucgacaagcagcugcugcccauccugaacaagcagagcugcagcaucagcaacaucgagaccgugaucgaguuccagcagaagaacaacagacugcuggagaucaccagagaguucagcgugaacgccggcgugaccacccccgugagcaccuacaugcugaccaacagcgagcugcugagccugaucaacgacaugcccaucaccaacgaccagaagaagcugaugagcaacaacgugcagaucgugagacagcagagcuacagcaucaugugcaucaucaaggaggaggugcuggccuacguggugcagcugccccuguacggcgugaucgacacccccugcuggaagcugcacaccagcccccugugcaccaccaacaccaaggagggcagcaacaucugccugaccagaaccgacagaggcugguacugcgacaacgccggcagcgugagcuucuucccccaggccgagaccugcaaggugcagagcaacagaguguucugcgacaccaugaacagccugacccugcccagcgaggugaaccugugcaacguggacaucuucaaccccaaguacgacugcaagaucaugaccagcaagaccgacgugagcagcagcgugaucaccagccugggcgccaucgugagcugcuacggcaagaccaagugcaccgccagcaacaagaacagaggcaucaucaagaccuucagcaacggcugcgacuacgugagcaacaagggcguggacaccgugagcgugggcaacacccuguacuacgugaacaagcaggagggcaagagccuguacgugaagggcgagcccaucaucaacuucuacgacccccugguguuccccagcgacgaguucgacgccagcaucagccaggugaacgagaagaucaaccagagccuggccuucaucagaaagagcgacgagcugcugcacaacgugaacgccggcaagagcaccaccaacaucaugaucaccaccaucaucaucgugaucaucgugauccugcugagccugaucgccgugggccugcugcuguacugcaaggccagaugaggacuaguaauaaggaaacuguaugaaugucugugggcaggaagugaagagauccuucuguaaagguuuuuggaauuaugucugcugaauaauaaacuuuuuugaaauaauaaaucugguagaaaaaugagaucuaaaaaaaaaaaaaaaaaaaaaaaaaaaaaaaaaaaaaaaaaaaaaaaaaaaaaaaaaaaaaaaaugcaucccccccccccccccccccccccccccccccaaaggcucuuuucagagccaccagaauu

SEQ ID NO: 1537 - RNA, 2021 nt, Artificial Sequence
  mRNA product Design g-2 comprising derived and/or modified sequence from HRSV(A2)__F-del_DSCav1 (opt5)
gggagaguccgcucagccagguugcagaagcggcuuagcguguguccuaaucuucucucugcguguagguaggccugugccgcaaacaagcuuaccauggagcugcucauccugaaggccaacgcuauuaccacaauccuuacggccgugaccuucugcuuugcgagcggccagaauauuacagaagaguucuaccaauccaccuguucugcugucagcaaaggguaucuguccgcccucagaacaggaugguacaccucuguuaucacaauugaacugagcaacaucaaggagaauaaaugcaacggcaccgacgccaaggugaaacuuaucaagcaggaacuggauaaguauaaaaaugcugugacggagcuccagcugcugaugcaguccacccccgccacaaacaaucgggcucgcagagagcucccucgguuuaugaacuacacccugaauaacgccaagaaaacaaaugucacccuuucuaagaaacgcaagagacgguuccugggguuucuccugggagugggcagcgcgauugccuccgggguugcuguguguaagguccuucaccuggaaggagaggugaacaaaaucaagagcgcccuccugucuacgaauaaagcuguugugucccugagcaacggcgucucugugcucacauucaaggugcuggaccuuaaaaauuauauugauaagcaacugcucccgauccugaacaaacaguccugcagcauuucuaacaucgaaaccgucauugaguuucagcagaagaauaaccgccuucuggagaucacaagagaauuuuccguuaaugccggcgugaccacccccgugagcacauacaugcucacgaacuccgagcugcugucucucaucaaugacaugccuauuaccaacgaucaaaagaaacugaugagcaauaacguccagaucgugcggcagcaguccuauagcauuauguguaucauuaaggaagagguucuugcguacgugguccaacugccccucuacggggugaucgacacaccuugcuggaaacugcauaccucuccccuuuguacaaccaauacgaaggaaggauccaacaucugccugacacgcaccgauagaggcugguauugugacaaugccgggagcguuucuuucuucccucaggcugagaccugcaaagugcagagcaaccgggucuuuugugauacaaugaacucccucacccugccgucugaggugaaucugugcaaugucgacauuuucaaccccaaguacgauugcaagaucaugacaagcaaaacggacguguccagcucuguuauuaccucccucggagccaucgugagcuguuauggcaagacaaaaugcaccgcuucuaacaagaaucgcgggauuaucaaaacauuuuccaacggaugugauuacgucagcaauaagggcguggacaccguuuccgugggcaacacgcuguauuacgucaauaagcaagaagggaaaucucuuuaugugaagggagagccuaucauuaacuucuacgacccccugguguucccuagcgaugaauuugacgccuccaucucucagguuaaugagaaaauuaaccagagccucgccuucaucagaaaguccgaugaacugcugcacaaugucaacgcuggcaaaagcaccacaaauauuaugaucaccacaauuaucaucgugauuaucgugauucuucucucucugaucgcggucgggcugcuccuguacugcaaggcccggugaggacuaguaauaaggaaacuguaugaaugucugugggcaggaagugaagagauccuucuguaaagguuuuuggaauuaugucugcugaauaauaaacuuuuuugaaauaauaaaucugguagaaaaaugagaucuaaaaaaaaaaaaaaaaaaaaaaaaaaaaaaaaaaaaaaaaaaaaaaaaaaaaaaaaaaaaaaaaugcaucccccccccccccccccccccccccccccccaaaggcucuuuucagagccaccagaauu

SEQ ID NO: 1538 - RNA, 2021 nt, Artificial Sequence
  mRNA product Design g-2 comprising derived and/or modified sequence from HRSV(A2)__F-del_DSCav1 (opt6)
gggagaguccgcucagccagguugcagaagcggcuuagcguguguccuaaucuucucucugcguguagguaggccugugccgcaaacaagcuuaccauggaacuauuaauauuaaaagcaaaugcuauuaccacaauacuuacugcuguaaccuucugcuuugccucuggccaaaacauaacagaagaauuuuaucaaucaacuugcuccgcuguaagcaaaggcuaccuaucagcauuacgcaccggcugguacacaucaguaauaacaauagaacuauccaacauaaaagaaaauaaaugcaacggaacagacgcaaaaguaaaauuaauaaaacaagaacucgacaaauacaaaaacgcaguaacagaauuacaacuacuaaugcaaaguacuccagccaccaacaacagagcaagaagagaauuaccacgauuuaugaacuacacacuaaacaaugcaaaaaaaacaaacguaacacuaucaaaaaaacguaaacgcagauucuuaggcuuccuccuagguguaggcucagcaaucgccucaggaguggcaguuuguaaaguacuacaccuagaaggagaaguaaacaaaaucaaaucugcccuuuuaucgacaaacaaagcaguaguaucguuauccaauggagucucaguauugacauucaaaguauuagaccuaaaaaauuauauagauaaacaacucuuaccuaucuuaaauaaacaaagcugcucaauaaguaacauagaaaccguaauagaauuucaacaaaaaaacaauagacuccuugagaucacucgagaauuuucaguaaacgcagguguaacaacaccaguaagcacauacaugcuaacaaauagugaacuauuaucucuaauuaacgauaugcccauaaccaacgaucaaaaaaaacucaugaguaacaacguacaaauaguaagacaacaauccuauagcauaaugugcauuauaaaagaagaaguacuagcauauguaguccaacuaccacuauacggcguaauagacacaccaugcuggaaacuacacaccucaccccuaugcacaacaaauacaaaagaaggaucaaacauaugcuuaaccaggacagacagaggcugguacugcgauaacgcaggaucuguuucauucuucccccaagcagaaacaugcaaaguacaaucaaacagaguauuuugugauaccaugaacucacucacauuaccauccgaagucaaccucugcaacguagacauauucaaccccaaauacgacugcaaaauaaugaccucaaaaacagauguaucaucaucaguaaucacaucacuaggagcuaucguaucuuguuauggaaaaacaaaaugcacagcauccaacaaaaacagaggaauuaucaaaacauucucaaauggaugugacuauguaucaaacaaaggaguagacaccguaagcguaggcaauacacuauauuacguaaauaaacaagaaggaaaaucacuauacguaaaaggugaaccaauaauaaacuucuaugacccccuaguauucccaucagaugaauuugacgcaagcauaucacaagucaacgaaaaaauaaaccaaucacuggcauucauucgcaaaucagaugaacuucuccacaacguaaacgcugguaaaagcacuacaaacauaaugauaacaacaaucaucauugucauaauaguuauucuauuaucacuaaucgcaguaggauuacuacuauacuguaaagcgagguaaggacuaguaauaaggaaacuguaugaaugucugugggcaggaagugaagagauccuucuguaaagguuuuuggaauuaugucugcugaauaauaaacuuuuuugaaauaauaaaucugguagaaaaaugagaucuaaaaaaaaaaaaaaaaaaaaaaaaaaaaaaaaaaaaaaaaaaaaaaaaaaaaaaaaaaaaaaaaugcaucccccccccccccccccccccccccccccccaaaggcucuuuucagagccaccagaauu

SEQ ID NO: 1539 - RNA, 2021 nt, Artificial Sequence
  mRNA product Design g-2 comprising derived and/or modified sequence from HRSV(A2)__F-del_DSCav1 (opt11)
gggagaguccgcucagccagguugcagaagcggcuuagcguguguccuaaucuucucucugcguguagguaggccugugccgcaaacaagcuuaccauggagcugcucauccugaaggccaacgccaucaccacaauccugacggcggugaccuucugcuucgccagcggccagaacaucaccgaggaguucuaccaguccacgugcagcgccgucuccaagggguaccucagcgcccugcgaaccggcugguacaccuccgugaucaccaucgagcugucaaacaucaaggagaacaagugcaacgggaccgaugccaagguuaagcucaucaagcaggagcuggacaaguacaagaacgcggucacggagcugcagcuccugaugcaguccacuccggcaaccaacaaccgcgccaggcgcgagcugccccgguucaugaacuacacccucaacaacgccaagaagacgaaugugacccugagcaagaagcgcaagcggcgcuuccugggcuuccuccuaggggugggcuccgccaucgcgagcggcgucgccgugugcaagguguugcaccucgagggggaggucaacaagaucaagagcgcccugcuguccaccaacaaggccgugguaagccucuccaacggcgucagcguucugaccuucaaggugcuggaccucaagaacuauaucgacaagcagcugcugcccauccugaacaagcagagcugcuccaucucaaacaucgaaacggugauugaguuccagcagaagaacaaccggcuccuggaaaucacccgcgaguucagcgugaacgccggggucaccacccccguguccacguacaugcugaccaacagcgagcuccuaucccugaucaacgacaugccgaucaccaacgaccagaagaagcucaugagcaacaacgugcagaucguccggcagcaguccuacagcaucaugugcaucaucaaggaagaggugcuggcguacgugguccagcugccccucuacggcgugaucgacacccccugcuggaagcugcacacgagcccccugugcacaaccaacaccaaggagggguccaacaucugccucacgcgcaccgaccggggcugguacugcgacaacgccggcagcgucuccuucuucccgcaggccgagaccugcaaggugcagagcaaccgcguguucugcgacaccaugaacucccugacgcugcccucugagguaaaccucugcaacgucgacaucuucaaccccaaguacgacugcaagaucaugaccuccaagacagacgugagcuccagcgugaucacaucccugggggccaucgucagcugcuacggcaagacuaaguguacugccagcaacaagaaccgggggaucaucaagaccuucuccaacggcugcgacuacgugagcaacaagggcguggacaccguguccgucgggaacacccuguacuacguuaauaagcaggagggcaagagccucuacgugaaaggggagcccaucauuaacuucuacgacccacugguuuuccccuccgacgaguucgacgcgagcaucucccaggugaacgagaagaucaaccagagccuggccuucauccgcaaguccgacgagcugcuccacaacgugaacgccggcaagagcacgaccaacaucaugaucaccaccaucaucaucgugaucaucgugauucugcugucccucaucgccguggggcugcugcuuuacugcaaggcccggugaggacuaguaauaaggaaacuguaugaaugucugugggcaggaagugaagagauccuucuguaaagguuuuuggaauuaugucugcugaauaauaaacuuuuuugaaauaauaaaucugguagaaaaaugagaucuaaaaaaaaaaaaaaaaaaaaaaaaaaaaaaaaaaaaaaaaaaaaaaaaaaaaaaaaaaaaaaaaugcaucccccccccccccccccccccccccccccccaaaggcucuuuucagagccaccagaauu

SEQ ID NO: 1540 - RNA, 2253 nt, Artificial Sequence
  mRNA product Design g-3 comprising derived and/or modified sequence from HRSV(A2)__F-del_DSCav1 (opt1)
gggagaguccgcucagccagguugcagaagcggcuuagcguguguccuaaucuucucucugcguguagguaggccugugccgcaaacaagcuuaccauggagcugcucauccugaaggccaacgccaucaccaccauccugacggcggugaccuucugcuucgccagcggccagaacaucaccgaggaguucuaccaguccacgugcagcgccgucuccaagggguaccucagcgcccugcggaccggcugguacaccuccgugaucaccaucgagcugagcaacaucaaggagaacaagugcaacgggaccgacgccaaggugaagcucaucaagcaggagcuggacaaguacaagaacgcggucacggagcugcagcuccugaugcaguccaccccggcaaccaacaaccgcgcccggcgcgagcugccccgguucaugaacuacacccucaacaacgccaagaagacgaacgugacccugagcaagaagcgcaagcggcgcuuccugggcuuccuccugggggugggcuccgccaucgcgagcggcgucgccgugugcaaggugcugcaccucgagggggaggucaacaagaucaagagcgcccugcuguccaccaacaaggccguggugagccucuccaacggcgucagcgugcugaccuucaaggugcuggaccucaagaacuacaucgacaagcagcugcugcccauccugaacaagcagagcugcuccaucagcaacaucgagacggugaucgaguuccagcagaagaacaaccggcuccuggagaucacccgcgaguucagcgugaacgccggggucaccacccccguguccacguacaugcugaccaacagcgagcuccugucccugaucaacgacaugccgaucaccaacgaccagaagaagcucaugagcaacaacgugcagaucguccggcagcaguccuacagcaucaugugcaucaucaaggaggaggugcuggcguacgugguccagcugccccucuacggcgugaucgacacccccugcuggaagcugcacacgagcccccugugcaccaccaacaccaaggagggguccaacaucugccucacgcgcaccgaccggggcugguacugcgacaacgccggcagcgucuccuucuucccgcaggccgagaccugcaaggugcagagcaaccgcguguucugcgacaccaugaacucccugacgcugcccagcgagguaaaccucugcaacgucgacaucuucaaccccaaguacgacugcaagaucaugaccuccaagaccgacgugagcuccagcgugaucaccucccugggggccaucgucagcugcuacggcaagacgaagugcaccgccagcaacaagaaccgggggaucaucaagaccuucuccaacggcugcgacuacgugagcaacaagggcguggacaccguguccgucgggaacacccuguacuacgugaacaagcaggagggcaagagccucuacgugaagggggagcccaucaucaacuucuacgacccgcuggucuuccccuccgacgaguucgacgcgagcaucucccaggugaacgagaagaucaaccagagccuggccuucauccgcaaguccgacgagcugcuccacaacgugaacgccggcaagagcacgaccaacaucaugaucaccaccaucaucaucgucaucaucgugauccugcugucccucaucgccguggggcugcugcucuacugcaaggcccggugaggacuagugaagggaacacccaaauuuaauucagccuuaagcacaauuaauuaagagugaaacguaauuguacaagcaguuggucacccaccauagggcaugaucaacaccgcaaccuuuccuuuuucccccagugauucugaaaaaccccucuucccuucagcuugcuuagauguuccaaauuuaguaagcuuaaggcggccuacagaagaaaaagaaaaaaaaggccacaaaaguucccucucacuuucaguaaauaaaauaaaagcagcaacagaaauaaagaaauaaaugaaauucaaaaugaaauaaauauuguguugugcagcauuaaaaaaucaauaaaaauuaaaaaugagcaagaucuaaaaaaaaaaaaaaaaaaaaaaaaaaaaaaaaaaaaaaaaaaaaaaaaaaaaaaaaaaaaaaaaugcaucccccccccccccccccccccccccccccccaaaggcucuuuucagagccaccagaauu

SEQ ID NO: 1541 - RNA, 2253 nt, Artificial Sequence
  mRNA product Design g-3 comprising derived and/or modified sequence from HRSV(A2)__F-del_DSCav1 (opt1)
gggagaguccgcucagccagguugcagaagcggcuuagcguguguccuaaucuucucucugcguguagguaggccugugccgcaaacaagcuuaccauggagcugcucauccugaaggccaacgccaucaccaccauccugacggcggugaccuucugcuucgccagcggccagaacaucaccgaggaguucuaccaguccacgugcagcgccgucuccaagggguaccucagcgcccugcgcaccggcugguacaccuccgugaucaccaucgagcugagcaacaucaaggagaacaagugcaacgggaccgacgccaaggugaagcucaucaagcaggagcuggacaaguacaagaacgcggucacggagcugcagcuccugaugcaguccacccccgccaccaacaaccgggcccgccgggagcugccgcgcuucaugaacuacacccucaacaacgccaagaagacgaacgugacccugagcaagaagcggaagcgccgguuccugggcuuccuccugggggugggcuccgcgaucgccagcggcgucgccgugugcaaggugcugcaccucgagggggaggucaacaagaucaaguccgcccugcugagcaccaacaaggccguggugucccucagcaacggcgucuccgugcugaccuucaaggugcuggaccucaagaacuacaucgacaagcagcugcugcccauccucaacaagcagagcugcuccaucagcaacaucgagacggucaucgaguuccagcagaagaacaaccgccugcuggagaucacccgggaguucuccgugaacgcgggggugaccacccccgucagcacguacaugcucaccaacagcgagcugcugucccucaucaacgacaugcccaucaccaacgaccagaagaagcugaugagcaacaacgugcagaucgugcgccagcaguccuacagcaucaugugcaucaucaaggaggagguccuggccuacguggugcagcucccgcuguacggcgucaucgacacccccugcuggaagcugcacacgagcccccucugcaccaccaacaccaaggaggggagcaacaucugccugacgcggaccgaccgcggcugguacugcgacaacgccggcuccgugagcuucuucccccaggccgagaccugcaagguccaguccaaccggguguucugcgacaccaugaacagccugacgcucccguccgaggugaaccugugcaacgucgacaucuucaaccccaaguacgacugcaagaucaugaccagcaagaccgacguguccagcuccgugaucaccagccugggggccaucgucuccugcuacggcaagacgaagugcaccgcgagcaacaagaaccgcgggaucaucaagaccuucuccaacggcugcgacuacgugagcaacaagggcguggacaccgucagcguggggaacacccucuacuacgugaacaagcaggagggcaagucccuguacgucaagggggagcccaucaucaacuucuacgacccccugguguucccgagcgacgaguucgacgccuccaucagccaggugaacgagaagaucaaccagucccucgccuucauccggaaguccgacgagcugcugcacaacgucaacgccggcaaguccacgaccaacaucaugaucaccaccaucaucaucgugaucaucgugauccugcucagccugaucgccgucgggcugcuccuguacugcaaggcgcgcugaggacuagugaagggaacacccaaauuuaauucagccuuaagcacaauuaauuaagagugaaacguaauuguacaagcaguuggucacccaccauagggcaugaucaacaccgcaaccuuuccuuuuucccccagugauucugaaaaaccccucuucccuucagcuugcuuagauguuccaaauuuaguaagcuuaaggcggccuacagaagaaaaagaaaaaaaaggccacaaaaguucccucucacuuucaguaaauaaaauaaaagcagcaacagaaauaaagaaauaaaugaaauucaaaaugaaauaaauauuguguugugcagcauuaaaaaaucaauaaaaauuaaaaaugagcaagaucuaaaaaaaaaaaaaaaaaaaaaaaaaaaaaaaaaaaaaaaaaaaaaaaaaaaaaaaaaaaaaaaaugcaucccccccccccccccccccccccccccccccaaaggcucuuuucagagccaccagaauu

SEQ ID NO: 1542 - RNA, 2253 nt, Artificial Sequence
  mRNA product Design g-3 comprising derived and/or modified sequence from HRSV(A2)__F-del_DSCav1 (opt2)
gggagaguccgcucagccagguugcagaagcggcuuagcguguguccuaaucuucucucugcguguagguaggccugugccgcaaacaagcuuaccauggagcuccucauccucaaggccaacgccaucaccaccauccucaccgccgucaccuucugcuucgccuccggccagaacaucaccgaggaguucuaccaguccaccugcuccgccgucuccaagggcuaccucuccgcccuccgcaccggcugguacaccuccgucaucaccaucgagcucuccaacaucaaggagaacaagugcaacggcaccgacgccaaggucaagcucaucaagcaggagcucgacaaguacaagaacgccgucaccgagcuccagcuccucaugcaguccacccccgccaccaacaaccgcgcccgccgcgagcucccccgcuucaugaacuacacccucaacaacgccaagaagaccaacgucacccucuccaagaagcgcaagcgccgcuuccucggcuuccuccucggcgucggcuccgccaucgccuccggcgucgccgucugcaagguccuccaccucgagggcgaggucaacaagaucaaguccgcccuccucuccaccaacaaggccgucgucucccucuccaacggcgucuccguccucaccuucaagguccucgaccucaagaacuacaucgacaagcagcuccuccccauccucaacaagcaguccugcuccaucuccaacaucgagaccgucaucgaguuccagcagaagaacaaccgccuccucgagaucacccgcgaguucuccgucaacgccggcgucaccacccccgucuccaccuacaugcucaccaacuccgagcuccucucccucaucaacgacaugcccaucaccaacgaccagaagaagcucauguccaacaacguccagaucguccgccagcaguccuacuccaucaugugcaucaucaaggaggagguccucgccuacgucguccagcucccccucuacggcgucaucgacacccccugcuggaagcuccacaccuccccccucugcaccaccaacaccaaggagggcuccaacaucugccucacccgcaccgaccgcggcugguacugcgacaacgccggcuccgucuccuucuucccccaggccgagaccugcaagguccaguccaaccgcgucuucugcgacaccaugaacucccucacccuccccuccgaggucaaccucugcaacgucgacaucuucaaccccaaguacgacugcaagaucaugaccuccaagaccgacgucuccuccuccgucaucaccucccucggcgccaucgucuccugcuacggcaagaccaagugcaccgccuccaacaagaaccgcggcaucaucaagaccuucuccaacggcugcgacuacgucuccaacaagggcgucgacaccgucuccgucggcaacacccucuacuacgucaacaagcaggagggcaagucccucuacgucaagggcgagcccaucaucaacuucuacgacccccucgucuuccccuccgacgaguucgacgccuccaucucccaggucaacgagaagaucaaccagucccucgccuucauccgcaaguccgacgagcuccuccacaacgucaacgccggcaaguccaccaccaacaucaugaucaccaccaucaucaucgucaucaucgucauccuccucucccucaucgccgucggccuccuccucuacugcaaggcccgcugaggacuagugaagggaacacccaaauuuaauucagccuuaagcacaauuaauuaagagugaaacguaauuguacaagcaguuggucacccaccauagggcaugaucaacaccgcaaccuuuccuuuuucccccagugauucugaaaaaccccucuucccuucagcuugcuuagauguuccaaauuuaguaagcuuaaggcggccuacagaagaaaaagaaaaaaaaggccacaaaaguucccucucacuuucaguaaauaaaauaaaagcagcaacagaaauaaagaaauaaaugaaauucaaaaugaaauaaauauuguguugugcagcauuaaaaaaucaauaaaaauuaaaaaugagcaagaucuaaaaaaaaaaaaaaaaaaaaaaaaaaaaaaaaaaaaaaaaaaaaaaaaaaaaaaaaaaaaaaaaugcaucccccccccccccccccccccccccccccccaaaggcucuuuucagagccaccagaauu

SEQ ID NO: 1543 - RNA, 2253 nt, Artificial Sequence
  mRNA product Design g-3 comprising derived and/or modified sequence from HRSV(A2)__F-del_DSCav1 (opt3)
gggagaguccgcucagccagguugcagaagcggcuuagcguguguccuaaucuucucucugcguguagguaggccugugccgcaaacaagcuuaccauggagcugcucauccuuaaggccaacgcuauuaccacaauacugacugcagugacguucugcuuugccagcggccagaauaucaccgaagaguucuaccaauccacauguucugcggucucaaaaggguauuugagugcuuuaagaacuggaugguacaccagcguuauuacaaucgaacuguccaacauuaaggagaauaaaugcaacgguaccgacgccaaggugaaacuaaucaagcaggaacucgauaaguauaaaaaugcaguaacugagcugcagcuucugaugcagucuacacccgccaccaacaauagggcucggcgcgaguugccucgauuuaugaacuacacgcucaauaacgcaaagaaaacuaaugugacccugucgaagaaacguaagagaagguuccugggcuuucucuuaggggucggaucagccauagcuagcggcguggccguuuguaaggugcugcaccuugaaggugaggucaacaaaaucaagagugcguugcuguccacaaauaaagcagugguaucucuaagcaacgggguuuccgugcucacuuucaagguccuggaccuuaaaaauuauauugauaagcaacuguugccaauccucaacaaacagucaugcaguauuagcaacaucgaaaccgugauagaguuucagcagaagaauaaccggcuguuagagauuacacgcgaguucucugugaaugccggagucaccacgccgguuuccacuuacaugcugacaaacucagaacuccuuagccugaucaaugacaugcccauuaccaacgaucaaaagaaauugaugaguaauaacgugcagaucguaagacagcagucuuauuccaucauguguauuauaaaggaagaggugcuagcuuacgucgugcaacugccucucuacggcguuaucgacacuccaugcuggaaacugcauacaagcccccuuuguaccacgaauaccaaggaaggcucgaacauuugccugacaaggacugaucgggggugguauugugacaaugccggaucuguguccuuuuucccucaggcagagaccugcaaaguccagucaaaccgcguguuuugugauacaaugaauaguuugacucucccaagcgagguaaaccugugcaauguugacaucuucaaccccaaguacgauugcaagauaaugaccuccaaaacagacgugucuagcucagucauuaccaguuuaggugcuaucguguccuguuauggcaagacuaaaugcacggccagcaacaagaaucgagggaucauuaaaacauuuucuaacggaugugauuacgucucaaauaagggcguggacaccguuaguguggguaacacucuguauuacguaaauaagcaagaagggaaaagccuauaugucaagggagagccuaucauuaacuucuacgacccacucguguucccguccgaugaauuugacgcgucuauaucgcagguuaaugagaaaaucaaccagagccuggccuucauuagaaaguccgaugaacuuuugcacaaugugaacgcaggcaaaucaaccacaaauaucaugaucaccacuauuauaaucgucauuaucgugauucugcucagucugaucgcuguaggccuucuguuguacugcaaggccaggugaggacuagugaagggaacacccaaauuuaauucagccuuaagcacaauuaauuaagagugaaacguaauuguacaagcaguuggucacccaccauagggcaugaucaacaccgcaaccuuuccuuuuucccccagugauucugaaaaaccccucuucccuucagcuugcuuagauguuccaaauuuaguaagcuuaaggcggccuacagaagaaaaagaaaaaaaaggccacaaaaguucccucucacuuucaguaaauaaaauaaaagcagcaacagaaauaaagaaauaaaugaaauucaaaaugaaauaaauauuguguugugcagcauuaaaaaaucaauaaaaauuaaaaaugagcaagaucuaaaaaaaaaaaaaaaaaaaaaaaaaaaaaaaaaaaaaaaaaaaaaaaaaaaaaaaaaaaaaaaaugcaucccccccccccccccccccccccccccccccaaaggcucuuuucagagccaccagaauu

SEQ ID NO: 1544 - RNA, 2253 nt, Artificial Sequence
  mRNA product Design g-3 comprising derived and/or modified sequence from HRSV(A2)__F-del_DSCav1 (opt4)
gggagaguccgcucagccagguugcagaagcggcuuagcguguguccuaaucuucucucugcguguagguaggccugugccgcaaacaagcuuaccauggagcugcugauccugaaggccaacgccaucaccaccauccugaccgccgugaccuucugcuucgccagcggccagaacaucaccgaggaguucuaccagagcaccugcagcgccgugagcaagggcuaccugagcgcccugagaaccggcugguacaccagcgugaucaccaucgagcugagcaacaucaaggagaacaagugcaacggcaccgacgccaaggugaagcugaucaagcaggagcuggacaaguacaagaacgccgugaccgagcugcagcugcugaugcagagcacccccgccaccaacaacagagccagaagagagcugcccagauucaugaacuacacccugaacaacgccaagaagaccaacgugacccugagcaagaagagaaagagaagauuccugggcuuccugcugggcgugggcagcgccaucgccagcggcguggccgugugcaaggugcugcaccuggagggcgaggugaacaagaucaagagcgcccugcugagcaccaacaaggccguggugagccugagcaacggcgugagcgugcugaccuucaaggugcuggaccugaagaacuacaucgacaagcagcugcugcccauccugaacaagcagagcugcagcaucagcaacaucgagaccgugaucgaguuccagcagaagaacaacagacugcuggagaucaccagagaguucagcgugaacgccggcgugaccacccccgugagcaccuacaugcugaccaacagcgagcugcugagccugaucaacgacaugcccaucaccaacgaccagaagaagcugaugagcaacaacgugcagaucgugagacagcagagcuacagcaucaugugcaucaucaaggaggaggugcuggccuacguggugcagcugccccuguacggcgugaucgacacccccugcuggaagcugcacaccagcccccugugcaccaccaacaccaaggagggcagcaacaucugccugaccagaaccgacagaggcugguacugcgacaacgccggcagcgugagcuucuucccccaggccgagaccugcaaggugcagagcaacagaguguucugcgacaccaugaacagccugacccugcccagcgaggugaaccugugcaacguggacaucuucaaccccaaguacgacugcaagaucaugaccagcaagaccgacgugagcagcagcgugaucaccagccugggcgccaucgugagcugcuacggcaagaccaagugcaccgccagcaacaagaacagaggcaucaucaagaccuucagcaacggcugcgacuacgugagcaacaagggcguggacaccgugagcgugggcaacacccuguacuacgugaacaagcaggagggcaagagccuguacgugaagggcgagcccaucaucaacuucuacgacccccugguguuccccagcgacgaguucgacgccagcaucagccaggugaacgagaagaucaaccagagccuggccuucaucagaaagagcgacgagcugcugcacaacgugaacgccggcaagagcaccaccaacaucaugaucaccaccaucaucaucgugaucaucgugauccugcugagccugaucgccgugggccugcugcuguacugcaaggccagaugaggacuagugaagggaacacccaaauuuaauucagccuuaagcacaauuaauuaagagugaaacguaauuguacaagcaguuggucacccaccauagggcaugaucaacaccgcaaccuuuccuuuuucccccagugauucugaaaaaccccucuucccuucagcuugcuuagauguuccaaauuuaguaagcuuaaggcggccuacagaagaaaaagaaaaaaaaggccacaaaaguucccucucacuuucaguaaauaaaauaaaagcagcaacagaaauaaagaaauaaaugaaauucaaaaugaaauaaauauuguguugugcagcauuaaaaaaucaauaaaaauuaaaaaugagcaagaucuaaaaaaaaaaaaaaaaaaaaaaaaaaaaaaaaaaaaaaaaaaaaaaaaaaaaaaaaaaaaaaaaugcaucccccccccccccccccccccccccccccccaaaggcucuuuucagagccaccagaauu

SEQ ID NO: 1545 - RNA, 2253 nt, Artificial Sequence
  mRNA product Design g-3 comprising derived and/or modified sequence from HRSV(A2)__F-del_DSCav1 (opt5)
gggagaguccgcucagccagguugcagaagcggcuuagcguguguccuaaucuucucucugcguguagguaggccugugccgcaaacaagcuuaccauggagcugcucauccugaaggccaacgcuauuaccacaauccuuacggccgugaccuucugcuuugcgagcggccagaauauuacagaagaguucuaccaauccaccuguucugcugucagcaaaggguaucuguccgcccucagaacaggaugguacaccucuguuaucacaauugaacugagcaacaucaaggagaauaaaugcaacggcaccgacgccaaggugaaacuuaucaagcaggaacuggauaaguauaaaaaugcugugacggagcuccagcugcugaugcaguccacccccgccacaaacaaucgggcucgcagagagcucccucgguuuaugaacuacacccugaauaacgccaagaaaacaaaugucacccuuucuaagaaacgcaagagacgguuccugggguuucuccugggagugggcagcgcgauugccuccgggguugcuguguguaagguccuucaccuggaaggagaggugaacaaaaucaagagcgcccuccugucuacgaauaaagcuguugugucccugagcaacggcgucucugugcucacauucaaggugcuggaccuuaaaaauuauauugauaagcaacugcucccgauccugaacaaacaguccugcagcauuucuaacaucgaaaccgucauugaguuucagcagaagaauaaccgccuucuggagaucacaagagaauuuuccguuaaugccggcgugaccacccccgugagcacauacaugcucacgaacuccgagcugcugucucucaucaaugacaugccuauuaccaacgaucaaaagaaacugaugagcaauaacguccagaucgugcggcagcaguccuauagcauuauguguaucauuaaggaagagguucuugcguacgugguccaacugccccucuacggggugaucgacacaccuugcuggaaacugcauaccucuccccuuuguacaaccaauacgaaggaaggauccaacaucugccugacacgcaccgauagaggcugguauugugacaaugccgggagcguuucuuucuucccucaggcugagaccugcaaagugcagagcaaccgggucuuuugugauacaaugaacucccucacccugccgucugaggugaaucugugcaaugucgacauuuucaaccccaaguacgauugcaagaucaugacaagcaaaacggacguguccagcucuguuauuaccucccucggagccaucgugagcuguuauggcaagacaaaaugcaccgcuucuaacaagaaucgcgggauuaucaaaacauuuuccaacggaugugauuacgucagcaauaagggcguggacaccguuuccgugggcaacacgcuguauuacgucaauaagcaagaagggaaaucucuuuaugugaagggagagccuaucauuaacuucuacgacccccugguguucccuagcgaugaauuugacgccuccaucucucagguuaaugagaaaauuaaccagagccucgccuucaucagaaaguccgaugaacugcugcacaaugucaacgcuggcaaaagcaccacaaauauuaugaucaccacaauuaucaucgugauuaucgugauucuucucucucugaucgcggucgggcugcuccuguacugcaaggcccggugaggacuagugaagggaacacccaaauuuaauucagccuuaagcacaauuaauuaagagugaaacguaauuguacaagcaguuggucacccaccauagggcaugaucaacaccgcaaccuuuccuuuuucccccagugauucugaaaaaccccucuucccuucagcuugcuuagauguuccaaauuuaguaagcuuaaggcggccuacagaagaaaaagaaaaaaaaggccacaaaaguucccucucacuuucaguaaauaaaauaaaagcagcaacagaaauaaagaaauaaaugaaauucaaaaugaaauaaauauuguguugugcagcauuaaaaaaucaauaaaaauuaaaaaugagcaagaucuaaaaaaaaaaaaaaaaaaaaaaaaaaaaaaaaaaaaaaaaaaaaaaaaaaaaaaaaaaaaaaaaugcaucccccccccccccccccccccccccccccccaaaggcucuuuucagagccaccagaauu

SEQ ID NO: 1546 - RNA, 2253 nt, Artificial Sequence
  mRNA product Design g-3 comprising derived and/or modified sequence from HRSV(A2)__F-del_DSCav1 (opt6)
gggagaguccgcucagccagguugcagaagcggcuuagcguguguccuaaucuucucucugcguguagguaggccugugccgcaaacaagcuuaccauggaacuauuaauauuaaaagcaaaugcuauuaccacaauacuuacugcuguaaccuucugcuuugccucuggccaaaacauaacagaagaauuuuaucaaucaacuugcuccgcuguaagcaaaggcuaccuaucagcauuacgcaccggcugguacacaucaguaauaacaauagaacuauccaacauaaaagaaaauaaaugcaacggaacagacgcaaaaguaaaauuaauaaaacaagaacucgacaaauacaaaaacgcaguaacagaauuacaacuacuaaugcaaaguacuccagccaccaacaacagagcaagaagagaauuaccacgauuuaugaacuacacacuaaacaaugcaaaaaaaacaaacguaacacuaucaaaaaaacguaaacgcagauucuuaggcuuccuccuagguguaggcucagcaaucgccucaggaguggcaguuuguaaaguacuacaccuagaaggagaaguaaacaaaaucaaaucugcccuuuuaucgacaaacaaagcaguaguaucguuauccaauggagucucaguauugacauucaaaguauuagaccuaaaaaauuauauagauaaacaacucuuaccuaucuuaaauaaacaaagcugcucaauaaguaacauagaaaccguaauagaauuucaacaaaaaaacaauagacuccuugagaucacucgagaauuuucaguaaacgcagguguaacaacaccaguaagcacauacaugcuaacaaauagugaacuauuaucucuaauuaacgauaugcccauaaccaacgaucaaaaaaaacucaugaguaacaacguacaaauaguaagacaacaauccuauagcauaaugugcauuauaaaagaagaaguacuagcauauguaguccaacuaccacuauacggcguaauagacacaccaugcuggaaacuacacaccucaccccuaugcacaacaaauacaaaagaaggaucaaacauaugcuuaaccaggacagacagaggcugguacugcgauaacgcaggaucuguuucauucuucccccaagcagaaacaugcaaaguacaaucaaacagaguauuuugugauaccaugaacucacucacauuaccauccgaagucaaccucugcaacguagacauauucaaccccaaauacgacugcaaaauaaugaccucaaaaacagauguaucaucaucaguaaucacaucacuaggagcuaucguaucuuguuauggaaaaacaaaaugcacagcauccaacaaaaacagaggaauuaucaaaacauucucaaauggaugugacuauguaucaaacaaaggaguagacaccguaagcguaggcaauacacuauauuacguaaauaaacaagaaggaaaaucacuauacguaaaaggugaaccaauaauaaacuucuaugacccccuaguauucccaucagaugaauuugacgcaagcauaucacaagucaacgaaaaaauaaaccaaucacuggcauucauucgcaaaucagaugaacuucuccacaacguaaacgcugguaaaagcacuacaaacauaaugauaacaacaaucaucauugucauaauaguuauucuauuaucacuaaucgcaguaggauuacuacuauacuguaaagcgagguaaggacuagugaagggaacacccaaauuuaauucagccuuaagcacaauuaauuaagagugaaacguaauuguacaagcaguuggucacccaccauagggcaugaucaacaccgcaaccuuuccuuuuucccccagugauucugaaaaaccccucuucccuucagcuugcuuagauguuccaaauuuaguaagcuuaaggcggccuacagaagaaaaagaaaaaaaaggccacaaaaguucccucucacuuucaguaaauaaaauaaaagcagcaacagaaauaaagaaauaaaugaaauucaaaaugaaauaaauauuguguugugcagcauuaaaaaaucaauaaaaauuaaaaaugagcaagaucuaaaaaaaaaaaaaaaaaaaaaaaaaaaaaaaaaaaaaaaaaaaaaaaaaaaaaaaaaaaaaaaaugcaucccccccccccccccccccccccccccccccaaaggcucuuuucagagccaccagaauu

SEQ ID NO: 1547 - RNA, 2253 nt, Artificial Sequence
  mRNA product Design g-3 comprising derived and/or modified sequence from HRSV(A2)__F-del_DSCav1 (opt11)
gggagaguccgcucagccagguugcagaagcggcuuagcguguguccuaaucuucucucugcguguagguaggccugugccgcaaacaagcuuaccauggagcugcucauccugaaggccaacgccaucaccacaauccugacggcggugaccuucugcuucgccagcggccagaacaucaccgaggaguucuaccaguccacgugcagcgccgucuccaagggguaccucagcgcccugcgaaccggcugguacaccuccgugaucaccaucgagcugucaaacaucaaggagaacaagugcaacgggaccgaugccaagguuaagcucaucaagcaggagcuggacaaguacaagaacgcggucacggagcugcagcuccugaugcaguccacuccggcaaccaacaaccgcgccaggcgcgagcugccccgguucaugaacuacacccucaacaacgccaagaagacgaaugugacccugagcaagaagcgcaagcggcgcuuccugggcuuccuccuaggggugggcuccgccaucgcgagcggcgucgccgugugcaagguguugcaccucgagggggaggucaacaagaucaagagcgcccugcuguccaccaacaaggccgugguaagccucuccaacggcgucagcguucugaccuucaaggugcuggaccucaagaacuauaucgacaagcagcugcugcccauccugaacaagcagagcugcuccaucucaaacaucgaaacggugauugaguuccagcagaagaacaaccggcuccuggaaaucacccgcgaguucagcgugaacgccggggucaccacccccguguccacguacaugcugaccaacagcgagcuccuaucccugaucaacgacaugccgaucaccaacgaccagaagaagcucaugagcaacaacgugcagaucguccggcagcaguccuacagcaucaugugcaucaucaaggaagaggugcuggcguacgugguccagcugccccucuacggcgugaucgacacccccugcuggaagcugcacacgagcccccugugcacaaccaacaccaaggagggguccaacaucugccucacgcgcaccgaccggggcugguacugcgacaacgccggcagcgucuccuucuucccgcaggccgagaccugcaaggugcagagcaaccgcguguucugcgacaccaugaacucccugacgcugcccucugagguaaaccucugcaacgucgacaucuucaaccccaaguacgacugcaagaucaugaccuccaagacagacgugagcuccagcgugaucacaucccugggggccaucgucagcugcuacggcaagacuaaguguacugccagcaacaagaaccgggggaucaucaagaccuucuccaacggcugcgacuacgugagcaacaagggcguggacaccguguccgucgggaacacccuguacuacguuaauaagcaggagggcaagagccucuacgugaaaggggagcccaucauuaacuucuacgacccacugguuuuccccuccgacgaguucgacgcgagcaucucccaggugaacgagaagaucaaccagagccuggccuucauccgcaaguccgacgagcugcuccacaacgugaacgccggcaagagcacgaccaacaucaugaucaccaccaucaucaucgugaucaucgugauucugcugucccucaucgccguggggcugcugcuuuacugcaaggcccggugaggacuagugaagggaacacccaaauuuaauucagccuuaagcacaauuaauuaagagugaaacguaauuguacaagcaguuggucacccaccauagggcaugaucaacaccgcaaccuuuccuuuuucccccagugauucugaaaaaccccucuucccuucagcuugcuuagauguuccaaauuuaguaagcuuaaggcggccuacagaagaaaaagaaaaaaaaggccacaaaaguucccucucacuuucaguaaauaaaauaaaagcagcaacagaaauaaagaaauaaaugaaauucaaaaugaaauaaauauuguguugugcagcauuaaaaaaucaauaaaaauuaaaaaugagcaagaucuaaaaaaaaaaaaaaaaaaaaaaaaaaaaaaaaaaaaaaaaaaaaaaaaaaaaaaaaaaaaaaaaugcaucccccccccccccccccccccccccccccccaaaggcucuuuucagagccaccagaauu

SEQ ID NO: 1548 - RNA, 2048 nt, Artificial Sequence
  mRNA product Design g-4 comprising derived and/or modified sequence from HRSV(A2)__F-del_DSCav1 (opt1)
gggagacuccugucgggcggaaguaggaggaguagaguuuaaaaacaguacucuuuuuccgguucgggacguaguugaagcaacgacaagccggauaaccgcucuugagacaggaagcuuaccauggagcugcucauccugaaggccaacgccaucaccaccauccugacggcggugaccuucugcuucgccagcggccagaacaucaccgaggaguucuaccaguccacgugcagcgccgucuccaagggguaccucagcgcccugcggaccggcugguacaccuccgugaucaccaucgagcugagcaacaucaaggagaacaagugcaacgggaccgacgccaaggugaagcucaucaagcaggagcuggacaaguacaagaacgcggucacggagcugcagcuccugaugcaguccaccccggcaaccaacaaccgcgcccggcgcgagcugccccgguucaugaacuacacccucaacaacgccaagaagacgaacgugacccugagcaagaagcgcaagcggcgcuuccugggcuuccuccugggggugggcuccgccaucgcgagcggcgucgccgugugcaaggugcugcaccucgagggggaggucaacaagaucaagagcgcccugcuguccaccaacaaggccguggugagccucuccaacggcgucagcgugcugaccuucaaggugcuggaccucaagaacuacaucgacaagcagcugcugcccauccugaacaagcagagcugcuccaucagcaacaucgagacggugaucgaguuccagcagaagaacaaccggcuccuggagaucacccgcgaguucagcgugaacgccggggucaccacccccguguccacguacaugcugaccaacagcgagcuccugucccugaucaacgacaugccgaucaccaacgaccagaagaagcucaugagcaacaacgugcagaucguccggcagcaguccuacagcaucaugugcaucaucaaggaggaggugcuggcguacgugguccagcugccccucuacggcgugaucgacacccccugcuggaagcugcacacgagcccccugugcaccaccaacaccaaggagggguccaacaucugccucacgcgcaccgaccggggcugguacugcgacaacgccggcagcgucuccuucuucccgcaggccgagaccugcaaggugcagagcaaccgcguguucugcgacaccaugaacucccugacgcugcccagcgagguaaaccucugcaacgucgacaucuucaaccccaaguacgacugcaagaucaugaccuccaagaccgacgugagcuccagcgugaucaccucccugggggccaucgucagcugcuacggcaagacgaagugcaccgccagcaacaagaaccgggggaucaucaagaccuucuccaacggcugcgacuacgugagcaacaagggcguggacaccguguccgucgggaacacccuguacuacgugaacaagcaggagggcaagagccucuacgugaagggggagcccaucaucaacuucuacgacccgcuggucuuccccuccgacgaguucgacgcgagcaucucccaggugaacgagaagaucaaccagagccuggccuucauccgcaaguccgacgagcugcuccacaacgugaacgccggcaagagcacgaccaacaucaugaucaccaccaucaucaucgucaucaucgugauccugcugucccucaucgccguggggcugcugcucuacugcaaggcccggugaggacuaguaauaaggaaacuguaugaaugucugugggcaggaagugaagagauccuucuguaaagguuuuuggaauuaugucugcugaauaauaaacuuuuuugaaauaauaaaucugguagaaaaaugagaucuaaaaaaaaaaaaaaaaaaaaaaaaaaaaaaaaaaaaaaaaaaaaaaaaaaaaaaaaaaaaaaaaugcaucccccccccccccccccccccccccccccccaaaggcucuuuucagagccaccagaauu

SEQ ID NO: 1549 - RNA, 2048 nt, Artificial Sequence
  mRNA product Design g-4 comprising derived and/or modified sequence from HRSV(A2)__F-del_DSCav1 (opt1)
gggagacuccugucgggcggaaguaggaggaguagaguuuaaaaacaguacucuuuuuccgguucgggacguaguugaagcaacgacaagccggauaaccgcucuugagacaggaagcuuaccauggagcugcucauccugaaggccaacgccaucaccaccauccugacggcggugaccuucugcuucgccagcggccagaacaucaccgaggaguucuaccaguccacgugcagcgccgucuccaagggguaccucagcgcccugcgcaccggcugguacaccuccgugaucaccaucgagcugagcaacaucaaggagaacaagugcaacgggaccgacgccaaggugaagcucaucaagcaggagcuggacaaguacaagaacgcggucacggagcugcagcuccugaugcaguccacccccgccaccaacaaccgggcccgccgggagcugccgcgcuucaugaacuacacccucaacaacgccaagaagacgaacgugacccugagcaagaagcggaagcgccgguuccugggcuuccuccugggggugggcuccgcgaucgccagcggcgucgccgugugcaaggugcugcaccucgagggggaggucaacaagaucaaguccgcccugcugagcaccaacaaggccguggugucccucagcaacggcgucuccgugcugaccuucaaggugcuggaccucaagaacuacaucgacaagcagcugcugcccauccucaacaagcagagcugcuccaucagcaacaucgagacggucaucgaguuccagcagaagaacaaccgccugcuggagaucacccgggaguucuccgugaacgcgggggugaccacccccgucagcacguacaugcucaccaacagcgagcugcugucccucaucaacgacaugcccaucaccaacgaccagaagaagcugaugagcaacaacgugcagaucgugcgccagcaguccuacagcaucaugugcaucaucaaggaggagguccuggccuacguggugcagcucccgcuguacggcgucaucgacacccccugcuggaagcugcacacgagcccccucugcaccaccaacaccaaggaggggagcaacaucugccugacgcggaccgaccgcggcugguacugcgacaacgccggcuccgugagcuucuucccccaggccgagaccugcaagguccaguccaaccggguguucugcgacaccaugaacagccugacgcucccguccgaggugaaccugugcaacgucgacaucuucaaccccaaguacgacugcaagaucaugaccagcaagaccgacguguccagcuccgugaucaccagccugggggccaucgucuccugcuacggcaagacgaagugcaccgcgagcaacaagaaccgcgggaucaucaagaccuucuccaacggcugcgacuacgugagcaacaagggcguggacaccgucagcguggggaacacccucuacuacgugaacaagcaggagggcaagucccuguacgucaagggggagcccaucaucaacuucuacgacccccugguguucccgagcgacgaguucgacgccuccaucagccaggugaacgagaagaucaaccagucccucgccuucauccggaaguccgacgagcugcugcacaacgucaacgccggcaaguccacgaccaacaucaugaucaccaccaucaucaucgugaucaucgugauccugcucagccugaucgccgucgggcugcuccuguacugcaaggcgcgcugaggacuaguaauaaggaaacuguaugaaugucugugggcaggaagugaagagauccuucuguaaagguuuuuggaauuaugucugcugaauaauaaacuuuuuugaaauaauaaaucugguagaaaaaugagaucuaaaaaaaaaaaaaaaaaaaaaaaaaaaaaaaaaaaaaaaaaaaaaaaaaaaaaaaaaaaaaaaaugcaucccccccccccccccccccccccccccccccaaaggcucuuuucagagccaccagaauu

SEQ ID NO: 1550 - RNA, 2048 nt, Artificial Sequence
  mRNA product Design g-4 comprising derived and/or modified sequence from HRSV(A2)__F-del_DSCav1 (opt2)
gggagacuccugucgggcggaaguaggaggaguagaguuuaaaaacaguacucuuuuuccgguucgggacguaguugaagcaacgacaagccggauaaccgcucuugagacaggaagcuuaccauggagcuccucauccucaaggccaacgccaucaccaccauccucaccgccgucaccuucugcuucgccuccggccagaacaucaccgaggaguucuaccaguccaccugcuccgccgucuccaagggcuaccucuccgcccuccgcaccggcugguacaccuccgucaucaccaucgagcucuccaacaucaaggagaacaagugcaacggcaccgacgccaaggucaagcucaucaagcaggagcucgacaaguacaagaacgccgucaccgagcuccagcuccucaugcaguccacccccgccaccaacaaccgcgcccgccgcgagcucccccgcuucaugaacuacacccucaacaacgccaagaagaccaacgucacccucuccaagaagcgcaagcgccgcuuccucggcuuccuccucggcgucggcuccgccaucgccuccggcgucgccgucugcaagguccuccaccucgagggcgaggucaacaagaucaaguccgcccuccucuccaccaacaaggccgucgucucccucuccaacggcgucuccguccucaccuucaagguccucgaccucaagaacuacaucgacaagcagcuccuccccauccucaacaagcaguccugcuccaucuccaacaucgagaccgucaucgaguuccagcagaagaacaaccgccuccucgagaucacccgcgaguucuccgucaacgccggcgucaccacccccgucuccaccuacaugcucaccaacuccgagcuccucucccucaucaacgacaugcccaucaccaacgaccagaagaagcucauguccaacaacguccagaucguccgccagcaguccuacuccaucaugugcaucaucaaggaggagguccucgccuacgucguccagcucccccucuacggcgucaucgacacccccugcuggaagcuccacaccuccccccucugcaccaccaacaccaaggagggcuccaacaucugccucacccgcaccgaccgcggcugguacugcgacaacgccggcuccgucuccuucuucccccaggccgagaccugcaagguccaguccaaccgcgucuucugcgacaccaugaacucccucacccuccccuccgaggucaaccucugcaacgucgacaucuucaaccccaaguacgacugcaagaucaugaccuccaagaccgacgucuccuccuccgucaucaccucccucggcgccaucgucuccugcuacggcaagaccaagugcaccgccuccaacaagaaccgcggcaucaucaagaccuucuccaacggcugcgacuacgucuccaacaagggcgucgacaccgucuccgucggcaacacccucuacuacgucaacaagcaggagggcaagucccucuacgucaagggcgagcccaucaucaacuucuacgacccccucgucuuccccuccgacgaguucgacgccuccaucucccaggucaacgagaagaucaaccagucccucgccuucauccgcaaguccgacgagcuccuccacaacgucaacgccggcaaguccaccaccaacaucaugaucaccaccaucaucaucgucaucaucgucauccuccucucccucaucgccgucggccuccuccucuacugcaaggcccgcugaggacuaguaauaaggaaacuguaugaaugucugugggcaggaagugaagagauccuucuguaaagguuuuuggaauuaugucugcugaauaauaaacuuuuuugaaauaauaaaucugguagaaaaaugagaucuaaaaaaaaaaaaaaaaaaaaaaaaaaaaaaaaaaaaaaaaaaaaaaaaaaaaaaaaaaaaaaaaugcaucccccccccccccccccccccccccccccccaaaggcucuuuucagagccaccagaauu

SEQ ID NO: 1551 - RNA, 2048 nt, Artificial Sequence
  mRNA product Design g-4 comprising derived and/or modified sequence from HRSV(A2)__F-del_DSCav1 (opt3)
gggagacuccugucgggcggaaguaggaggaguagaguuuaaaaacaguacucuuuuuccgguucgggacguaguugaagcaacgacaagccggauaaccgcucuugagacaggaagcuuaccauggagcugcucauccuuaaggccaacgcuauuaccacaauacugacugcagugacguucugcuuugccagcggccagaauaucaccgaagaguucuaccaauccacauguucugcggucucaaaaggguauuugagugcuuuaagaacuggaugguacaccagcguuauuacaaucgaacuguccaacauuaaggagaauaaaugcaacgguaccgacgccaaggugaaacuaaucaagcaggaacucgauaaguauaaaaaugcaguaacugagcugcagcuucugaugcagucuacacccgccaccaacaauagggcucggcgcgaguugccucgauuuaugaacuacacgcucaauaacgcaaagaaaacuaaugugacccugucgaagaaacguaagagaagguuccugggcuuucucuuaggggucggaucagccauagcuagcggcguggccguuuguaaggugcugcaccuugaaggugaggucaacaaaaucaagagugcguugcuguccacaaauaaagcagugguaucucuaagcaacgggguuuccgugcucacuuucaagguccuggaccuuaaaaauuauauugauaagcaacuguugccaauccucaacaaacagucaugcaguauuagcaacaucgaaaccgugauagaguuucagcagaagaauaaccggcuguuagagauuacacgcgaguucucugugaaugccggagucaccacgccgguuuccacuuacaugcugacaaacucagaacuccuuagccugaucaaugacaugcccauuaccaacgaucaaaagaaauugaugaguaauaacgugcagaucguaagacagcagucuuauuccaucauguguauuauaaaggaagaggugcuagcuuacgucgugcaacugccucucuacggcguuaucgacacuccaugcuggaaacugcauacaagcccccuuuguaccacgaauaccaaggaaggcucgaacauuugccugacaaggacugaucgggggugguauugugacaaugccggaucuguguccuuuuucccucaggcagagaccugcaaaguccagucaaaccgcguguuuugugauacaaugaauaguuugacucucccaagcgagguaaaccugugcaauguugacaucuucaaccccaaguacgauugcaagauaaugaccuccaaaacagacgugucuagcucagucauuaccaguuuaggugcuaucguguccuguuauggcaagacuaaaugcacggccagcaacaagaaucgagggaucauuaaaacauuuucuaacggaugugauuacgucucaaauaagggcguggacaccguuaguguggguaacacucuguauuacguaaauaagcaagaagggaaaagccuauaugucaagggagagccuaucauuaacuucuacgacccacucguguucccguccgaugaauuugacgcgucuauaucgcagguuaaugagaaaaucaaccagagccuggccuucauuagaaaguccgaugaacuuuugcacaaugugaacgcaggcaaaucaaccacaaauaucaugaucaccacuauuauaaucgucauuaucgugauucugcucagucugaucgcuguaggccuucuguuguacugcaaggccaggugaggacuaguaauaaggaaacuguaugaaugucugugggcaggaagugaagagauccuucuguaaagguuuuuggaauuaugucugcugaauaauaaacuuuuuugaaauaauaaaucugguagaaaaaugagaucuaaaaaaaaaaaaaaaaaaaaaaaaaaaaaaaaaaaaaaaaaaaaaaaaaaaaaaaaaaaaaaaaugcaucccccccccccccccccccccccccccccccaaaggcucuuuucagagccaccagaauu

SEQ ID NO: 1552 - RNA, 2048 nt, Artificial Sequence
  mRNA product Design g-4 comprising derived and/or modified sequence from HRSV(A2)__F-del_DSCav1 (opt4)
gggagacuccugucgggcggaaguaggaggaguagaguuuaaaaacaguacucuuuuuccgguucgggacguaguugaagcaacgacaagccggauaaccgcucuugagacaggaagcuuaccauggagcugcugauccugaaggccaacgccaucaccaccauccugaccgccgugaccuucugcuucgccagcggccagaacaucaccgaggaguucuaccagagcaccugcagcgccgugagcaagggcuaccugagcgcccugagaaccggcugguacaccagcgugaucaccaucgagcugagcaacaucaaggagaacaagugcaacggcaccgacgccaaggugaagcugaucaagcaggagcuggacaaguacaagaacgccgugaccgagcugcagcugcugaugcagagcacccccgccaccaacaacagagccagaagagagcugcccagauucaugaacuacacccugaacaacgccaagaagaccaacgugacccugagcaagaagagaaagagaagauuccugggcuuccugcugggcgugggcagcgccaucgccagcggcguggccgugugcaaggugcugcaccuggagggcgaggugaacaagaucaagagcgcccugcugagcaccaacaaggccguggugagccugagcaacggcgugagcgugcugaccuucaaggugcuggaccugaagaacuacaucgacaagcagcugcugcccauccugaacaagcagagcugcagcaucagcaacaucgagaccgugaucgaguuccagcagaagaacaacagacugcuggagaucaccagagaguucagcgugaacgccggcgugaccacccccgugagcaccuacaugcugaccaacagcgagcugcugagccugaucaacgacaugcccaucaccaacgaccagaagaagcugaugagcaacaacgugcagaucgugagacagcagagcuacagcaucaugugcaucaucaaggaggaggugcuggccuacguggugcagcugccccuguacggcgugaucgacacccccugcuggaagcugcacaccagcccccugugcaccaccaacaccaaggagggcagcaacaucugccugaccagaaccgacagaggcugguacugcgacaacgccggcagcgugagcuucuucccccaggccgagaccugcaaggugcagagcaacagaguguucugcgacaccaugaacagccugacccugcccagcgaggugaaccugugcaacguggacaucuucaaccccaaguacgacugcaagaucaugaccagcaagaccgacgugagcagcagcgugaucaccagccugggcgccaucgugagcugcuacggcaagaccaagugcaccgccagcaacaagaacagaggcaucaucaagaccuucagcaacggcugcgacuacgugagcaacaagggcguggacaccgugagcgugggcaacacccuguacuacgugaacaagcaggagggcaagagccuguacgugaagggcgagcccaucaucaacuucuacgacccccugguguuccccagcgacgaguucgacgccagcaucagccaggugaacgagaagaucaaccagagccuggccuucaucagaaagagcgacgagcugcugcacaacgugaacgccggcaagagcaccaccaacaucaugaucaccaccaucaucaucgugaucaucgugauccugcugagccugaucgccgugggccugcugcuguacugcaaggccagaugaggacuaguaauaaggaaacuguaugaaugucugugggcaggaagugaagagauccuucuguaaagguuuuuggaauuaugucugcugaauaauaaacuuuuuugaaauaauaaaucugguagaaaaaugagaucuaaaaaaaaaaaaaaaaaaaaaaaaaaaaaaaaaaaaaaaaaaaaaaaaaaaaaaaaaaaaaaaaugcaucccccccccccccccccccccccccccccccaaaggcucuuuucagagccaccagaauu

SEQ ID NO: 1553 - RNA, 2048 nt, Artificial Sequence
  mRNA product Design g-4 comprising derived and/or modified sequence from HRSV(A2)__F-del_DSCav1 (opt5)
gggagacuccugucgggcggaaguaggaggaguagaguuuaaaaacaguacucuuuuuccgguucgggacguaguugaagcaacgacaagccggauaaccgcucuugagacaggaagcuuaccauggagcugcucauccugaaggccaacgcuauuaccacaauccuuacggccgugaccuucugcuuugcgagcggccagaauauuacagaagaguucuaccaauccaccuguucugcugucagcaaaggguaucuguccgcccucagaacaggaugguacaccucuguuaucacaauugaacugagcaacaucaaggagaauaaaugcaacggcaccgacgccaaggugaaacuuaucaagcaggaacuggauaaguauaaaaaugcugugacggagcuccagcugcugaugcaguccacccccgccacaaacaaucgggcucgcagagagcucccucgguuuaugaacuacacccugaauaacgccaagaaaacaaaugucacccuuucuaagaaacgcaagagacgguuccugggguuucuccugggagugggcagcgcgauugccuccgggguugcuguguguaagguccuucaccuggaaggagaggugaacaaaaucaagagcgcccuccugucuacgaauaaagcuguugugucccugagcaacggcgucucugugcucacauucaaggugcuggaccuuaaaaauuauauugauaagcaacugcucccgauccugaacaaacaguccugcagcauuucuaacaucgaaaccgucauugaguuucagcagaagaauaaccgccuucuggagaucacaagagaauuuuccguuaaugccggcgugaccacccccgugagcacauacaugcucacgaacuccgagcugcugucucucaucaaugacaugccuauuaccaacgaucaaaagaaacugaugagcaauaacguccagaucgugcggcagcaguccuauagcauuauguguaucauuaaggaagagguucuugcguacgugguccaacugccccucuacggggugaucgacacaccuugcuggaaacugcauaccucuccccuuuguacaaccaauacgaaggaaggauccaacaucugccugacacgcaccgauagaggcugguauugugacaaugccgggagcguuucuuucuucccucaggcugagaccugcaaagugcagagcaaccgggucuuuugugauacaaugaacucccucacccugccgucugaggugaaucugugcaaugucgacauuuucaaccccaaguacgauugcaagaucaugacaagcaaaacggacguguccagcucuguuauuaccucccucggagccaucgugagcuguuauggcaagacaaaaugcaccgcuucuaacaagaaucgcgggauuaucaaaacauuuuccaacggaugugauuacgucagcaauaagggcguggacaccguuuccgugggcaacacgcuguauuacgucaauaagcaagaagggaaaucucuuuaugugaagggagagccuaucauuaacuucuacgacccccugguguucccuagcgaugaauuugacgccuccaucucucagguuaaugagaaaauuaaccagagccucgccuucaucagaaaguccgaugaacugcugcacaaugucaacgcuggcaaaagcaccacaaauauuaugaucaccacaauuaucaucgugauuaucgugauucuucucucucugaucgcggucgggcugcuccuguacugcaaggcccggugaggacuaguaauaaggaaacuguaugaaugucugugggcaggaagugaagagauccuucuguaaagguuuuuggaauuaugucugcugaauaauaaacuuuuuugaaauaauaaaucugguagaaaaaugagaucuaaaaaaaaaaaaaaaaaaaaaaaaaaaaaaaaaaaaaaaaaaaaaaaaaaaaaaaaaaaaaaaaugcaucccccccccccccccccccccccccccccccaaaggcucuuuucagagccaccagaauu

SEQ ID NO: 1554 - RNA, 2048 nt, Artificial Sequence
  mRNA product Design g-4 comprising derived and/or modified sequence from HRSV(A2)__F-del_DSCav1 (opt6)
gggagacuccugucgggcggaaguaggaggaguagaguuuaaaaacaguacucuuuuuccgguucgggacguaguugaagcaacgacaagccggauaaccgcucuugagacaggaagcuuaccauggaacuauuaauauuaaaagcaaaugcuauuaccacaauacuuacugcuguaaccuucugcuuugccucuggccaaaacauaacagaagaauuuuaucaaucaacuugcuccgcuguaagcaaaggcuaccuaucagcauuacgcaccggcugguacacaucaguaauaacaauagaacuauccaacauaaaagaaaauaaaugcaacggaacagacgcaaaaguaaaauuaauaaaacaagaacucgacaaauacaaaaacgcaguaacagaauuacaacuacuaaugcaaaguacuccagccaccaacaacagagcaagaagagaauuaccacgauuuaugaacuacacacuaaacaaugcaaaaaaaacaaacguaacacuaucaaaaaaacguaaacgcagauucuuaggcuuccuccuagguguaggcucagcaaucgccucaggaguggcaguuuguaaaguacuacaccuagaaggagaaguaaacaaaaucaaaucugcccuuuuaucgacaaacaaagcaguaguaucguuauccaauggagucucaguauugacauucaaaguauuagaccuaaaaaauuauauagauaaacaacucuuaccuaucuuaaauaaacaaagcugcucaauaaguaacauagaaaccguaauagaauuucaacaaaaaaacaauagacuccuugagaucacucgagaauuuucaguaaacgcagguguaacaacaccaguaagcacauacaugcuaacaaauagugaacuauuaucucuaauuaacgauaugcccauaaccaacgaucaaaaaaaacucaugaguaacaacguacaaauaguaagacaacaauccuauagcauaaugugcauuauaaaagaagaaguacuagcauauguaguccaacuaccacuauacggcguaauagacacaccaugcuggaaacuacacaccucaccccuaugcacaacaaauacaaaagaaggaucaaacauaugcuuaaccaggacagacagaggcugguacugcgauaacgcaggaucuguuucauucuucccccaagcagaaacaugcaaaguacaaucaaacagaguauuuugugauaccaugaacucacucacauuaccauccgaagucaaccucugcaacguagacauauucaaccccaaauacgacugcaaaauaaugaccucaaaaacagauguaucaucaucaguaaucacaucacuaggagcuaucguaucuuguuauggaaaaacaaaaugcacagcauccaacaaaaacagaggaauuaucaaaacauucucaaauggaugugacuauguaucaaacaaaggaguagacaccguaagcguaggcaauacacuauauuacguaaauaaacaagaaggaaaaucacuauacguaaaaggugaaccaauaauaaacuucuaugacccccuaguauucccaucagaugaauuugacgcaagcauaucacaagucaacgaaaaaauaaaccaaucacuggcauucauucgcaaaucagaugaacuucuccacaacguaaacgcugguaaaagcacuacaaacauaaugauaacaacaaucaucauugucauaauaguuauucuauuaucacuaaucgcaguaggauuacuacuauacuguaaagcgagguaaggacuaguaauaaggaaacuguaugaaugucugugggcaggaagugaagagauccuucuguaaagguuuuuggaauuaugucugcugaauaauaaacuuuuuugaaauaauaaaucugguagaaaaaugagaucuaaaaaaaaaaaaaaaaaaaaaaaaaaaaaaaaaaaaaaaaaaaaaaaaaaaaaaaaaaaaaaaaugcaucccccccccccccccccccccccccccccccaaaggcucuuuucagagccaccagaauu

SEQ ID NO: 1555 - RNA, 2048 nt, Artificial Sequence
  mRNA product Design g-4 comprising derived and/or modified sequence from HRSV(A2)__F-del_DSCav1 (opt11)
gggagacuccugucgggcggaaguaggaggaguagaguuuaaaaacaguacucuuuuuccgguucgggacguaguugaagcaacgacaagccggauaaccgcucuugagacaggaagcuuaccauggagcugcucauccugaaggccaacgccaucaccacaauccugacggcggugaccuucugcuucgccagcggccagaacaucaccgaggaguucuaccaguccacgugcagcgccgucuccaagggguaccucagcgcccugcgaaccggcugguacaccuccgugaucaccaucgagcugucaaacaucaaggagaacaagugcaacgggaccgaugccaagguuaagcucaucaagcaggagcuggacaaguacaagaacgcggucacggagcugcagcuccugaugcaguccacuccggcaaccaacaaccgcgccaggcgcgagcugccccgguucaugaacuacacccucaacaacgccaagaagacgaaugugacccugagcaagaagcgcaagcggcgcuuccugggcuuccuccuaggggugggcuccgccaucgcgagcggcgucgccgugugcaagguguugcaccucgagggggaggucaacaagaucaagagcgcccugcuguccaccaacaaggccgugguaagccucuccaacggcgucagcguucugaccuucaaggugcuggaccucaagaacuauaucgacaagcagcugcugcccauccugaacaagcagagcugcuccaucucaaacaucgaaacggugauugaguuccagcagaagaacaaccggcuccuggaaaucacccgcgaguucagcgugaacgccggggucaccacccccguguccacguacaugcugaccaacagcgagcuccuaucccugaucaacgacaugccgaucaccaacgaccagaagaagcucaugagcaacaacgugcagaucguccggcagcaguccuacagcaucaugugcaucaucaaggaagaggugcuggcguacgugguccagcugccccucuacggcgugaucgacacccccugcuggaagcugcacacgagcccccugugcacaaccaacaccaaggagggguccaacaucugccucacgcgcaccgaccggggcugguacugcgacaacgccggcagcgucuccuucuucccgcaggccgagaccugcaaggugcagagcaaccgcguguucugcgacaccaugaacucccugacgcugcccucugagguaaaccucugcaacgucgacaucuucaaccccaaguacgacugcaagaucaugaccuccaagacagacgugagcuccagcgugaucacaucccugggggccaucgucagcugcuacggcaagacuaaguguacugccagcaacaagaaccgggggaucaucaagaccuucuccaacggcugcgacuacgugagcaacaagggcguggacaccguguccgucgggaacacccuguacuacguuaauaagcaggagggcaagagccucuacgugaaaggggagcccaucauuaacuucuacgacccacugguuuuccccuccgacgaguucgacgcgagcaucucccaggugaacgagaagaucaaccagagccuggccuucauccgcaaguccgacgagcugcuccacaacgugaacgccggcaagagcacgaccaacaucaugaucaccaccaucaucaucgugaucaucgugauucugcugucccucaucgccguggggcugcugcuuuacugcaaggcccggugaggacuaguaauaaggaaacuguaugaaugucugugggcaggaagugaagagauccuucuguaaagguuuuuggaauuaugucugcugaauaauaaacuuuuuugaaauaauaaaucugguagaaaaaugagaucuaaaaaaaaaaaaaaaaaaaaaaaaaaaaaaaaaaaaaaaaaaaaaaaaaaaaaaaaaaaaaaaaugcaucccccccccccccccccccccccccccccccaaaggcucuuuucagagccaccagaauu

SEQ ID NO: 1556 - RNA, 2024 nt, Artificial Sequence
  mRNA product Design g-5 comprising derived and/or modified sequence from HRSV(A2)__F-del_DSCav1 (opt1)
gggagacccgugacccggaaguuguacggcuacgcgacuuucccucccacaaacccucgcgcccuuccuuuccuacuugggcccggcagaaagcuuaccauggagcugcucauccugaaggccaacgccaucaccaccauccugacggcggugaccuucugcuucgccagcggccagaacaucaccgaggaguucuaccaguccacgugcagcgccgucuccaagggguaccucagcgcccugcggaccggcugguacaccuccgugaucaccaucgagcugagcaacaucaaggagaacaagugcaacgggaccgacgccaaggugaagcucaucaagcaggagcuggacaaguacaagaacgcggucacggagcugcagcuccugaugcaguccaccccggcaaccaacaaccgcgcccggcgcgagcugccccgguucaugaacuacacccucaacaacgccaagaagacgaacgugacccugagcaagaagcgcaagcggcgcuuccugggcuuccuccugggggugggcuccgccaucgcgagcggcgucgccgugugcaaggugcugcaccucgagggggaggucaacaagaucaagagcgcccugcuguccaccaacaaggccguggugagccucuccaacggcgucagcgugcugaccuucaaggugcuggaccucaagaacuacaucgacaagcagcugcugcccauccugaacaagcagagcugcuccaucagcaacaucgagacggugaucgaguuccagcagaagaacaaccggcuccuggagaucacccgcgaguucagcgugaacgccggggucaccacccccguguccacguacaugcugaccaacagcgagcuccugucccugaucaacgacaugccgaucaccaacgaccagaagaagcucaugagcaacaacgugcagaucguccggcagcaguccuacagcaucaugugcaucaucaaggaggaggugcuggcguacgugguccagcugccccucuacggcgugaucgacacccccugcuggaagcugcacacgagcccccugugcaccaccaacaccaaggagggguccaacaucugccucacgcgcaccgaccggggcugguacugcgacaacgccggcagcgucuccuucuucccgcaggccgagaccugcaaggugcagagcaaccgcguguucugcgacaccaugaacucccugacgcugcccagcgagguaaaccucugcaacgucgacaucuucaaccccaaguacgacugcaagaucaugaccuccaagaccgacgugagcuccagcgugaucaccucccugggggccaucgucagcugcuacggcaagacgaagugcaccgccagcaacaagaaccgggggaucaucaagaccuucuccaacggcugcgacuacgugagcaacaagggcguggacaccguguccgucgggaacacccuguacuacgugaacaagcaggagggcaagagccucuacgugaagggggagcccaucaucaacuucuacgacccgcuggucuuccccuccgacgaguucgacgcgagcaucucccaggugaacgagaagaucaaccagagccuggccuucauccgcaaguccgacgagcugcuccacaacgugaacgccggcaagagcacgaccaacaucaugaucaccaccaucaucaucgucaucaucgugauccugcugucccucaucgccguggggcugcugcucuacugcaaggcccggugaggacuaguaauaaggaaacuguaugaaugucugugggcaggaagugaagagauccuucuguaaagguuuuuggaauuaugucugcugaauaauaaacuuuuuugaaauaauaaaucugguagaaaaaugagaucuaaaaaaaaaaaaaaaaaaaaaaaaaaaaaaaaaaaaaaaaaaaaaaaaaaaaaaaaaaaaaaaaugcaucccccccccccccccccccccccccccccccaaaggcucuuuucagagccaccagaauu

SEQ ID NO: 1557 - RNA, 2024 nt, Artificial Sequence
  mRNA product Design g-5 comprising derived and/or modified sequence from HRSV(A2)__F-del_DSCav1 (opt1)
gggagacccgugacccggaaguuguacggcuacgcgacuuucccucccacaaacccucgcgcccuuccuuuccuacuugggcccggcagaaagcuuaccauggagcugcucauccugaaggccaacgccaucaccaccauccugacggcggugaccuucugcuucgccagcggccagaacaucaccgaggaguucuaccaguccacgugcagcgccgucuccaagggguaccucagcgcccugcgcaccggcugguacaccuccgugaucaccaucgagcugagcaacaucaaggagaacaagugcaacgggaccgacgccaaggugaagcucaucaagcaggagcuggacaaguacaagaacgcggucacggagcugcagcuccugaugcaguccacccccgccaccaacaaccgggcccgccgggagcugccgcgcuucaugaacuacacccucaacaacgccaagaagacgaacgugacccugagcaagaagcggaagcgccgguuccugggcuuccuccugggggugggcuccgcgaucgccagcggcgucgccgugugcaaggugcugcaccucgagggggaggucaacaagaucaaguccgcccugcugagcaccaacaaggccguggugucccucagcaacggcgucuccgugcugaccuucaaggugcuggaccucaagaacuacaucgacaagcagcugcugcccauccucaacaagcagagcugcuccaucagcaacaucgagacggucaucgaguuccagcagaagaacaaccgccugcuggagaucacccgggaguucuccgugaacgcgggggugaccacccccgucagcacguacaugcucaccaacagcgagcugcugucccucaucaacgacaugcccaucaccaacgaccagaagaagcugaugagcaacaacgugcagaucgugcgccagcaguccuacagcaucaugugcaucaucaaggaggagguccuggccuacguggugcagcucccgcuguacggcgucaucgacacccccugcuggaagcugcacacgagcccccucugcaccaccaacaccaaggaggggagcaacaucugccugacgcggaccgaccgcggcugguacugcgacaacgccggcuccgugagcuucuucccccaggccgagaccugcaagguccaguccaaccggguguucugcgacaccaugaacagccugacgcucccguccgaggugaaccugugcaacgucgacaucuucaaccccaaguacgacugcaagaucaugaccagcaagaccgacguguccagcuccgugaucaccagccugggggccaucgucuccugcuacggcaagacgaagugcaccgcgagcaacaagaaccgcgggaucaucaagaccuucuccaacggcugcgacuacgugagcaacaagggcguggacaccgucagcguggggaacacccucuacuacgugaacaagcaggagggcaagucccuguacgucaagggggagcccaucaucaacuucuacgacccccugguguucccgagcgacgaguucgacgccuccaucagccaggugaacgagaagaucaaccagucccucgccuucauccggaaguccgacgagcugcugcacaacgucaacgccggcaaguccacgaccaacaucaugaucaccaccaucaucaucgugaucaucgugauccugcucagccugaucgccgucgggcugcuccuguacugcaaggcgcgcugaggacuaguaauaaggaaacuguaugaaugucugugggcaggaagugaagagauccuucuguaaagguuuuuggaauuaugucugcugaauaauaaacuuuuuugaaauaauaaaucugguagaaaaaugagaucuaaaaaaaaaaaaaaaaaaaaaaaaaaaaaaaaaaaaaaaaaaaaaaaaaaaaaaaaaaaaaaaaugcaucccccccccccccccccccccccccccccccaaaggcucuuuucagagccaccagaauu

SEQ ID NO: 1558 - RNA, 2024 nt, Artificial Sequence
  mRNA product Design g-5 comprising derived and/or modified sequence from HRSV(A2)__F-del_DSCav1 (opt2)
gggagacccgugacccggaaguuguacggcuacgcgacuuucccucccacaaacccucgcgcccuuccuuuccuacuugggcccggcagaaagcuuaccauggagcuccucauccucaaggccaacgccaucaccaccauccucaccgccgucaccuucugcuucgccuccggccagaacaucaccgaggaguucuaccaguccaccugcuccgccgucuccaagggcuaccucuccgcccuccgcaccggcugguacaccuccgucaucaccaucgagcucuccaacaucaaggagaacaagugcaacggcaccgacgccaaggucaagcucaucaagcaggagcucgacaaguacaagaacgccgucaccgagcuccagcuccucaugcaguccacccccgccaccaacaaccgcgcccgccgcgagcucccccgcuucaugaacuacacccucaacaacgccaagaagaccaacgucacccucuccaagaagcgcaagcgccgcuuccucggcuuccuccucggcgucggcuccgccaucgccuccggcgucgccgucugcaagguccuccaccucgagggcgaggucaacaagaucaaguccgcccuccucuccaccaacaaggccgucgucucccucuccaacggcgucuccguccucaccuucaagguccucgaccucaagaacuacaucgacaagcagcuccuccccauccucaacaagcaguccugcuccaucuccaacaucgagaccgucaucgaguuccagcagaagaacaaccgccuccucgagaucacccgcgaguucuccgucaacgccggcgucaccacccccgucuccaccuacaugcucaccaacuccgagcuccucucccucaucaacgacaugcccaucaccaacgaccagaagaagcucauguccaacaacguccagaucguccgccagcaguccuacuccaucaugugcaucaucaaggaggagguccucgccuacgucguccagcucccccucuacggcgucaucgacacccccugcuggaagcuccacaccuccccccucugcaccaccaacaccaaggagggcuccaacaucugccucacccgcaccgaccgcggcugguacugcgacaacgccggcuccgucuccuucuucccccaggccgagaccugcaagguccaguccaaccgcgucuucugcgacaccaugaacucccucacccuccccuccgaggucaaccucugcaacgucgacaucuucaaccccaaguacgacugcaagaucaugaccuccaagaccgacgucuccuccuccgucaucaccucccucggcgccaucgucuccugcuacggcaagaccaagugcaccgccuccaacaagaaccgcggcaucaucaagaccuucuccaacggcugcgacuacgucuccaacaagggcgucgacaccgucuccgucggcaacacccucuacuacgucaacaagcaggagggcaagucccucuacgucaagggcgagcccaucaucaacuucuacgacccccucgucuuccccuccgacgaguucgacgccuccaucucccaggucaacgagaagaucaaccagucccucgccuucauccgcaaguccgacgagcuccuccacaacgucaacgccggcaaguccaccaccaacaucaugaucaccaccaucaucaucgucaucaucgucauccuccucucccucaucgccgucggccuccuccucuacugcaaggcccgcugaggacuaguaauaaggaaacuguaugaaugucugugggcaggaagugaagagauccuucuguaaagguuuuuggaauuaugucugcugaauaauaaacuuuuuugaaauaauaaaucugguagaaaaaugagaucuaaaaaaaaaaaaaaaaaaaaaaaaaaaaaaaaaaaaaaaaaaaaaaaaaaaaaaaaaaaaaaaaugcaucccccccccccccccccccccccccccccccaaaggcucuuuucagagccaccagaauu

SEQ ID NO: 1559 - RNA, 2024 nt, Artificial Sequence
  mRNA product Design g-5 comprising derived and/or modified sequence from HRSV(A2)__F-del_DSCav1 (opt3)
gggagacccgugacccggaaguuguacggcuacgcgacuuucccucccacaaacccucgcgcccuuccuuuccuacuugggcccggcagaaagcuuaccauggagcugcucauccuuaaggccaacgcuauuaccacaauacugacugcagugacguucugcuuugccagcggccagaauaucaccgaagaguucuaccaauccacauguucugcggucucaaaaggguauuugagugcuuuaagaacuggaugguacaccagcguuauuacaaucgaacuguccaacauuaaggagaauaaaugcaacgguaccgacgccaaggugaaacuaaucaagcaggaacucgauaaguauaaaaaugcaguaacugagcugcagcuucugaugcagucuacacccgccaccaacaauagggcucggcgcgaguugccucgauuuaugaacuacacgcucaauaacgcaaagaaaacuaaugugacccugucgaagaaacguaagagaagguuccugggcuuucucuuaggggucggaucagccauagcuagcggcguggccguuuguaaggugcugcaccuugaaggugaggucaacaaaaucaagagugcguugcuguccacaaauaaagcagugguaucucuaagcaacgggguuuccgugcucacuuucaagguccuggaccuuaaaaauuauauugauaagcaacuguugccaauccucaacaaacagucaugcaguauuagcaacaucgaaaccgugauagaguuucagcagaagaauaaccggcuguuagagauuacacgcgaguucucugugaaugccggagucaccacgccgguuuccacuuacaugcugacaaacucagaacuccuuagccugaucaaugacaugcccauuaccaacgaucaaaagaaauugaugaguaauaacgugcagaucguaagacagcagucuuauuccaucauguguauuauaaaggaagaggugcuagcuuacgucgugcaacugccucucuacggcguuaucgacacuccaugcuggaaacugcauacaagcccccuuuguaccacgaauaccaaggaaggcucgaacauuugccugacaaggacugaucgggggugguauugugacaaugccggaucuguguccuuuuucccucaggcagagaccugcaaaguccagucaaaccgcguguuuugugauacaaugaauaguuugacucucccaagcgagguaaaccugugcaauguugacaucuucaaccccaaguacgauugcaagauaaugaccuccaaaacagacgugucuagcucagucauuaccaguuuaggugcuaucguguccuguuauggcaagacuaaaugcacggccagcaacaagaaucgagggaucauuaaaacauuuucuaacggaugugauuacgucucaaauaagggcguggacaccguuaguguggguaacacucuguauuacguaaauaagcaagaagggaaaagccuauaugucaagggagagccuaucauuaacuucuacgacccacucguguucccguccgaugaauuugacgcgucuauaucgcagguuaaugagaaaaucaaccagagccuggccuucauuagaaaguccgaugaacuuuugcacaaugugaacgcaggcaaaucaaccacaaauaucaugaucaccacuauuauaaucgucauuaucgugauucugcucagucugaucgcuguaggccuucuguuguacugcaaggccaggugaggacuaguaauaaggaaacuguaugaaugucugugggcaggaagugaagagauccuucuguaaagguuuuuggaauuaugucugcugaauaauaaacuuuuuugaaauaauaaaucugguagaaaaaugagaucuaaaaaaaaaaaaaaaaaaaaaaaaaaaaaaaaaaaaaaaaaaaaaaaaaaaaaaaaaaaaaaaaugcaucccccccccccccccccccccccccccccccaaaggcucuuuucagagccaccagaauu

SEQ ID NO: 1560 - RNA, 2024 nt, Artificial Sequence
  mRNA product Design g-5 comprising derived and/or modified sequence from HRSV(A2)__F-del_DSCav1 (opt4)
gggagacccgugacccggaaguuguacggcuacgcgacuuucccucccacaaacccucgcgcccuuccuuuccuacuugggcccggcagaaagcuuaccauggagcugcugauccugaaggccaacgccaucaccaccauccugaccgccgugaccuucugcuucgccagcggccagaacaucaccgaggaguucuaccagagcaccugcagcgccgugagcaagggcuaccugagcgcccugagaaccggcugguacaccagcgugaucaccaucgagcugagcaacaucaaggagaacaagugcaacggcaccgacgccaaggugaagcugaucaagcaggagcuggacaaguacaagaacgccgugaccgagcugcagcugcugaugcagagcacccccgccaccaacaacagagccagaagagagcugcccagauucaugaacuacacccugaacaacgccaagaagaccaacgugacccugagcaagaagagaaagagaagauuccugggcuuccugcugggcgugggcagcgccaucgccagcggcguggccgugugcaaggugcugcaccuggagggcgaggugaacaagaucaagagcgcccugcugagcaccaacaaggccguggugagccugagcaacggcgugagcgugcugaccuucaaggugcuggaccugaagaacuacaucgacaagcagcugcugcccauccugaacaagcagagcugcagcaucagcaacaucgagaccgugaucgaguuccagcagaagaacaacagacugcuggagaucaccagagaguucagcgugaacgccggcgugaccacccccgugagcaccuacaugcugaccaacagcgagcugcugagccugaucaacgacaugcccaucaccaacgaccagaagaagcugaugagcaacaacgugcagaucgugagacagcagagcuacagcaucaugugcaucaucaaggaggaggugcuggccuacguggugcagcugccccuguacggcgugaucgacacccccugcuggaagcugcacaccagcccccugugcaccaccaacaccaaggagggcagcaacaucugccugaccagaaccgacagaggcugguacugcgacaacgccggcagcgugagcuucuucccccaggccgagaccugcaaggugcagagcaacagaguguucugcgacaccaugaacagccugacccugcccagcgaggugaaccugugcaacguggacaucuucaaccccaaguacgacugcaagaucaugaccagcaagaccgacgugagcagcagcgugaucaccagccugggcgccaucgugagcugcuacggcaagaccaagugcaccgccagcaacaagaacagaggcaucaucaagaccuucagcaacggcugcgacuacgugagcaacaagggcguggacaccgugagcgugggcaacacccuguacuacgugaacaagcaggagggcaagagccuguacgugaagggcgagcccaucaucaacuucuacgacccccugguguuccccagcgacgaguucgacgccagcaucagccaggugaacgagaagaucaaccagagccuggccuucaucagaaagagcgacgagcugcugcacaacgugaacgccggcaagagcaccaccaacaucaugaucaccaccaucaucaucgugaucaucgugauccugcugagccugaucgccgugggccugcugcuguacugcaaggccagaugaggacuaguaauaaggaaacuguaugaaugucugugggcaggaagugaagagauccuucuguaaagguuuuuggaauuaugucugcugaauaauaaacuuuuuugaaauaauaaaucugguagaaaaaugagaucuaaaaaaaaaaaaaaaaaaaaaaaaaaaaaaaaaaaaaaaaaaaaaaaaaaaaaaaaaaaaaaaaugcaucccccccccccccccccccccccccccccccaaaggcucuuuucagagccaccagaauu

SEQ ID NO: 1561 - RNA, 2024 nt, Artificial Sequence
  mRNA product Design g-5 comprising derived and/or modified sequence from HRSV(A2)__F-del_DSCav1 (opt5)
gggagacccgugacccggaaguuguacggcuacgcgacuuucccucccacaaacccucgcgcccuuccuuuccuacuugggcccggcagaaagcuuaccauggagcugcucauccugaaggccaacgcuauuaccacaauccuuacggccgugaccuucugcuuugcgagcggccagaauauuacagaagaguucuaccaauccaccuguucugcugucagcaaaggguaucuguccgcccucagaacaggaugguacaccucuguuaucacaauugaacugagcaacaucaaggagaauaaaugcaacggcaccgacgccaaggugaaacuuaucaagcaggaacuggauaaguauaaaaaugcugugacggagcuccagcugcugaugcaguccacccccgccacaaacaaucgggcucgcagagagcucccucgguuuaugaacuacacccugaauaacgccaagaaaacaaaugucacccuuucuaagaaacgcaagagacgguuccugggguuucuccugggagugggcagcgcgauugccuccgggguugcuguguguaagguccuucaccuggaaggagaggugaacaaaaucaagagcgcccuccugucuacgaauaaagcuguugugucccugagcaacggcgucucugugcucacauucaaggugcuggaccuuaaaaauuauauugauaagcaacugcucccgauccugaacaaacaguccugcagcauuucuaacaucgaaaccgucauugaguuucagcagaagaauaaccgccuucuggagaucacaagagaauuuuccguuaaugccggcgugaccacccccgugagcacauacaugcucacgaacuccgagcugcugucucucaucaaugacaugccuauuaccaacgaucaaaagaaacugaugagcaauaacguccagaucgugcggcagcaguccuauagcauuauguguaucauuaaggaagagguucuugcguacgugguccaacugccccucuacggggugaucgacacaccuugcuggaaacugcauaccucuccccuuuguacaaccaauacgaaggaaggauccaacaucugccugacacgcaccgauagaggcugguauugugacaaugccgggagcguuucuuucuucccucaggcugagaccugcaaagugcagagcaaccgggucuuuugugauacaaugaacucccucacccugccgucugaggugaaucugugcaaugucgacauuuucaaccccaaguacgauugcaagaucaugacaagcaaaacggacguguccagcucuguuauuaccucccucggagccaucgugagcuguuauggcaagacaaaaugcaccgcuucuaacaagaaucgcgggauuaucaaaacauuuuccaacggaugugauuacgucagcaauaagggcguggacaccguuuccgugggcaacacgcuguauuacgucaauaagcaagaagggaaaucucuuuaugugaagggagagccuaucauuaacuucuacgacccccugguguucccuagcgaugaauuugacgccuccaucucucagguuaaugagaaaauuaaccagagccucgccuucaucagaaaguccgaugaacugcugcacaaugucaacgcuggcaaaagcaccacaaauauuaugaucaccacaauuaucaucgugauuaucgugauucuucucucucugaucgcggucgggcugcuccuguacugcaaggcccggugaggacuaguaauaaggaaacuguaugaaugucugugggcaggaagugaagagauccuucuguaaagguuuuuggaauuaugucugcugaauaauaaacuuuuuugaaauaauaaaucugguagaaaaaugagaucuaaaaaaaaaaaaaaaaaaaaaaaaaaaaaaaaaaaaaaaaaaaaaaaaaaaaaaaaaaaaaaaaugcaucccccccccccccccccccccccccccccccaaaggcucuuuucagagccaccagaauu

SEQ ID NO: 1562 - RNA, 2024 nt, Artificial Sequence
  mRNA product Design g-5 comprising derived and/or modified sequence from HRSV(A2)__F-del_DSCav1 (opt6)
gggagacccgugacccggaaguuguacggcuacgcgacuuucccucccacaaacccucgcgcccuuccuuuccuacuugggcccggcagaaagcuuaccauggaacuauuaauauuaaaagcaaaugcuauuaccacaauacuuacugcuguaaccuucugcuuugccucuggccaaaacauaacagaagaauuuuaucaaucaacuugcuccgcuguaagcaaaggcuaccuaucagcauuacgcaccggcugguacacaucaguaauaacaauagaacuauccaacauaaaagaaaauaaaugcaacggaacagacgcaaaaguaaaauuaauaaaacaagaacucgacaaauacaaaaacgcaguaacagaauuacaacuacuaaugcaaaguacuccagccaccaacaacagagcaagaagagaauuaccacgauuuaugaacuacacacuaaacaaugcaaaaaaaacaaacguaacacuaucaaaaaaacguaaacgcagauucuuaggcuuccuccuagguguaggcucagcaaucgccucaggaguggcaguuuguaaaguacuacaccuagaaggagaaguaaacaaaaucaaaucugcccuuuuaucgacaaacaaagcaguaguaucguuauccaauggagucucaguauugacauucaaaguauuagaccuaaaaaauuauauagauaaacaacucuuaccuaucuuaaauaaacaaagcugcucaauaaguaacauagaaaccguaauagaauuucaacaaaaaaacaauagacuccuugagaucacucgagaauuuucaguaaacgcagguguaacaacaccaguaagcacauacaugcuaacaaauagugaacuauuaucucuaauuaacgauaugcccauaaccaacgaucaaaaaaaacucaugaguaacaacguacaaauaguaagacaacaauccuauagcauaaugugcauuauaaaagaagaaguacuagcauauguaguccaacuaccacuauacggcguaauagacacaccaugcuggaaacuacacaccucaccccuaugcacaacaaauacaaaagaaggaucaaacauaugcuuaaccaggacagacagaggcugguacugcgauaacgcaggaucuguuucauucuucccccaagcagaaacaugcaaaguacaaucaaacagaguauuuugugauaccaugaacucacucacauuaccauccgaagucaaccucugcaacguagacauauucaaccccaaauacgacugcaaaauaaugaccucaaaaacagauguaucaucaucaguaaucacaucacuaggagcuaucguaucuuguuauggaaaaacaaaaugcacagcauccaacaaaaacagaggaauuaucaaaacauucucaaauggaugugacuauguaucaaacaaaggaguagacaccguaagcguaggcaauacacuauauuacguaaauaaacaagaaggaaaaucacuauacguaaaaggugaaccaauaauaaacuucuaugacccccuaguauucccaucagaugaauuugacgcaagcauaucacaagucaacgaaaaaauaaaccaaucacuggcauucauucgcaaaucagaugaacuucuccacaacguaaacgcugguaaaagcacuacaaacauaaugauaacaacaaucaucauugucauaauaguuauucuauuaucacuaaucgcaguaggauuacuacuauacuguaaagcgagguaaggacuaguaauaaggaaacuguaugaaugucugugggcaggaagugaagagauccuucuguaaagguuuuuggaauuaugucugcugaauaauaaacuuuuuugaaauaauaaaucugguagaaaaaugagaucuaaaaaaaaaaaaaaaaaaaaaaaaaaaaaaaaaaaaaaaaaaaaaaaaaaaaaaaaaaaaaaaaugcaucccccccccccccccccccccccccccccccaaaggcucuuuucagagccaccagaauu

SEQ ID NO: 1563 - RNA, 2024 nt, Artificial Sequence
  mRNA product Design g-5 comprising derived and/or modified sequence from HRSV(A2)__F-del_DSCav1 (opt11)
gggagacccgugacccggaaguuguacggcuacgcgacuuucccucccacaaacccucgcgcccuuccuuuccuacuugggcccggcagaaagcuuaccauggagcugcucauccugaaggccaacgccaucaccacaauccugacggcggugaccuucugcuucgccagcggccagaacaucaccgaggaguucuaccaguccacgugcagcgccgucuccaagggguaccucagcgcccugcgaaccggcugguacaccuccgugaucaccaucgagcugucaaacaucaaggagaacaagugcaacgggaccgaugccaagguuaagcucaucaagcaggagcuggacaaguacaagaacgcggucacggagcugcagcuccugaugcaguccacuccggcaaccaacaaccgcgccaggcgcgagcugccccgguucaugaacuacacccucaacaacgccaagaagacgaaugugacccugagcaagaagcgcaagcggcgcuuccugggcuuccuccuaggggugggcuccgccaucgcgagcggcgucgccgugugcaagguguugcaccucgagggggaggucaacaagaucaagagcgcccugcuguccaccaacaaggccgugguaagccucuccaacggcgucagcguucugaccuucaaggugcuggaccucaagaacuauaucgacaagcagcugcugcccauccugaacaagcagagcugcuccaucucaaacaucgaaacggugauugaguuccagcagaagaacaaccggcuccuggaaaucacccgcgaguucagcgugaacgccggggucaccacccccguguccacguacaugcugaccaacagcgagcuccuaucccugaucaacgacaugccgaucaccaacgaccagaagaagcucaugagcaacaacgugcagaucguccggcagcaguccuacagcaucaugugcaucaucaaggaagaggugcuggcguacgugguccagcugccccucuacggcgugaucgacacccccugcuggaagcugcacacgagcccccugugcacaaccaacaccaaggagggguccaacaucugccucacgcgcaccgaccggggcugguacugcgacaacgccggcagcgucuccuucuucccgcaggccgagaccugcaaggugcagagcaaccgcguguucugcgacaccaugaacucccugacgcugcccucugagguaaaccucugcaacgucgacaucuucaaccccaaguacgacugcaagaucaugaccuccaagacagacgugagcuccagcgugaucacaucccugggggccaucgucagcugcuacggcaagacuaaguguacugccagcaacaagaaccgggggaucaucaagaccuucuccaacggcugcgacuacgugagcaacaagggcguggacaccguguccgucgggaacacccuguacuacguuaauaagcaggagggcaagagccucuacgugaaaggggagcccaucauuaacuucuacgacccacugguuuuccccuccgacgaguucgacgcgagcaucucccaggugaacgagaagaucaaccagagccuggccuucauccgcaaguccgacgagcugcuccacaacgugaacgccggcaagagcacgaccaacaucaugaucaccaccaucaucaucgugaucaucgugauucugcugucccucaucgccguggggcugcugcuuuacugcaaggcccggugaggacuaguaauaaggaaacuguaugaaugucugugggcaggaagugaagagauccuucuguaaagguuuuuggaauuaugucugcugaauaauaaacuuuuuugaaauaauaaaucugguagaaaaaugagaucuaaaaaaaaaaaaaaaaaaaaaaaaaaaaaaaaaaaaaaaaaaaaaaaaaaaaaaaaaaaaaaaaugcaucccccccccccccccccccccccccccccccaaaggcucuuuucagagccaccagaauu

SEQ ID NO: 1564 - RNA, 2040 nt, Artificial Sequence
  mRNA product Design h-1 comprising derived and/or modified sequence from HRSV(A2)__F-del_DSCav1 (opt1)
gggagacccgugacccggaaguuguacggcuacgcgacuuucccucccacaaacccucgcgcccuuccuuuccuacuugggcccggcagaaagcuuaccauggagcugcucauccugaaggccaacgccaucaccaccauccugacggcggugaccuucugcuucgccagcggccagaacaucaccgaggaguucuaccaguccacgugcagcgccgucuccaagggguaccucagcgcccugcggaccggcugguacaccuccgugaucaccaucgagcugagcaacaucaaggagaacaagugcaacgggaccgacgccaaggugaagcucaucaagcaggagcuggacaaguacaagaacgcggucacggagcugcagcuccugaugcaguccaccccggcaaccaacaaccgcgcccggcgcgagcugccccgguucaugaacuacacccucaacaacgccaagaagacgaacgugacccugagcaagaagcgcaagcggcgcuuccugggcuuccuccugggggugggcuccgccaucgcgagcggcgucgccgugugcaaggugcugcaccucgagggggaggucaacaagaucaagagcgcccugcuguccaccaacaaggccguggugagccucuccaacggcgucagcgugcugaccuucaaggugcuggaccucaagaacuacaucgacaagcagcugcugcccauccugaacaagcagagcugcuccaucagcaacaucgagacggugaucgaguuccagcagaagaacaaccggcuccuggagaucacccgcgaguucagcgugaacgccggggucaccacccccguguccacguacaugcugaccaacagcgagcuccugucccugaucaacgacaugccgaucaccaacgaccagaagaagcucaugagcaacaacgugcagaucguccggcagcaguccuacagcaucaugugcaucaucaaggaggaggugcuggcguacgugguccagcugccccucuacggcgugaucgacacccccugcuggaagcugcacacgagcccccugugcaccaccaacaccaaggagggguccaacaucugccucacgcgcaccgaccggggcugguacugcgacaacgccggcagcgucuccuucuucccgcaggccgagaccugcaaggugcagagcaaccgcguguucugcgacaccaugaacucccugacgcugcccagcgagguaaaccucugcaacgucgacaucuucaaccccaaguacgacugcaagaucaugaccuccaagaccgacgugagcuccagcgugaucaccucccugggggccaucgucagcugcuacggcaagacgaagugcaccgccagcaacaagaaccgggggaucaucaagaccuucuccaacggcugcgacuacgugagcaacaagggcguggacaccguguccgucgggaacacccuguacuacgugaacaagcaggagggcaagagccucuacgugaagggggagcccaucaucaacuucuacgacccgcuggucuuccccuccgacgaguucgacgcgagcaucucccaggugaacgagaagaucaaccagagccuggccuucauccgcaaguccgacgagcugcuccacaacgugaacgccggcaagagcacgaccaacaucaugaucaccaccaucaucaucgucaucaucgugauccugcugucccucaucgccguggggcugcugcucuacugcaaggcccggugaggacuaguacuggcugcaucucccuuuccucuguccuccauccuucucccaggauggugaagggggaccugguacccagugauccccaccccaggauccuaaaucaugacuuaccugcuaauaaaaacucauuggaaaagugagaagaucuaaaaaaaaaaaaaaaaaaaaaaaaaaaaaaaaaaaaaaaaaaaaaaaaaaaaaaaaaaaaaaaaugcaucccccccccccccccccccccccccccccccaaaggcucuuuucagagccaccagaauu

SEQ ID NO: 1565 - RNA, 2040 nt, Artificial Sequence
  mRNA product Design h-1 comprising derived and/or modified sequence from HRSV(A2)__F-del_DSCav1 (opt1)
gggagacccgugacccggaaguuguacggcuacgcgacuuucccucccacaaacccucgcgcccuuccuuuccuacuugggcccggcagaaagcuuaccauggagcugcucauccugaaggccaacgccaucaccaccauccugacggcggugaccuucugcuucgccagcggccagaacaucaccgaggaguucuaccaguccacgugcagcgccgucuccaagggguaccucagcgcccugcgcaccggcugguacaccuccgugaucaccaucgagcugagcaacaucaaggagaacaagugcaacgggaccgacgccaaggugaagcucaucaagcaggagcuggacaaguacaagaacgcggucacggagcugcagcuccugaugcaguccacccccgccaccaacaaccgggcccgccgggagcugccgcgcuucaugaacuacacccucaacaacgccaagaagacgaacgugacccugagcaagaagcggaagcgccgguuccugggcuuccuccugggggugggcuccgcgaucgccagcggcgucgccgugugcaaggugcugcaccucgagggggaggucaacaagaucaaguccgcccugcugagcaccaacaaggccguggugucccucagcaacggcgucuccgugcugaccuucaaggugcuggaccucaagaacuacaucgacaagcagcugcugcccauccucaacaagcagagcugcuccaucagcaacaucgagacggucaucgaguuccagcagaagaacaaccgccugcuggagaucacccgggaguucuccgugaacgcgggggugaccacccccgucagcacguacaugcucaccaacagcgagcugcugucccucaucaacgacaugcccaucaccaacgaccagaagaagcugaugagcaacaacgugcagaucgugcgccagcaguccuacagcaucaugugcaucaucaaggaggagguccuggccuacguggugcagcucccgcuguacggcgucaucgacacccccugcuggaagcugcacacgagcccccucugcaccaccaacaccaaggaggggagcaacaucugccugacgcggaccgaccgcggcugguacugcgacaacgccggcuccgugagcuucuucccccaggccgagaccugcaagguccaguccaaccggguguucugcgacaccaugaacagccugacgcucccguccgaggugaaccugugcaacgucgacaucuucaaccccaaguacgacugcaagaucaugaccagcaagaccgacguguccagcuccgugaucaccagccugggggccaucgucuccugcuacggcaagacgaagugcaccgcgagcaacaagaaccgcgggaucaucaagaccuucuccaacggcugcgacuacgugagcaacaagggcguggacaccgucagcguggggaacacccucuacuacgugaacaagcaggagggcaagucccuguacgucaagggggagcccaucaucaacuucuacgacccccugguguucccgagcgacgaguucgacgccuccaucagccaggugaacgagaagaucaaccagucccucgccuucauccggaaguccgacgagcugcugcacaacgucaacgccggcaaguccacgaccaacaucaugaucaccaccaucaucaucgugaucaucgugauccugcucagccugaucgccgucgggcugcuccuguacugcaaggcgcgcugaggacuaguacuggcugcaucucccuuuccucuguccuccauccuucucccaggauggugaagggggaccugguacccagugauccccaccccaggauccuaaaucaugacuuaccugcuaauaaaaacucauuggaaaagugagaagaucuaaaaaaaaaaaaaaaaaaaaaaaaaaaaaaaaaaaaaaaaaaaaaaaaaaaaaaaaaaaaaaaaugcaucccccccccccccccccccccccccccccccaaaggcucuuuucagagccaccagaauu

SEQ ID NO: 1566 - RNA, 2040 nt, Artificial Sequence
  mRNA product Design h-1 comprising derived and/or modified sequence from HRSV(A2)__F-del_DSCav1 (opt2)
gggagacccgugacccggaaguuguacggcuacgcgacuuucccucccacaaacccucgcgcccuuccuuuccuacuugggcccggcagaaagcuuaccauggagcuccucauccucaaggccaacgccaucaccaccauccucaccgccgucaccuucugcuucgccuccggccagaacaucaccgaggaguucuaccaguccaccugcuccgccgucuccaagggcuaccucuccgcccuccgcaccggcugguacaccuccgucaucaccaucgagcucuccaacaucaaggagaacaagugcaacggcaccgacgccaaggucaagcucaucaagcaggagcucgacaaguacaagaacgccgucaccgagcuccagcuccucaugcaguccacccccgccaccaacaaccgcgcccgccgcgagcucccccgcuucaugaacuacacccucaacaacgccaagaagaccaacgucacccucuccaagaagcgcaagcgccgcuuccucggcuuccuccucggcgucggcuccgccaucgccuccggcgucgccgucugcaagguccuccaccucgagggcgaggucaacaagaucaaguccgcccuccucuccaccaacaaggccgucgucucccucuccaacggcgucuccguccucaccuucaagguccucgaccucaagaacuacaucgacaagcagcuccuccccauccucaacaagcaguccugcuccaucuccaacaucgagaccgucaucgaguuccagcagaagaacaaccgccuccucgagaucacccgcgaguucuccgucaacgccggcgucaccacccccgucuccaccuacaugcucaccaacuccgagcuccucucccucaucaacgacaugcccaucaccaacgaccagaagaagcucauguccaacaacguccagaucguccgccagcaguccuacuccaucaugugcaucaucaaggaggagguccucgccuacgucguccagcucccccucuacggcgucaucgacacccccugcuggaagcuccacaccuccccccucugcaccaccaacaccaaggagggcuccaacaucugccucacccgcaccgaccgcggcugguacugcgacaacgccggcuccgucuccuucuucccccaggccgagaccugcaagguccaguccaaccgcgucuucugcgacaccaugaacucccucacccuccccuccgaggucaaccucugcaacgucgacaucuucaaccccaaguacgacugcaagaucaugaccuccaagaccgacgucuccuccuccgucaucaccucccucggcgccaucgucuccugcuacggcaagaccaagugcaccgccuccaacaagaaccgcggcaucaucaagaccuucuccaacggcugcgacuacgucuccaacaagggcgucgacaccgucuccgucggcaacacccucuacuacgucaacaagcaggagggcaagucccucuacgucaagggcgagcccaucaucaacuucuacgacccccucgucuuccccuccgacgaguucgacgccuccaucucccaggucaacgagaagaucaaccagucccucgccuucauccgcaaguccgacgagcuccuccacaacgucaacgccggcaaguccaccaccaacaucaugaucaccaccaucaucaucgucaucaucgucauccuccucucccucaucgccgucggccuccuccucuacugcaaggcccgcugaggacuaguacuggcugcaucucccuuuccucuguccuccauccuucucccaggauggugaagggggaccugguacccagugauccccaccccaggauccuaaaucaugacuuaccugcuaauaaaaacucauuggaaaagugagaagaucuaaaaaaaaaaaaaaaaaaaaaaaaaaaaaaaaaaaaaaaaaaaaaaaaaaaaaaaaaaaaaaaaugcaucccccccccccccccccccccccccccccccaaaggcucuuuucagagccaccagaauu

SEQ ID NO: 1567 - RNA, 2040 nt, Artificial Sequence
  mRNA product Design h-1 comprising derived and/or modified sequence from HRSV(A2)__F-del_DSCav1 (opt3)
gggagacccgugacccggaaguuguacggcuacgcgacuuucccucccacaaacccucgcgcccuuccuuuccuacuugggcccggcagaaagcuuaccauggagcugcucauccuuaaggccaacgcuauuaccacaauacugacugcagugacguucugcuuugccagcggccagaauaucaccgaagaguucuaccaauccacauguucugcggucucaaaaggguauuugagugcuuuaagaacuggaugguacaccagcguuauuacaaucgaacuguccaacauuaaggagaauaaaugcaacgguaccgacgccaaggugaaacuaaucaagcaggaacucgauaaguauaaaaaugcaguaacugagcugcagcuucugaugcagucuacacccgccaccaacaauagggcucggcgcgaguugccucgauuuaugaacuacacgcucaauaacgcaaagaaaacuaaugugacccugucgaagaaacguaagagaagguuccugggcuuucucuuaggggucggaucagccauagcuagcggcguggccguuuguaaggugcugcaccuugaaggugaggucaacaaaaucaagagugcguugcuguccacaaauaaagcagugguaucucuaagcaacgggguuuccgugcucacuuucaagguccuggaccuuaaaaauuauauugauaagcaacuguugccaauccucaacaaacagucaugcaguauuagcaacaucgaaaccgugauagaguuucagcagaagaauaaccggcuguuagagauuacacgcgaguucucugugaaugccggagucaccacgccgguuuccacuuacaugcugacaaacucagaacuccuuagccugaucaaugacaugcccauuaccaacgaucaaaagaaauugaugaguaauaacgugcagaucguaagacagcagucuuauuccaucauguguauuauaaaggaagaggugcuagcuuacgucgugcaacugccucucuacggcguuaucgacacuccaugcuggaaacugcauacaagcccccuuuguaccacgaauaccaaggaaggcucgaacauuugccugacaaggacugaucgggggugguauugugacaaugccggaucuguguccuuuuucccucaggcagagaccugcaaaguccagucaaaccgcguguuuugugauacaaugaauaguuugacucucccaagcgagguaaaccugugcaauguugacaucuucaaccccaaguacgauugcaagauaaugaccuccaaaacagacgugucuagcucagucauuaccaguuuaggugcuaucguguccuguuauggcaagacuaaaugcacggccagcaacaagaaucgagggaucauuaaaacauuuucuaacggaugugauuacgucucaaauaagggcguggacaccguuaguguggguaacacucuguauuacguaaauaagcaagaagggaaaagccuauaugucaagggagagccuaucauuaacuucuacgacccacucguguucccguccgaugaauuugacgcgucuauaucgcagguuaaugagaaaaucaaccagagccuggccuucauuagaaaguccgaugaacuuuugcacaaugugaacgcaggcaaaucaaccacaaauaucaugaucaccacuauuauaaucgucauuaucgugauucugcucagucugaucgcuguaggccuucuguuguacugcaaggccaggugaggacuaguacuggcugcaucucccuuuccucuguccuccauccuucucccaggauggugaagggggaccugguacccagugauccccaccccaggauccuaaaucaugacuuaccugcuaauaaaaacucauuggaaaagugagaagaucuaaaaaaaaaaaaaaaaaaaaaaaaaaaaaaaaaaaaaaaaaaaaaaaaaaaaaaaaaaaaaaaaugcaucccccccccccccccccccccccccccccccaaaggcucuuuucagagccaccagaauu

SEQ ID NO: 1568 - RNA, 2040 nt, Artificial Sequence
  mRNA product Design h-1 comprising derived and/or modified sequence from HRSV(A2)__F-del_DSCav1 (opt4)
gggagacccgugacccggaaguuguacggcuacgcgacuuucccucccacaaacccucgcgcccuuccuuuccuacuugggcccggcagaaagcuuaccauggagcugcugauccugaaggccaacgccaucaccaccauccugaccgccgugaccuucugcuucgccagcggccagaacaucaccgaggaguucuaccagagcaccugcagcgccgugagcaagggcuaccugagcgcccugagaaccggcugguacaccagcgugaucaccaucgagcugagcaacaucaaggagaacaagugcaacggcaccgacgccaaggugaagcugaucaagcaggagcuggacaaguacaagaacgccgugaccgagcugcagcugcugaugcagagcacccccgccaccaacaacagagccagaagagagcugcccagauucaugaacuacacccugaacaacgccaagaagaccaacgugacccugagcaagaagagaaagagaagauuccugggcuuccugcugggcgugggcagcgccaucgccagcggcguggccgugugcaaggugcugcaccuggagggcgaggugaacaagaucaagagcgcccugcugagcaccaacaaggccguggugagccugagcaacggcgugagcgugcugaccuucaaggugcuggaccugaagaacuacaucgacaagcagcugcugcccauccugaacaagcagagcugcagcaucagcaacaucgagaccgugaucgaguuccagcagaagaacaacagacugcuggagaucaccagagaguucagcgugaacgccggcgugaccacccccgugagcaccuacaugcugaccaacagcgagcugcugagccugaucaacgacaugcccaucaccaacgaccagaagaagcugaugagcaacaacgugcagaucgugagacagcagagcuacagcaucaugugcaucaucaaggaggaggugcuggccuacguggugcagcugccccuguacggcgugaucgacacccccugcuggaagcugcacaccagcccccugugcaccaccaacaccaaggagggcagcaacaucugccugaccagaaccgacagaggcugguacugcgacaacgccggcagcgugagcuucuucccccaggccgagaccugcaaggugcagagcaacagaguguucugcgacaccaugaacagccugacccugcccagcgaggugaaccugugcaacguggacaucuucaaccccaaguacgacugcaagaucaugaccagcaagaccgacgugagcagcagcgugaucaccagccugggcgccaucgugagcugcuacggcaagaccaagugcaccgccagcaacaagaacagaggcaucaucaagaccuucagcaacggcugcgacuacgugagcaacaagggcguggacaccgugagcgugggcaacacccuguacuacgugaacaagcaggagggcaagagccuguacgugaagggcgagcccaucaucaacuucuacgacccccugguguuccccagcgacgaguucgacgccagcaucagccaggugaacgagaagaucaaccagagccuggccuucaucagaaagagcgacgagcugcugcacaacgugaacgccggcaagagcaccaccaacaucaugaucaccaccaucaucaucgugaucaucgugauccugcugagccugaucgccgugggccugcugcuguacugcaaggccagaugaggacuaguacuggcugcaucucccuuuccucuguccuccauccuucucccaggauggugaagggggaccugguacccagugauccccaccccaggauccuaaaucaugacuuaccugcuaauaaaaacucauuggaaaagugagaagaucuaaaaaaaaaaaaaaaaaaaaaaaaaaaaaaaaaaaaaaaaaaaaaaaaaaaaaaaaaaaaaaaaugcaucccccccccccccccccccccccccccccccaaaggcucuuuucagagccaccagaauu

SEQ ID NO: 1569 - RNA, 2040 nt, Artificial Sequence
  mRNA product Design h-1 comprising derived and/or modified sequence from HRSV(A2)__F-del_DSCav1 (opt5)
gggagacccgugacccggaaguuguacggcuacgcgacuuucccucccacaaacccucgcgcccuuccuuuccuacuugggcccggcagaaagcuuaccauggagcugcucauccugaaggccaacgcuauuaccacaauccuuacggccgugaccuucugcuuugcgagcggccagaauauuacagaagaguucuaccaauccaccuguucugcugucagcaaaggguaucuguccgcccucagaacaggaugguacaccucuguuaucacaauugaacugagcaacaucaaggagaauaaaugcaacggcaccgacgccaaggugaaacuuaucaagcaggaacuggauaaguauaaaaaugcugugacggagcuccagcugcugaugcaguccacccccgccacaaacaaucgggcucgcagagagcucccucgguuuaugaacuacacccugaauaacgccaagaaaacaaaugucacccuuucuaagaaacgcaagagacgguuccugggguuucuccugggagugggcagcgcgauugccuccgggguugcuguguguaagguccuucaccuggaaggagaggugaacaaaaucaagagcgcccuccugucuacgaauaaagcuguugugucccugagcaacggcgucucugugcucacauucaaggugcuggaccuuaaaaauuauauugauaagcaacugcucccgauccugaacaaacaguccugcagcauuucuaacaucgaaaccgucauugaguuucagcagaagaauaaccgccuucuggagaucacaagagaauuuuccguuaaugccggcgugaccacccccgugagcacauacaugcucacgaacuccgagcugcugucucucaucaaugacaugccuauuaccaacgaucaaaagaaacugaugagcaauaacguccagaucgugcggcagcaguccuauagcauuauguguaucauuaaggaagagguucuugcguacgugguccaacugccccucuacggggugaucgacacaccuugcuggaaacugcauaccucuccccuuuguacaaccaauacgaaggaaggauccaacaucugccugacacgcaccgauagaggcugguauugugacaaugccgggagcguuucuuucuucccucaggcugagaccugcaaagugcagagcaaccgggucuuuugugauacaaugaacucccucacccugccgucugaggugaaucugugcaaugucgacauuuucaaccccaaguacgauugcaagaucaugacaagcaaaacggacguguccagcucuguuauuaccucccucggagccaucgugagcuguuauggcaagacaaaaugcaccgcuucuaacaagaaucgcgggauuaucaaaacauuuuccaacggaugugauuacgucagcaauaagggcguggacaccguuuccgugggcaacacgcuguauuacgucaauaagcaagaagggaaaucucuuuaugugaagggagagccuaucauuaacuucuacgacccccugguguucccuagcgaugaauuugacgccuccaucucucagguuaaugagaaaauuaaccagagccucgccuucaucagaaaguccgaugaacugcugcacaaugucaacgcuggcaaaagcaccacaaauauuaugaucaccacaauuaucaucgugauuaucgugauucuucucucucugaucgcggucgggcugcuccuguacugcaaggcccggugaggacuaguacuggcugcaucucccuuuccucuguccuccauccuucucccaggauggugaagggggaccugguacccagugauccccaccccaggauccuaaaucaugacuuaccugcuaauaaaaacucauuggaaaagugagaagaucuaaaaaaaaaaaaaaaaaaaaaaaaaaaaaaaaaaaaaaaaaaaaaaaaaaaaaaaaaaaaaaaaugcaucccccccccccccccccccccccccccccccaaaggcucuuuucagagccaccagaauu

SEQ ID NO: 1570 - RNA, 2040 nt, Artificial Sequence
  mRNA product Design h-1 comprising derived and/or modified sequence from HRSV(A2)__F-del_DSCav1 (opt6)
gggagacccgugacccggaaguuguacggcuacgcgacuuucccucccacaaacccucgcgcccuuccuuuccuacuugggcccggcagaaagcuuaccauggaacuauuaauauuaaaagcaaaugcuauuaccacaauacuuacugcuguaaccuucugcuuugccucuggccaaaacauaacagaagaauuuuaucaaucaacuugcuccgcuguaagcaaaggcuaccuaucagcauuacgcaccggcugguacacaucaguaauaacaauagaacuauccaacauaaaagaaaauaaaugcaacggaacagacgcaaaaguaaaauuaauaaaacaagaacucgacaaauacaaaaacgcaguaacagaauuacaacuacuaaugcaaaguacuccagccaccaacaacagagcaagaagagaauuaccacgauuuaugaacuacacacuaaacaaugcaaaaaaaacaaacguaacacuaucaaaaaaacguaaacgcagauucuuaggcuuccuccuagguguaggcucagcaaucgccucaggaguggcaguuuguaaaguacuacaccuagaaggagaaguaaacaaaaucaaaucugcccuuuuaucgacaaacaaagcaguaguaucguuauccaauggagucucaguauugacauucaaaguauuagaccuaaaaaauuauauagauaaacaacucuuaccuaucuuaaauaaacaaagcugcucaauaaguaacauagaaaccguaauagaauuucaacaaaaaaacaauagacuccuugagaucacucgagaauuuucaguaaacgcagguguaacaacaccaguaagcacauacaugcuaacaaauagugaacuauuaucucuaauuaacgauaugcccauaaccaacgaucaaaaaaaacucaugaguaacaacguacaaauaguaagacaacaauccuauagcauaaugugcauuauaaaagaagaaguacuagcauauguaguccaacuaccacuauacggcguaauagacacaccaugcuggaaacuacacaccucaccccuaugcacaacaaauacaaaagaaggaucaaacauaugcuuaaccaggacagacagaggcugguacugcgauaacgcaggaucuguuucauucuucccccaagcagaaacaugcaaaguacaaucaaacagaguauuuugugauaccaugaacucacucacauuaccauccgaagucaaccucugcaacguagacauauucaaccccaaauacgacugcaaaauaaugaccucaaaaacagauguaucaucaucaguaaucacaucacuaggagcuaucguaucuuguuauggaaaaacaaaaugcacagcauccaacaaaaacagaggaauuaucaaaacauucucaaauggaugugacuauguaucaaacaaaggaguagacaccguaagcguaggcaauacacuauauuacguaaauaaacaagaaggaaaaucacuauacguaaaaggugaaccaauaauaaacuucuaugacccccuaguauucccaucagaugaauuugacgcaagcauaucacaagucaacgaaaaaauaaaccaaucacuggcauucauucgcaaaucagaugaacuucuccacaacguaaacgcugguaaaagcacuacaaacauaaugauaacaacaaucaucauugucauaauaguuauucuauuaucacuaaucgcaguaggauuacuacuauacuguaaagcgagguaaggacuaguacuggcugcaucucccuuuccucuguccuccauccuucucccaggauggugaagggggaccugguacccagugauccccaccccaggauccuaaaucaugacuuaccugcuaauaaaaacucauuggaaaagugagaagaucuaaaaaaaaaaaaaaaaaaaaaaaaaaaaaaaaaaaaaaaaaaaaaaaaaaaaaaaaaaaaaaaaugcaucccccccccccccccccccccccccccccccaaaggcucuuuucagagccaccagaauu

SEQ ID NO: 1571 - RNA, 2040 nt, Artificial Sequence
  mRNA product Design h-1 comprising derived and/or modified sequence from HRSV(A2)__F-del_DSCav1 (opt11)
gggagacccgugacccggaaguuguacggcuacgcgacuuucccucccacaaacccucgcgcccuuccuuuccuacuugggcccggcagaaagcuuaccauggagcugcucauccugaaggccaacgccaucaccacaauccugacggcggugaccuucugcuucgccagcggccagaacaucaccgaggaguucuaccaguccacgugcagcgccgucuccaagggguaccucagcgcccugcgaaccggcugguacaccuccgugaucaccaucgagcugucaaacaucaaggagaacaagugcaacgggaccgaugccaagguuaagcucaucaagcaggagcuggacaaguacaagaacgcggucacggagcugcagcuccugaugcaguccacuccggcaaccaacaaccgcgccaggcgcgagcugccccgguucaugaacuacacccucaacaacgccaagaagacgaaugugacccugagcaagaagcgcaagcggcgcuuccugggcuuccuccuaggggugggcuccgccaucgcgagcggcgucgccgugugcaagguguugcaccucgagggggaggucaacaagaucaagagcgcccugcuguccaccaacaaggccgugguaagccucuccaacggcgucagcguucugaccuucaaggugcuggaccucaagaacuauaucgacaagcagcugcugcccauccugaacaagcagagcugcuccaucucaaacaucgaaacggugauugaguuccagcagaagaacaaccggcuccuggaaaucacccgcgaguucagcgugaacgccggggucaccacccccguguccacguacaugcugaccaacagcgagcuccuaucccugaucaacgacaugccgaucaccaacgaccagaagaagcucaugagcaacaacgugcagaucguccggcagcaguccuacagcaucaugugcaucaucaaggaagaggugcuggcguacgugguccagcugccccucuacggcgugaucgacacccccugcuggaagcugcacacgagcccccugugcacaaccaacaccaaggagggguccaacaucugccucacgcgcaccgaccggggcugguacugcgacaacgccggcagcgucuccuucuucccgcaggccgagaccugcaaggugcagagcaaccgcguguucugcgacaccaugaacucccugacgcugcccucugagguaaaccucugcaacgucgacaucuucaaccccaaguacgacugcaagaucaugaccuccaagacagacgugagcuccagcgugaucacaucccugggggccaucgucagcugcuacggcaagacuaaguguacugccagcaacaagaaccgggggaucaucaagaccuucuccaacggcugcgacuacgugagcaacaagggcguggacaccguguccgucgggaacacccuguacuacguuaauaagcaggagggcaagagccucuacgugaaaggggagcccaucauuaacuucuacgacccacugguuuuccccuccgacgaguucgacgcgagcaucucccaggugaacgagaagaucaaccagagccuggccuucauccgcaaguccgacgagcugcuccacaacgugaacgccggcaagagcacgaccaacaucaugaucaccaccaucaucaucgugaucaucgugauucugcugucccucaucgccguggggcugcugcuuuacugcaaggcccggugaggacuaguacuggcugcaucucccuuuccucuguccuccauccuucucccaggauggugaagggggaccugguacccagugauccccaccccaggauccuaaaucaugacuuaccugcuaauaaaaacucauuggaaaagugagaagaucuaaaaaaaaaaaaaaaaaaaaaaaaaaaaaaaaaaaaaaaaaaaaaaaaaaaaaaaaaaaaaaaaugcaucccccccccccccccccccccccccccccccaaaggcucuuuucagagccaccagaauu

SEQ ID NO: 1572 - RNA, 2256 nt, Artificial Sequence
  mRNA product Design h-2 comprising derived and/or modified sequence from HRSV(A2)__F-del_DSCav1 (opt1)
gggagacccgugacccggaaguuguacggcuacgcgacuuucccucccacaaacccucgcgcccuuccuuuccuacuugggcccggcagaaagcuuaccauggagcugcucauccugaaggccaacgccaucaccaccauccugacggcggugaccuucugcuucgccagcggccagaacaucaccgaggaguucuaccaguccacgugcagcgccgucuccaagggguaccucagcgcccugcggaccggcugguacaccuccgugaucaccaucgagcugagcaacaucaaggagaacaagugcaacgggaccgacgccaaggugaagcucaucaagcaggagcuggacaaguacaagaacgcggucacggagcugcagcuccugaugcaguccaccccggcaaccaacaaccgcgcccggcgcgagcugccccgguucaugaacuacacccucaacaacgccaagaagacgaacgugacccugagcaagaagcgcaagcggcgcuuccugggcuuccuccugggggugggcuccgccaucgcgagcggcgucgccgugugcaaggugcugcaccucgagggggaggucaacaagaucaagagcgcccugcuguccaccaacaaggccguggugagccucuccaacggcgucagcgugcugaccuucaaggugcuggaccucaagaacuacaucgacaagcagcugcugcccauccugaacaagcagagcugcuccaucagcaacaucgagacggugaucgaguuccagcagaagaacaaccggcuccuggagaucacccgcgaguucagcgugaacgccggggucaccacccccguguccacguacaugcugaccaacagcgagcuccugucccugaucaacgacaugccgaucaccaacgaccagaagaagcucaugagcaacaacgugcagaucguccggcagcaguccuacagcaucaugugcaucaucaaggaggaggugcuggcguacgugguccagcugccccucuacggcgugaucgacacccccugcuggaagcugcacacgagcccccugugcaccaccaacaccaaggagggguccaacaucugccucacgcgcaccgaccggggcugguacugcgacaacgccggcagcgucuccuucuucccgcaggccgagaccugcaaggugcagagcaaccgcguguucugcgacaccaugaacucccugacgcugcccagcgagguaaaccucugcaacgucgacaucuucaaccccaaguacgacugcaagaucaugaccuccaagaccgacgugagcuccagcgugaucaccucccugggggccaucgucagcugcuacggcaagacgaagugcaccgccagcaacaagaaccgggggaucaucaagaccuucuccaacggcugcgacuacgugagcaacaagggcguggacaccguguccgucgggaacacccuguacuacgugaacaagcaggagggcaagagccucuacgugaagggggagcccaucaucaacuucuacgacccgcuggucuuccccuccgacgaguucgacgcgagcaucucccaggugaacgagaagaucaaccagagccuggccuucauccgcaaguccgacgagcugcuccacaacgugaacgccggcaagagcacgaccaacaucaugaucaccaccaucaucaucgucaucaucgugauccugcugucccucaucgccguggggcugcugcucuacugcaaggcccggugaggacuagugaagggaacacccaaauuuaauucagccuuaagcacaauuaauuaagagugaaacguaauuguacaagcaguuggucacccaccauagggcaugaucaacaccgcaaccuuuccuuuuucccccagugauucugaaaaaccccucuucccuucagcuugcuuagauguuccaaauuuaguaagcuuaaggcggccuacagaagaaaaagaaaaaaaaggccacaaaaguucccucucacuuucaguaaauaaaauaaaagcagcaacagaaauaaagaaauaaaugaaauucaaaaugaaauaaauauuguguugugcagcauuaaaaaaucaauaaaaauuaaaaaugagcaagaucuaaaaaaaaaaaaaaaaaaaaaaaaaaaaaaaaaaaaaaaaaaaaaaaaaaaaaaaaaaaaaaaaugcaucccccccccccccccccccccccccccccccaaaggcucuuuucagagccaccagaauu

SEQ ID NO: 1573 - RNA, 2256 nt, Artificial Sequence
  mRNA product Design h-2 comprising derived and/or modified sequence from HRSV(A2)__F-del_DSCav1 (opt1)
gggagacccgugacccggaaguuguacggcuacgcgacuuucccucccacaaacccucgcgcccuuccuuuccuacuugggcccggcagaaagcuuaccauggagcugcucauccugaaggccaacgccaucaccaccauccugacggcggugaccuucugcuucgccagcggccagaacaucaccgaggaguucuaccaguccacgugcagcgccgucuccaagggguaccucagcgcccugcgcaccggcugguacaccuccgugaucaccaucgagcugagcaacaucaaggagaacaagugcaacgggaccgacgccaaggugaagcucaucaagcaggagcuggacaaguacaagaacgcggucacggagcugcagcuccugaugcaguccacccccgccaccaacaaccgggcccgccgggagcugccgcgcuucaugaacuacacccucaacaacgccaagaagacgaacgugacccugagcaagaagcggaagcgccgguuccugggcuuccuccugggggugggcuccgcgaucgccagcggcgucgccgugugcaaggugcugcaccucgagggggaggucaacaagaucaaguccgcccugcugagcaccaacaaggccguggugucccucagcaacggcgucuccgugcugaccuucaaggugcuggaccucaagaacuacaucgacaagcagcugcugcccauccucaacaagcagagcugcuccaucagcaacaucgagacggucaucgaguuccagcagaagaacaaccgccugcuggagaucacccgggaguucuccgugaacgcgggggugaccacccccgucagcacguacaugcucaccaacagcgagcugcugucccucaucaacgacaugcccaucaccaacgaccagaagaagcugaugagcaacaacgugcagaucgugcgccagcaguccuacagcaucaugugcaucaucaaggaggagguccuggccuacguggugcagcucccgcuguacggcgucaucgacacccccugcuggaagcugcacacgagcccccucugcaccaccaacaccaaggaggggagcaacaucugccugacgcggaccgaccgcggcugguacugcgacaacgccggcuccgugagcuucuucccccaggccgagaccugcaagguccaguccaaccggguguucugcgacaccaugaacagccugacgcucccguccgaggugaaccugugcaacgucgacaucuucaaccccaaguacgacugcaagaucaugaccagcaagaccgacguguccagcuccgugaucaccagccugggggccaucgucuccugcuacggcaagacgaagugcaccgcgagcaacaagaaccgcgggaucaucaagaccuucuccaacggcugcgacuacgugagcaacaagggcguggacaccgucagcguggggaacacccucuacuacgugaacaagcaggagggcaagucccuguacgucaagggggagcccaucaucaacuucuacgacccccugguguucccgagcgacgaguucgacgccuccaucagccaggugaacgagaagaucaaccagucccucgccuucauccggaaguccgacgagcugcugcacaacgucaacgccggcaaguccacgaccaacaucaugaucaccaccaucaucaucgugaucaucgugauccugcucagccugaucgccgucgggcugcuccuguacugcaaggcgcgcugaggacuagugaagggaacacccaaauuuaauucagccuuaagcacaauuaauuaagagugaaacguaauuguacaagcaguuggucacccaccauagggcaugaucaacaccgcaaccuuuccuuuuucccccagugauucugaaaaaccccucuucccuucagcuugcuuagauguuccaaauuuaguaagcuuaaggcggccuacagaagaaaaagaaaaaaaaggccacaaaaguucccucucacuuucaguaaauaaaauaaaagcagcaacagaaauaaagaaauaaaugaaauucaaaaugaaauaaauauuguguugugcagcauuaaaaaaucaauaaaaauuaaaaaugagcaagaucuaaaaaaaaaaaaaaaaaaaaaaaaaaaaaaaaaaaaaaaaaaaaaaaaaaaaaaaaaaaaaaaaugcaucccccccccccccccccccccccccccccccaaaggcucuuuucagagccaccagaauu

SEQ ID NO: 1574 - RNA, 2256 nt, Artificial Sequence
  mRNA product Design h-2 comprising derived and/or modified sequence from HRSV(A2)__F-del_DSCav1 (opt2)
gggagacccgugacccggaaguuguacggcuacgcgacuuucccucccacaaacccucgcgcccuuccuuuccuacuugggcccggcagaaagcuuaccauggagcuccucauccucaaggccaacgccaucaccaccauccucaccgccgucaccuucugcuucgccuccggccagaacaucaccgaggaguucuaccaguccaccugcuccgccgucuccaagggcuaccucuccgcccuccgcaccggcugguacaccuccgucaucaccaucgagcucuccaacaucaaggagaacaagugcaacggcaccgacgccaaggucaagcucaucaagcaggagcucgacaaguacaagaacgccgucaccgagcuccagcuccucaugcaguccacccccgccaccaacaaccgcgcccgccgcgagcucccccgcuucaugaacuacacccucaacaacgccaagaagaccaacgucacccucuccaagaagcgcaagcgccgcuuccucggcuuccuccucggcgucggcuccgccaucgccuccggcgucgccgucugcaagguccuccaccucgagggcgaggucaacaagaucaaguccgcccuccucuccaccaacaaggccgucgucucccucuccaacggcgucuccguccucaccuucaagguccucgaccucaagaacuacaucgacaagcagcuccuccccauccucaacaagcaguccugcuccaucuccaacaucgagaccgucaucgaguuccagcagaagaacaaccgccuccucgagaucacccgcgaguucuccgucaacgccggcgucaccacccccgucuccaccuacaugcucaccaacuccgagcuccucucccucaucaacgacaugcccaucaccaacgaccagaagaagcucauguccaacaacguccagaucguccgccagcaguccuacuccaucaugugcaucaucaaggaggagguccucgccuacgucguccagcucccccucuacggcgucaucgacacccccugcuggaagcuccacaccuccccccucugcaccaccaacaccaaggagggcuccaacaucugccucacccgcaccgaccgcggcugguacugcgacaacgccggcuccgucuccuucuucccccaggccgagaccugcaagguccaguccaaccgcgucuucugcgacaccaugaacucccucacccuccccuccgaggucaaccucugcaacgucgacaucuucaaccccaaguacgacugcaagaucaugaccuccaagaccgacgucuccuccuccgucaucaccucccucggcgccaucgucuccugcuacggcaagaccaagugcaccgccuccaacaagaaccgcggcaucaucaagaccuucuccaacggcugcgacuacgucuccaacaagggcgucgacaccgucuccgucggcaacacccucuacuacgucaacaagcaggagggcaagucccucuacgucaagggcgagcccaucaucaacuucuacgacccccucgucuuccccuccgacgaguucgacgccuccaucucccaggucaacgagaagaucaaccagucccucgccuucauccgcaaguccgacgagcuccuccacaacgucaacgccggcaaguccaccaccaacaucaugaucaccaccaucaucaucgucaucaucgucauccuccucucccucaucgccgucggccuccuccucuacugcaaggcccgcugaggacuagugaagggaacacccaaauuuaauucagccuuaagcacaauuaauuaagagugaaacguaauuguacaagcaguuggucacccaccauagggcaugaucaacaccgcaaccuuuccuuuuucccccagugauucugaaaaaccccucuucccuucagcuugcuuagauguuccaaauuuaguaagcuuaaggcggccuacagaagaaaaagaaaaaaaaggccacaaaaguucccucucacuuucaguaaauaaaauaaaagcagcaacagaaauaaagaaauaaaugaaauucaaaaugaaauaaauauuguguugugcagcauuaaaaaaucaauaaaaauuaaaaaugagcaagaucuaaaaaaaaaaaaaaaaaaaaaaaaaaaaaaaaaaaaaaaaaaaaaaaaaaaaaaaaaaaaaaaaugcaucccccccccccccccccccccccccccccccaaaggcucuuuucagagccaccagaauu

SEQ ID NO: 1575 - RNA, 2256 nt, Artificial Sequence
  mRNA product Design h-2 comprising derived and/or modified sequence from HRSV(A2)__F-del_DSCav1 (opt3)
gggagacccgugacccggaaguuguacggcuacgcgacuuucccucccacaaacccucgcgcccuuccuuuccuacuugggcccggcagaaagcuuaccauggagcugcucauccuuaaggccaacgcuauuaccacaauacugacugcagugacguucugcuuugccagcggccagaauaucaccgaagaguucuaccaauccacauguucugcggucucaaaaggguauuugagugcuuuaagaacuggaugguacaccagcguuauuacaaucgaacuguccaacauuaaggagaauaaaugcaacgguaccgacgccaaggugaaacuaaucaagcaggaacucgauaaguauaaaaaugcaguaacugagcugcagcuucugaugcagucuacacccgccaccaacaauagggcucggcgcgaguugccucgauuuaugaacuacacgcucaauaacgcaaagaaaacuaaugugacccugucgaagaaacguaagagaagguuccugggcuuucucuuaggggucggaucagccauagcuagcggcguggccguuuguaaggugcugcaccuugaaggugaggucaacaaaaucaagagugcguugcuguccacaaauaaagcagugguaucucuaagcaacgggguuuccgugcucacuuucaagguccuggaccuuaaaaauuauauugauaagcaacuguugccaauccucaacaaacagucaugcaguauuagcaacaucgaaaccgugauagaguuucagcagaagaauaaccggcuguuagagauuacacgcgaguucucugugaaugccggagucaccacgccgguuuccacuuacaugcugacaaacucagaacuccuuagccugaucaaugacaugcccauuaccaacgaucaaaagaaauugaugaguaauaacgugcagaucguaagacagcagucuuauuccaucauguguauuauaaaggaagaggugcuagcuuacgucgugcaacugccucucuacggcguuaucgacacuccaugcuggaaacugcauacaagcccccuuuguaccacgaauaccaaggaaggcucgaacauuugccugacaaggacugaucgggggugguauugugacaaugccggaucuguguccuuuuucccucaggcagagaccugcaaaguccagucaaaccgcguguuuugugauacaaugaauaguuugacucucccaagcgagguaaaccugugcaauguugacaucuucaaccccaaguacgauugcaagauaaugaccuccaaaacagacgugucuagcucagucauuaccaguuuaggugcuaucguguccuguuauggcaagacuaaaugcacggccagcaacaagaaucgagggaucauuaaaacauuuucuaacggaugugauuacgucucaaauaagggcguggacaccguuaguguggguaacacucuguauuacguaaauaagcaagaagggaaaagccuauaugucaagggagagccuaucauuaacuucuacgacccacucguguucccguccgaugaauuugacgcgucuauaucgcagguuaaugagaaaaucaaccagagccuggccuucauuagaaaguccgaugaacuuuugcacaaugugaacgcaggcaaaucaaccacaaauaucaugaucaccacuauuauaaucgucauuaucgugauucugcucagucugaucgcuguaggccuucuguuguacugcaaggccaggugaggacuagugaagggaacacccaaauuuaauucagccuuaagcacaauuaauuaagagugaaacguaauuguacaagcaguuggucacccaccauagggcaugaucaacaccgcaaccuuuccuuuuucccccagugauucugaaaaaccccucuucccuucagcuugcuuagauguuccaaauuuaguaagcuuaaggcggccuacagaagaaaaagaaaaaaaaggccacaaaaguucccucucacuuucaguaaauaaaauaaaagcagcaacagaaauaaagaaauaaaugaaauucaaaaugaaauaaauauuguguugugcagcauuaaaaaaucaauaaaaauuaaaaaugagcaagaucuaaaaaaaaaaaaaaaaaaaaaaaaaaaaaaaaaaaaaaaaaaaaaaaaaaaaaaaaaaaaaaaaugcaucccccccccccccccccccccccccccccccaaaggcucuuuucagagccaccagaauu

SEQ ID NO: 1576 - RNA, 2256 nt, Artificial Sequence
  mRNA product Design h-2 comprising derived and/or modified sequence from HRSV(A2)__F-del_DSCav1 (opt4)
gggagacccgugacccggaaguuguacggcuacgcgacuuucccucccacaaacccucgcgcccuuccuuuccuacuugggcccggcagaaagcuuaccauggagcugcugauccugaaggccaacgccaucaccaccauccugaccgccgugaccuucugcuucgccagcggccagaacaucaccgaggaguucuaccagagcaccugcagcgccgugagcaagggcuaccugagcgcccugagaaccggcugguacaccagcgugaucaccaucgagcugagcaacaucaaggagaacaagugcaacggcaccgacgccaaggugaagcugaucaagcaggagcuggacaaguacaagaacgccgugaccgagcugcagcugcugaugcagagcacccccgccaccaacaacagagccagaagagagcugcccagauucaugaacuacacccugaacaacgccaagaagaccaacgugacccugagcaagaagagaaagagaagauuccugggcuuccugcugggcgugggcagcgccaucgccagcggcguggccgugugcaaggugcugcaccuggagggcgaggugaacaagaucaagagcgcccugcugagcaccaacaaggccguggugagccugagcaacggcgugagcgugcugaccuucaaggugcuggaccugaagaacuacaucgacaagcagcugcugcccauccugaacaagcagagcugcagcaucagcaacaucgagaccgugaucgaguuccagcagaagaacaacagacugcuggagaucaccagagaguucagcgugaacgccggcgugaccacccccgugagcaccuacaugcugaccaacagcgagcugcugagccugaucaacgacaugcccaucaccaacgaccagaagaagcugaugagcaacaacgugcagaucgugagacagcagagcuacagcaucaugugcaucaucaaggaggaggugcuggccuacguggugcagcugccccuguacggcgugaucgacacccccugcuggaagcugcacaccagcccccugugcaccaccaacaccaaggagggcagcaacaucugccugaccagaaccgacagaggcugguacugcgacaacgccggcagcgugagcuucuucccccaggccgagaccugcaaggugcagagcaacagaguguucugcgacaccaugaacagccugacccugcccagcgaggugaaccugugcaacguggacaucuucaaccccaaguacgacugcaagaucaugaccagcaagaccgacgugagcagcagcgugaucaccagccugggcgccaucgugagcugcuacggcaagaccaagugcaccgccagcaacaagaacagaggcaucaucaagaccuucagcaacggcugcgacuacgugagcaacaagggcguggacaccgugagcgugggcaacacccuguacuacgugaacaagcaggagggcaagagccuguacgugaagggcgagcccaucaucaacuucuacgacccccugguguuccccagcgacgaguucgacgccagcaucagccaggugaacgagaagaucaaccagagccuggccuucaucagaaagagcgacgagcugcugcacaacgugaacgccggcaagagcaccaccaacaucaugaucaccaccaucaucaucgugaucaucgugauccugcugagccugaucgccgugggccugcugcuguacugcaaggccagaugaggacuagugaagggaacacccaaauuuaauucagccuuaagcacaauuaauuaagagugaaacguaauuguacaagcaguuggucacccaccauagggcaugaucaacaccgcaaccuuuccuuuuucccccagugauucugaaaaaccccucuucccuucagcuugcuuagauguuccaaauuuaguaagcuuaaggcggccuacagaagaaaaagaaaaaaaaggccacaaaaguucccucucacuuucaguaaauaaaauaaaagcagcaacagaaauaaagaaauaaaugaaauucaaaaugaaauaaauauuguguugugcagcauuaaaaaaucaauaaaaauuaaaaaugagcaagaucuaaaaaaaaaaaaaaaaaaaaaaaaaaaaaaaaaaaaaaaaaaaaaaaaaaaaaaaaaaaaaaaaugcaucccccccccccccccccccccccccccccccaaaggcucuuuucagagccaccagaauu

SEQ ID NO: 1577 - RNA, 2256 nt, Artificial Sequence
  mRNA product Design h-2 comprising derived and/or modified sequence from HRSV(A2)__F-del_DSCav1 (opt5)
gggagacccgugacccggaaguuguacggcuacgcgacuuucccucccacaaacccucgcgcccuuccuuuccuacuugggcccggcagaaagcuuaccauggagcugcucauccugaaggccaacgcuauuaccacaauccuuacggccgugaccuucugcuuugcgagcggccagaauauuacagaagaguucuaccaauccaccuguucugcugucagcaaaggguaucuguccgcccucagaacaggaugguacaccucuguuaucacaauugaacugagcaacaucaaggagaauaaaugcaacggcaccgacgccaaggugaaacuuaucaagcaggaacuggauaaguauaaaaaugcugugacggagcuccagcugcugaugcaguccacccccgccacaaacaaucgggcucgcagagagcucccucgguuuaugaacuacacccugaauaacgccaagaaaacaaaugucacccuuucuaagaaacgcaagagacgguuccugggguuucuccugggagugggcagcgcgauugccuccgggguugcuguguguaagguccuucaccuggaaggagaggugaacaaaaucaagagcgcccuccugucuacgaauaaagcuguugugucccugagcaacggcgucucugugcucacauucaaggugcuggaccuuaaaaauuauauugauaagcaacugcucccgauccugaacaaacaguccugcagcauuucuaacaucgaaaccgucauugaguuucagcagaagaauaaccgccuucuggagaucacaagagaauuuuccguuaaugccggcgugaccacccccgugagcacauacaugcucacgaacuccgagcugcugucucucaucaaugacaugccuauuaccaacgaucaaaagaaacugaugagcaauaacguccagaucgugcggcagcaguccuauagcauuauguguaucauuaaggaagagguucuugcguacgugguccaacugccccucuacggggugaucgacacaccuugcuggaaacugcauaccucuccccuuuguacaaccaauacgaaggaaggauccaacaucugccugacacgcaccgauagaggcugguauugugacaaugccgggagcguuucuuucuucccucaggcugagaccugcaaagugcagagcaaccgggucuuuugugauacaaugaacucccucacccugccgucugaggugaaucugugcaaugucgacauuuucaaccccaaguacgauugcaagaucaugacaagcaaaacggacguguccagcucuguuauuaccucccucggagccaucgugagcuguuauggcaagacaaaaugcaccgcuucuaacaagaaucgcgggauuaucaaaacauuuuccaacggaugugauuacgucagcaauaagggcguggacaccguuuccgugggcaacacgcuguauuacgucaauaagcaagaagggaaaucucuuuaugugaagggagagccuaucauuaacuucuacgacccccugguguucccuagcgaugaauuugacgccuccaucucucagguuaaugagaaaauuaaccagagccucgccuucaucagaaaguccgaugaacugcugcacaaugucaacgcuggcaaaagcaccacaaauauuaugaucaccacaauuaucaucgugauuaucgugauucuucucucucugaucgcggucgggcugcuccuguacugcaaggcccggugaggacuagugaagggaacacccaaauuuaauucagccuuaagcacaauuaauuaagagugaaacguaauuguacaagcaguuggucacccaccauagggcaugaucaacaccgcaaccuuuccuuuuucccccagugauucugaaaaaccccucuucccuucagcuugcuuagauguuccaaauuuaguaagcuuaaggcggccuacagaagaaaaagaaaaaaaaggccacaaaaguucccucucacuuucaguaaauaaaauaaaagcagcaacagaaauaaagaaauaaaugaaauucaaaaugaaauaaauauuguguugugcagcauuaaaaaaucaauaaaaauuaaaaaugagcaagaucuaaaaaaaaaaaaaaaaaaaaaaaaaaaaaaaaaaaaaaaaaaaaaaaaaaaaaaaaaaaaaaaaugcaucccccccccccccccccccccccccccccccaaaggcucuuuucagagccaccagaauu

SEQ ID NO: 1578 - RNA, 2256 nt, Artificial Sequence
  mRNA product Design h-2 comprising derived and/or modified sequence from HRSV(A2)__F-del_DSCav1 (opt6)
gggagacccgugacccggaaguuguacggcuacgcgacuuucccucccacaaacccucgcgcccuuccuuuccuacuugggcccggcagaaagcuuaccauggaacuauuaauauuaaaagcaaaugcuauuaccacaauacuuacugcuguaaccuucugcuuugccucuggccaaaacauaacagaagaauuuuaucaaucaacuugcuccgcuguaagcaaaggcuaccuaucagcauuacgcaccggcugguacacaucaguaauaacaauagaacuauccaacauaaaagaaaauaaaugcaacggaacagacgcaaaaguaaaauuaauaaaacaagaacucgacaaauacaaaaacgcaguaacagaauuacaacuacuaaugcaaaguacuccagccaccaacaacagagcaagaagagaauuaccacgauuuaugaacuacacacuaaacaaugcaaaaaaaacaaacguaacacuaucaaaaaaacguaaacgcagauucuuaggcuuccuccuagguguaggcucagcaaucgccucaggaguggcaguuuguaaaguacuacaccuagaaggagaaguaaacaaaaucaaaucugcccuuuuaucgacaaacaaagcaguaguaucguuauccaauggagucucaguauugacauucaaaguauuagaccuaaaaaauuauauagauaaacaacucuuaccuaucuuaaauaaacaaagcugcucaauaaguaacauagaaaccguaauagaauuucaacaaaaaaacaauagacuccuugagaucacucgagaauuuucaguaaacgcagguguaacaacaccaguaagcacauacaugcuaacaaauagugaacuauuaucucuaauuaacgauaugcccauaaccaacgaucaaaaaaaacucaugaguaacaacguacaaauaguaagacaacaauccuauagcauaaugugcauuauaaaagaagaaguacuagcauauguaguccaacuaccacuauacggcguaauagacacaccaugcuggaaacuacacaccucaccccuaugcacaacaaauacaaaagaaggaucaaacauaugcuuaaccaggacagacagaggcugguacugcgauaacgcaggaucuguuucauucuucccccaagcagaaacaugcaaaguacaaucaaacagaguauuuugugauaccaugaacucacucacauuaccauccgaagucaaccucugcaacguagacauauucaaccccaaauacgacugcaaaauaaugaccucaaaaacagauguaucaucaucaguaaucacaucacuaggagcuaucguaucuuguuauggaaaaacaaaaugcacagcauccaacaaaaacagaggaauuaucaaaacauucucaaauggaugugacuauguaucaaacaaaggaguagacaccguaagcguaggcaauacacuauauuacguaaauaaacaagaaggaaaaucacuauacguaaaaggugaaccaauaauaaacuucuaugacccccuaguauucccaucagaugaauuugacgcaagcauaucacaagucaacgaaaaaauaaaccaaucacuggcauucauucgcaaaucagaugaacuucuccacaacguaaacgcugguaaaagcacuacaaacauaaugauaacaacaaucaucauugucauaauaguuauucuauuaucacuaaucgcaguaggauuacuacuauacuguaaagcgagguaaggacuagugaagggaacacccaaauuuaauucagccuuaagcacaauuaauuaagagugaaacguaauuguacaagcaguuggucacccaccauagggcaugaucaacaccgcaaccuuuccuuuuucccccagugauucugaaaaaccccucuucccuucagcuugcuuagauguuccaaauuuaguaagcuuaaggcggccuacagaagaaaaagaaaaaaaaggccacaaaaguucccucucacuuucaguaaauaaaauaaaagcagcaacagaaauaaagaaauaaaugaaauucaaaaugaaauaaauauuguguugugcagcauuaaaaaaucaauaaaaauuaaaaaugagcaagaucuaaaaaaaaaaaaaaaaaaaaaaaaaaaaaaaaaaaaaaaaaaaaaaaaaaaaaaaaaaaaaaaaugcaucccccccccccccccccccccccccccccccaaaggcucuuuucagagccaccagaauu

SEQ ID NO: 1579 - RNA, 2256 nt, Artificial Sequence
  mRNA product Design h-2 comprising derived and/or modified sequence from HRSV(A2)__F-del_DSCav1 (opt11)
gggagacccgugacccggaaguuguacggcuacgcgacuuucccucccacaaacccucgcgcccuuccuuuccuacuugggcccggcagaaagcuuaccauggagcugcucauccugaaggccaacgccaucaccacaauccugacggcggugaccuucugcuucgccagcggccagaacaucaccgaggaguucuaccaguccacgugcagcgccgucuccaagggguaccucagcgcccugcgaaccggcugguacaccuccgugaucaccaucgagcugucaaacaucaaggagaacaagugcaacgggaccgaugccaagguuaagcucaucaagcaggagcuggacaaguacaagaacgcggucacggagcugcagcuccugaugcaguccacuccggcaaccaacaaccgcgccaggcgcgagcugccccgguucaugaacuacacccucaacaacgccaagaagacgaaugugacccugagcaagaagcgcaagcggcgcuuccugggcuuccuccuaggggugggcuccgccaucgcgagcggcgucgccgugugcaagguguugcaccucgagggggaggucaacaagaucaagagcgcccugcuguccaccaacaaggccgugguaagccucuccaacggcgucagcguucugaccuucaaggugcuggaccucaagaacuauaucgacaagcagcugcugcccauccugaacaagcagagcugcuccaucucaaacaucgaaacggugauugaguuccagcagaagaacaaccggcuccuggaaaucacccgcgaguucagcgugaacgccggggucaccacccccguguccacguacaugcugaccaacagcgagcuccuaucccugaucaacgacaugccgaucaccaacgaccagaagaagcucaugagcaacaacgugcagaucguccggcagcaguccuacagcaucaugugcaucaucaaggaagaggugcuggcguacgugguccagcugccccucuacggcgugaucgacacccccugcuggaagcugcacacgagcccccugugcacaaccaacaccaaggagggguccaacaucugccucacgcgcaccgaccggggcugguacugcgacaacgccggcagcgucuccuucuucccgcaggccgagaccugcaaggugcagagcaaccgcguguucugcgacaccaugaacucccugacgcugcccucugagguaaaccucugcaacgucgacaucuucaaccccaaguacgacugcaagaucaugaccuccaagacagacgugagcuccagcgugaucacaucccugggggccaucgucagcugcuacggcaagacuaaguguacugccagcaacaagaaccgggggaucaucaagaccuucuccaacggcugcgacuacgugagcaacaagggcguggacaccguguccgucgggaacacccuguacuacguuaauaagcaggagggcaagagccucuacgugaaaggggagcccaucauuaacuucuacgacccacugguuuuccccuccgacgaguucgacgcgagcaucucccaggugaacgagaagaucaaccagagccuggccuucauccgcaaguccgacgagcugcuccacaacgugaacgccggcaagagcacgaccaacaucaugaucaccaccaucaucaucgugaucaucgugauucugcugucccucaucgccguggggcugcugcuuuacugcaaggcccggugaggacuagugaagggaacacccaaauuuaauucagccuuaagcacaauuaauuaagagugaaacguaauuguacaagcaguuggucacccaccauagggcaugaucaacaccgcaaccuuuccuuuuucccccagugauucugaaaaaccccucuucccuucagcuugcuuagauguuccaaauuuaguaagcuuaaggcggccuacagaagaaaaagaaaaaaaaggccacaaaaguucccucucacuuucaguaaauaaaauaaaagcagcaacagaaauaaagaaauaaaugaaauucaaaaugaaauaaauauuguguugugcagcauuaaaaaaucaauaaaaauuaaaaaugagcaagaucuaaaaaaaaaaaaaaaaaaaaaaaaaaaaaaaaaaaaaaaaaaaaaaaaaaaaaaaaaaaaaaaaugcaucccccccccccccccccccccccccccccccaaaggcucuuuucagagccaccagaauu

SEQ ID NO: 1580 - RNA, 2036 nt, Artificial Sequence
  mRNA product Design h-3 comprising derived and/or modified sequence from HRSV(A2)__F-del_DSCav1 (opt1)
gggagacccgugacccggaaguuguacggcuacgcgacuuucccucccacaaacccucgcgcccuuccuuuccuacuugggcccggcagaaagcuuaccauggagcugcucauccugaaggccaacgccaucaccaccauccugacggcggugaccuucugcuucgccagcggccagaacaucaccgaggaguucuaccaguccacgugcagcgccgucuccaagggguaccucagcgcccugcggaccggcugguacaccuccgugaucaccaucgagcugagcaacaucaaggagaacaagugcaacgggaccgacgccaaggugaagcucaucaagcaggagcuggacaaguacaagaacgcggucacggagcugcagcuccugaugcaguccaccccggcaaccaacaaccgcgcccggcgcgagcugccccgguucaugaacuacacccucaacaacgccaagaagacgaacgugacccugagcaagaagcgcaagcggcgcuuccugggcuuccuccugggggugggcuccgccaucgcgagcggcgucgccgugugcaaggugcugcaccucgagggggaggucaacaagaucaagagcgcccugcuguccaccaacaaggccguggugagccucuccaacggcgucagcgugcugaccuucaaggugcuggaccucaagaacuacaucgacaagcagcugcugcccauccugaacaagcagagcugcuccaucagcaacaucgagacggugaucgaguuccagcagaagaacaaccggcuccuggagaucacccgcgaguucagcgugaacgccggggucaccacccccguguccacguacaugcugaccaacagcgagcuccugucccugaucaacgacaugccgaucaccaacgaccagaagaagcucaugagcaacaacgugcagaucguccggcagcaguccuacagcaucaugugcaucaucaaggaggaggugcuggcguacgugguccagcugccccucuacggcgugaucgacacccccugcuggaagcugcacacgagcccccugugcaccaccaacaccaaggagggguccaacaucugccucacgcgcaccgaccggggcugguacugcgacaacgccggcagcgucuccuucuucccgcaggccgagaccugcaaggugcagagcaaccgcguguucugcgacaccaugaacucccugacgcugcccagcgagguaaaccucugcaacgucgacaucuucaaccccaaguacgacugcaagaucaugaccuccaagaccgacgugagcuccagcgugaucaccucccugggggccaucgucagcugcuacggcaagacgaagugcaccgccagcaacaagaaccgggggaucaucaagaccuucuccaacggcugcgacuacgugagcaacaagggcguggacaccguguccgucgggaacacccuguacuacgugaacaagcaggagggcaagagccucuacgugaagggggagcccaucaucaacuucuacgacccgcuggucuuccccuccgacgaguucgacgcgagcaucucccaggugaacgagaagaucaaccagagccuggccuucauccgcaaguccgacgagcugcuccacaacgugaacgccggcaagagcacgaccaacaucaugaucaccaccaucaucaucgucaucaucgugauccugcugucccucaucgccguggggcugcugcucuacugcaaggcccggugaggacuaguggaagcauuuuccuggcugauuaaaagaaauuacucagcuauggucaucuguuccuguuagaaggcuaugcagcauauuauauacuaugcgcauguuaugaaaugcauaauaaaaaauuuuaaaaaaucuaaaagaucuaaaaaaaaaaaaaaaaaaaaaaaaaaaaaaaaaaaaaaaaaaaaaaaaaaaaaaaaaaaaaaaaugcaucccccccccccccccccccccccccccccccaaaggcucuuuucagagccaccagaauu

SEQ ID NO: 1581 - RNA, 2036 nt, Artificial Sequence
  mRNA product Design h-3 comprising derived and/or modified sequence from HRSV(A2)__F-del_DSCav1 (opt1)
gggagacccgugacccggaaguuguacggcuacgcgacuuucccucccacaaacccucgcgcccuuccuuuccuacuugggcccggcagaaagcuuaccauggagcugcucauccugaaggccaacgccaucaccaccauccugacggcggugaccuucugcuucgccagcggccagaacaucaccgaggaguucuaccaguccacgugcagcgccgucuccaagggguaccucagcgcccugcgcaccggcugguacaccuccgugaucaccaucgagcugagcaacaucaaggagaacaagugcaacgggaccgacgccaaggugaagcucaucaagcaggagcuggacaaguacaagaacgcggucacggagcugcagcuccugaugcaguccacccccgccaccaacaaccgggcccgccgggagcugccgcgcuucaugaacuacacccucaacaacgccaagaagacgaacgugacccugagcaagaagcggaagcgccgguuccugggcuuccuccugggggugggcuccgcgaucgccagcggcgucgccgugugcaaggugcugcaccucgagggggaggucaacaagaucaaguccgcccugcugagcaccaacaaggccguggugucccucagcaacggcgucuccgugcugaccuucaaggugcuggaccucaagaacuacaucgacaagcagcugcugcccauccucaacaagcagagcugcuccaucagcaacaucgagacggucaucgaguuccagcagaagaacaaccgccugcuggagaucacccgggaguucuccgugaacgcgggggugaccacccccgucagcacguacaugcucaccaacagcgagcugcugucccucaucaacgacaugcccaucaccaacgaccagaagaagcugaugagcaacaacgugcagaucgugcgccagcaguccuacagcaucaugugcaucaucaaggaggagguccuggccuacguggugcagcucccgcuguacggcgucaucgacacccccugcuggaagcugcacacgagcccccucugcaccaccaacaccaaggaggggagcaacaucugccugacgcggaccgaccgcggcugguacugcgacaacgccggcuccgugagcuucuucccccaggccgagaccugcaagguccaguccaaccggguguucugcgacaccaugaacagccugacgcucccguccgaggugaaccugugcaacgucgacaucuucaaccccaaguacgacugcaagaucaugaccagcaagaccgacguguccagcuccgugaucaccagccugggggccaucgucuccugcuacggcaagacgaagugcaccgcgagcaacaagaaccgcgggaucaucaagaccuucuccaacggcugcgacuacgugagcaacaagggcguggacaccgucagcguggggaacacccucuacuacgugaacaagcaggagggcaagucccuguacgucaagggggagcccaucaucaacuucuacgacccccugguguucccgagcgacgaguucgacgccuccaucagccaggugaacgagaagaucaaccagucccucgccuucauccggaaguccgacgagcugcugcacaacgucaacgccggcaaguccacgaccaacaucaugaucaccaccaucaucaucgugaucaucgugauccugcucagccugaucgccgucgggcugcuccuguacugcaaggcgcgcugaggacuaguggaagcauuuuccuggcugauuaaaagaaauuacucagcuauggucaucuguuccuguuagaaggcuaugcagcauauuauauacuaugcgcauguuaugaaaugcauaauaaaaaauuuuaaaaaaucuaaaagaucuaaaaaaaaaaaaaaaaaaaaaaaaaaaaaaaaaaaaaaaaaaaaaaaaaaaaaaaaaaaaaaaaugcaucccccccccccccccccccccccccccccccaaaggcucuuuucagagccaccagaauu

SEQ ID NO: 1582 - RNA, 2036 nt, Artificial Sequence
  mRNA product Design h-3 comprising derived and/or modified sequence from HRSV(A2)__F-del_DSCav1 (opt2)
gggagacccgugacccggaaguuguacggcuacgcgacuuucccucccacaaacccucgcgcccuuccuuuccuacuugggcccggcagaaagcuuaccauggagcuccucauccucaaggccaacgccaucaccaccauccucaccgccgucaccuucugcuucgccuccggccagaacaucaccgaggaguucuaccaguccaccugcuccgccgucuccaagggcuaccucuccgcccuccgcaccggcugguacaccuccgucaucaccaucgagcucuccaacaucaaggagaacaagugcaacggcaccgacgccaaggucaagcucaucaagcaggagcucgacaaguacaagaacgccgucaccgagcuccagcuccucaugcaguccacccccgccaccaacaaccgcgcccgccgcgagcucccccgcuucaugaacuacacccucaacaacgccaagaagaccaacgucacccucuccaagaagcgcaagcgccgcuuccucggcuuccuccucggcgucggcuccgccaucgccuccggcgucgccgucugcaagguccuccaccucgagggcgaggucaacaagaucaaguccgcccuccucuccaccaacaaggccgucgucucccucuccaacggcgucuccguccucaccuucaagguccucgaccucaagaacuacaucgacaagcagcuccuccccauccucaacaagcaguccugcuccaucuccaacaucgagaccgucaucgaguuccagcagaagaacaaccgccuccucgagaucacccgcgaguucuccgucaacgccggcgucaccacccccgucuccaccuacaugcucaccaacuccgagcuccucucccucaucaacgacaugcccaucaccaacgaccagaagaagcucauguccaacaacguccagaucguccgccagcaguccuacuccaucaugugcaucaucaaggaggagguccucgccuacgucguccagcucccccucuacggcgucaucgacacccccugcuggaagcuccacaccuccccccucugcaccaccaacaccaaggagggcuccaacaucugccucacccgcaccgaccgcggcugguacugcgacaacgccggcuccgucuccuucuucccccaggccgagaccugcaagguccaguccaaccgcgucuucugcgacaccaugaacucccucacccuccccuccgaggucaaccucugcaacgucgacaucuucaaccccaaguacgacugcaagaucaugaccuccaagaccgacgucuccuccuccgucaucaccucccucggcgccaucgucuccugcuacggcaagaccaagugcaccgccuccaacaagaaccgcggcaucaucaagaccuucuccaacggcugcgacuacgucuccaacaagggcgucgacaccgucuccgucggcaacacccucuacuacgucaacaagcaggagggcaagucccucuacgucaagggcgagcccaucaucaacuucuacgacccccucgucuuccccuccgacgaguucgacgccuccaucucccaggucaacgagaagaucaaccagucccucgccuucauccgcaaguccgacgagcuccuccacaacgucaacgccggcaaguccaccaccaacaucaugaucaccaccaucaucaucgucaucaucgucauccuccucucccucaucgccgucggccuccuccucuacugcaaggcccgcugaggacuaguggaagcauuuuccuggcugauuaaaagaaauuacucagcuauggucaucuguuccuguuagaaggcuaugcagcauauuauauacuaugcgcauguuaugaaaugcauaauaaaaaauuuuaaaaaaucuaaaagaucuaaaaaaaaaaaaaaaaaaaaaaaaaaaaaaaaaaaaaaaaaaaaaaaaaaaaaaaaaaaaaaaaugcaucccccccccccccccccccccccccccccccaaaggcucuuuucagagccaccagaauu

SEQ ID NO: 1583 - RNA, 2036 nt, Artificial Sequence
  mRNA product Design h-3 comprising derived and/or modified sequence from HRSV(A2)__F-del_DSCav1 (opt3)
gggagacccgugacccggaaguuguacggcuacgcgacuuucccucccacaaacccucgcgcccuuccuuuccuacuugggcccggcagaaagcuuaccauggagcugcucauccuuaaggccaacgcuauuaccacaauacugacugcagugacguucugcuuugccagcggccagaauaucaccgaagaguucuaccaauccacauguucugcggucucaaaaggguauuugagugcuuuaagaacuggaugguacaccagcguuauuacaaucgaacuguccaacauuaaggagaauaaaugcaacgguaccgacgccaaggugaaacuaaucaagcaggaacucgauaaguauaaaaaugcaguaacugagcugcagcuucugaugcagucuacacccgccaccaacaauagggcucggcgcgaguugccucgauuuaugaacuacacgcucaauaacgcaaagaaaacuaaugugacccugucgaagaaacguaagagaagguuccugggcuuucucuuaggggucggaucagccauagcuagcggcguggccguuuguaaggugcugcaccuugaaggugaggucaacaaaaucaagagugcguugcuguccacaaauaaagcagugguaucucuaagcaacgggguuuccgugcucacuuucaagguccuggaccuuaaaaauuauauugauaagcaacuguugccaauccucaacaaacagucaugcaguauuagcaacaucgaaaccgugauagaguuucagcagaagaauaaccggcuguuagagauuacacgcgaguucucugugaaugccggagucaccacgccgguuuccacuuacaugcugacaaacucagaacuccuuagccugaucaaugacaugcccauuaccaacgaucaaaagaaauugaugaguaauaacgugcagaucguaagacagcagucuuauuccaucauguguauuauaaaggaagaggugcuagcuuacgucgugcaacugccucucuacggcguuaucgacacuccaugcuggaaacugcauacaagcccccuuuguaccacgaauaccaaggaaggcucgaacauuugccugacaaggacugaucgggggugguauugugacaaugccggaucuguguccuuuuucccucaggcagagaccugcaaaguccagucaaaccgcguguuuugugauacaaugaauaguuugacucucccaagcgagguaaaccugugcaauguugacaucuucaaccccaaguacgauugcaagauaaugaccuccaaaacagacgugucuagcucagucauuaccaguuuaggugcuaucguguccuguuauggcaagacuaaaugcacggccagcaacaagaaucgagggaucauuaaaacauuuucuaacggaugugauuacgucucaaauaagggcguggacaccguuaguguggguaacacucuguauuacguaaauaagcaagaagggaaaagccuauaugucaagggagagccuaucauuaacuucuacgacccacucguguucccguccgaugaauuugacgcgucuauaucgcagguuaaugagaaaaucaaccagagccuggccuucauuagaaaguccgaugaacuuuugcacaaugugaacgcaggcaaaucaaccacaaauaucaugaucaccacuauuauaaucgucauuaucgugauucugcucagucugaucgcuguaggccuucuguuguacugcaaggccaggugaggacuaguggaagcauuuuccuggcugauuaaaagaaauuacucagcuauggucaucuguuccuguuagaaggcuaugcagcauauuauauacuaugcgcauguuaugaaaugcauaauaaaaaauuuuaaaaaaucuaaaagaucuaaaaaaaaaaaaaaaaaaaaaaaaaaaaaaaaaaaaaaaaaaaaaaaaaaaaaaaaaaaaaaaaugcaucccccccccccccccccccccccccccccccaaaggcucuuuucagagccaccagaauu

SEQ ID NO: 1584 - RNA, 2036 nt, Artificial Sequence
  mRNA product Design h-3 comprising derived and/or modified sequence from HRSV(A2)__F-del_DSCav1 (opt4)
gggagacccgugacccggaaguuguacggcuacgcgacuuucccucccacaaacccucgcgcccuuccuuuccuacuugggcccggcagaaagcuuaccauggagcugcugauccugaaggccaacgccaucaccaccauccugaccgccgugaccuucugcuucgccagcggccagaacaucaccgaggaguucuaccagagcaccugcagcgccgugagcaagggcuaccugagcgcccugagaaccggcugguacaccagcgugaucaccaucgagcugagcaacaucaaggagaacaagugcaacggcaccgacgccaaggugaagcugaucaagcaggagcuggacaaguacaagaacgccgugaccgagcugcagcugcugaugcagagcacccccgccaccaacaacagagccagaagagagcugcccagauucaugaacuacacccugaacaacgccaagaagaccaacgugacccugagcaagaagagaaagagaagauuccugggcuuccugcugggcgugggcagcgccaucgccagcggcguggccgugugcaaggugcugcaccuggagggcgaggugaacaagaucaagagcgcccugcugagcaccaacaaggccguggugagccugagcaacggcgugagcgugcugaccuucaaggugcuggaccugaagaacuacaucgacaagcagcugcugcccauccugaacaagcagagcugcagcaucagcaacaucgagaccgugaucgaguuccagcagaagaacaacagacugcuggagaucaccagagaguucagcgugaacgccggcgugaccacccccgugagcaccuacaugcugaccaacagcgagcugcugagccugaucaacgacaugcccaucaccaacgaccagaagaagcugaugagcaacaacgugcagaucgugagacagcagagcuacagcaucaugugcaucaucaaggaggaggugcuggccuacguggugcagcugccccuguacggcgugaucgacacccccugcuggaagcugcacaccagcccccugugcaccaccaacaccaaggagggcagcaacaucugccugaccagaaccgacagaggcugguacugcgacaacgccggcagcgugagcuucuucccccaggccgagaccugcaaggugcagagcaacagaguguucugcgacaccaugaacagccugacccugcccagcgaggugaaccugugcaacguggacaucuucaaccccaaguacgacugcaagaucaugaccagcaagaccgacgugagcagcagcgugaucaccagccugggcgccaucgugagcugcuacggcaagaccaagugcaccgccagcaacaagaacagaggcaucaucaagaccuucagcaacggcugcgacuacgugagcaacaagggcguggacaccgugagcgugggcaacacccuguacuacgugaacaagcaggagggcaagagccuguacgugaagggcgagcccaucaucaacuucuacgacccccugguguuccccagcgacgaguucgacgccagcaucagccaggugaacgagaagaucaaccagagccuggccuucaucagaaagagcgacgagcugcugcacaacgugaacgccggcaagagcaccaccaacaucaugaucaccaccaucaucaucgugaucaucgugauccugcugagccugaucgccgugggccugcugcuguacugcaaggccagaugaggacuaguggaagcauuuuccuggcugauuaaaagaaauuacucagcuauggucaucuguuccuguuagaaggcuaugcagcauauuauauacuaugcgcauguuaugaaaugcauaauaaaaaauuuuaaaaaaucuaaaagaucuaaaaaaaaaaaaaaaaaaaaaaaaaaaaaaaaaaaaaaaaaaaaaaaaaaaaaaaaaaaaaaaaugcaucccccccccccccccccccccccccccccccaaaggcucuuuucagagccaccagaauu

SEQ ID NO: 1585 - RNA, 2036 nt, Artificial Sequence
  mRNA product Design h-3 comprising derived and/or modified sequence from HRSV(A2)__F-del_DSCav1 (opt5)
gggagacccgugacccggaaguuguacggcuacgcgacuuucccucccacaaacccucgcgcccuuccuuuccuacuugggcccggcagaaagcuuaccauggagcugcucauccugaaggccaacgcuauuaccacaauccuuacggccgugaccuucugcuuugcgagcggccagaauauuacagaagaguucuaccaauccaccuguucugcugucagcaaaggguaucuguccgcccucagaacaggaugguacaccucuguuaucacaauugaacugagcaacaucaaggagaauaaaugcaacggcaccgacgccaaggugaaacuuaucaagcaggaacuggauaaguauaaaaaugcugugacggagcuccagcugcugaugcaguccacccccgccacaaacaaucgggcucgcagagagcucccucgguuuaugaacuacacccugaauaacgccaagaaaacaaaugucacccuuucuaagaaacgcaagagacgguuccugggguuucuccugggagugggcagcgcgauugccuccgggguugcuguguguaagguccuucaccuggaaggagaggugaacaaaaucaagagcgcccuccugucuacgaauaaagcuguugugucccugagcaacggcgucucugugcucacauucaaggugcuggaccuuaaaaauuauauugauaagcaacugcucccgauccugaacaaacaguccugcagcauuucuaacaucgaaaccgucauugaguuucagcagaagaauaaccgccuucuggagaucacaagagaauuuuccguuaaugccggcgugaccacccccgugagcacauacaugcucacgaacuccgagcugcugucucucaucaaugacaugccuauuaccaacgaucaaaagaaacugaugagcaauaacguccagaucgugcggcagcaguccuauagcauuauguguaucauuaaggaagagguucuugcguacgugguccaacugccccucuacggggugaucgacacaccuugcuggaaacugcauaccucuccccuuuguacaaccaauacgaaggaaggauccaacaucugccugacacgcaccgauagaggcugguauugugacaaugccgggagcguuucuuucuucccucaggcugagaccugcaaagugcagagcaaccgggucuuuugugauacaaugaacucccucacccugccgucugaggugaaucugugcaaugucgacauuuucaaccccaaguacgauugcaagaucaugacaagcaaaacggacguguccagcucuguuauuaccucccucggagccaucgugagcuguuauggcaagacaaaaugcaccgcuucuaacaagaaucgcgggauuaucaaaacauuuuccaacggaugugauuacgucagcaauaagggcguggacaccguuuccgugggcaacacgcuguauuacgucaauaagcaagaagggaaaucucuuuaugugaagggagagccuaucauuaacuucuacgacccccugguguucccuagcgaugaauuugacgccuccaucucucagguuaaugagaaaauuaaccagagccucgccuucaucagaaaguccgaugaacugcugcacaaugucaacgcuggcaaaagcaccacaaauauuaugaucaccacaauuaucaucgugauuaucgugauucuucucucucugaucgcggucgggcugcuccuguacugcaaggcccggugaggacuaguggaagcauuuuccuggcugauuaaaagaaauuacucagcuauggucaucuguuccuguuagaaggcuaugcagcauauuauauacuaugcgcauguuaugaaaugcauaauaaaaaauuuuaaaaaaucuaaaagaucuaaaaaaaaaaaaaaaaaaaaaaaaaaaaaaaaaaaaaaaaaaaaaaaaaaaaaaaaaaaaaaaaugcaucccccccccccccccccccccccccccccccaaaggcucuuuucagagccaccagaauu

SEQ ID NO: 1586 - RNA, 2036 nt, Artificial Sequence
  mRNA product Design h-3 comprising derived and/or modified sequence from HRSV(A2)__F-del_DSCav1 (opt6)
gggagacccgugacccggaaguuguacggcuacgcgacuuucccucccacaaacccucgcgcccuuccuuuccuacuugggcccggcagaaagcuuaccauggaacuauuaauauuaaaagcaaaugcuauuaccacaauacuuacugcuguaaccuucugcuuugccucuggccaaaacauaacagaagaauuuuaucaaucaacuugcuccgcuguaagcaaaggcuaccuaucagcauuacgcaccggcugguacacaucaguaauaacaauagaacuauccaacauaaaagaaaauaaaugcaacggaacagacgcaaaaguaaaauuaauaaaacaagaacucgacaaauacaaaaacgcaguaacagaauuacaacuacuaaugcaaaguacuccagccaccaacaacagagcaagaagagaauuaccacgauuuaugaacuacacacuaaacaaugcaaaaaaaacaaacguaacacuaucaaaaaaacguaaacgcagauucuuaggcuuccuccuagguguaggcucagcaaucgccucaggaguggcaguuuguaaaguacuacaccuagaaggagaaguaaacaaaaucaaaucugcccuuuuaucgacaaacaaagcaguaguaucguuauccaauggagucucaguauugacauucaaaguauuagaccuaaaaaauuauauagauaaacaacucuuaccuaucuuaaauaaacaaagcugcucaauaaguaacauagaaaccguaauagaauuucaacaaaaaaacaauagacuccuugagaucacucgagaauuuucaguaaacgcagguguaacaacaccaguaagcacauacaugcuaacaaauagugaacuauuaucucuaauuaacgauaugcccauaaccaacgaucaaaaaaaacucaugaguaacaacguacaaauaguaagacaacaauccuauagcauaaugugcauuauaaaagaagaaguacuagcauauguaguccaacuaccacuauacggcguaauagacacaccaugcuggaaacuacacaccucaccccuaugcacaacaaauacaaaagaaggaucaaacauaugcuuaaccaggacagacagaggcugguacugcgauaacgcaggaucuguuucauucuucccccaagcagaaacaugcaaaguacaaucaaacagaguauuuugugauaccaugaacucacucacauuaccauccgaagucaaccucugcaacguagacauauucaaccccaaauacgacugcaaaauaaugaccucaaaaacagauguaucaucaucaguaaucacaucacuaggagcuaucguaucuuguuauggaaaaacaaaaugcacagcauccaacaaaaacagaggaauuaucaaaacauucucaaauggaugugacuauguaucaaacaaaggaguagacaccguaagcguaggcaauacacuauauuacguaaauaaacaagaaggaaaaucacuauacguaaaaggugaaccaauaauaaacuucuaugacccccuaguauucccaucagaugaauuugacgcaagcauaucacaagucaacgaaaaaauaaaccaaucacuggcauucauucgcaaaucagaugaacuucuccacaacguaaacgcugguaaaagcacuacaaacauaaugauaacaacaaucaucauugucauaauaguuauucuauuaucacuaaucgcaguaggauuacuacuauacuguaaagcgagguaaggacuaguggaagcauuuuccuggcugauuaaaagaaauuacucagcuauggucaucuguuccuguuagaaggcuaugcagcauauuauauacuaugcgcauguuaugaaaugcauaauaaaaaauuuuaaaaaaucuaaaagaucuaaaaaaaaaaaaaaaaaaaaaaaaaaaaaaaaaaaaaaaaaaaaaaaaaaaaaaaaaaaaaaaaugcaucccccccccccccccccccccccccccccccaaaggcucuuuucagagccaccagaauu

SEQ ID NO: 1587 - RNA, 2036 nt, Artificial Sequence
  mRNA product Design h-3 comprising derived and/or modified sequence from HRSV(A2)__F-del_DSCav1 (opt11)
gggagacccgugacccggaaguuguacggcuacgcgacuuucccucccacaaacccucgcgcccuuccuuuccuacuugggcccggcagaaagcuuaccauggagcugcucauccugaaggccaacgccaucaccacaauccugacggcggugaccuucugcuucgccagcggccagaacaucaccgaggaguucuaccaguccacgugcagcgccgucuccaagggguaccucagcgcccugcgaaccggcugguacaccuccgugaucaccaucgagcugucaaacaucaaggagaacaagugcaacgggaccgaugccaagguuaagcucaucaagcaggagcuggacaaguacaagaacgcggucacggagcugcagcuccugaugcaguccacuccggcaaccaacaaccgcgccaggcgcgagcugccccgguucaugaacuacacccucaacaacgccaagaagacgaaugugacccugagcaagaagcgcaagcggcgcuuccugggcuuccuccuaggggugggcuccgccaucgcgagcggcgucgccgugugcaagguguugcaccucgagggggaggucaacaagaucaagagcgcccugcuguccaccaacaaggccgugguaagccucuccaacggcgucagcguucugaccuucaaggugcuggaccucaagaacuauaucgacaagcagcugcugcccauccugaacaagcagagcugcuccaucucaaacaucgaaacggugauugaguuccagcagaagaacaaccggcuccuggaaaucacccgcgaguucagcgugaacgccggggucaccacccccguguccacguacaugcugaccaacagcgagcuccuaucccugaucaacgacaugccgaucaccaacgaccagaagaagcucaugagcaacaacgugcagaucguccggcagcaguccuacagcaucaugugcaucaucaaggaagaggugcuggcguacgugguccagcugccccucuacggcgugaucgacacccccugcuggaagcugcacacgagcccccugugcacaaccaacaccaaggagggguccaacaucugccucacgcgcaccgaccggggcugguacugcgacaacgccggcagcgucuccuucuucccgcaggccgagaccugcaaggugcagagcaaccgcguguucugcgacaccaugaacucccugacgcugcccucugagguaaaccucugcaacgucgacaucuucaaccccaaguacgacugcaagaucaugaccuccaagacagacgugagcuccagcgugaucacaucccugggggccaucgucagcugcuacggcaagacuaaguguacugccagcaacaagaaccgggggaucaucaagaccuucuccaacggcugcgacuacgugagcaacaagggcguggacaccguguccgucgggaacacccuguacuacguuaauaagcaggagggcaagagccucuacgugaaaggggagcccaucauuaacuucuacgacccacugguuuuccccuccgacgaguucgacgcgagcaucucccaggugaacgagaagaucaaccagagccuggccuucauccgcaaguccgacgagcugcuccacaacgugaacgccggcaagagcacgaccaacaucaugaucaccaccaucaucaucgugaucaucgugauucugcugucccucaucgccguggggcugcugcuuuacugcaaggcccggugaggacuaguggaagcauuuuccuggcugauuaaaagaaauuacucagcuauggucaucuguuccuguuagaaggcuaugcagcauauuauauacuaugcgcauguuaugaaaugcauaauaaaaaauuuuaaaaaaucuaaaagaucuaaaaaaaaaaaaaaaaaaaaaaaaaaaaaaaaaaaaaaaaaaaaaaaaaaaaaaaaaaaaaaaaugcaucccccccccccccccccccccccccccccccaaaggcucuuuucagagccaccagaauu

SEQ ID NO: 1588 - RNA, 2099 nt, Artificial Sequence
  mRNA product Design h-4 comprising derived and/or modified sequence from HRSV(A2)__F-del_DSCav1 (opt1)
gggagagggcgcuuggcuugcaaggacccugagcugcggcauugaagcacacccaacccaacucgacugaagucagccucacugaaccggaucugagaaucuucucucucugggcuugccagggcucuccgaaccuagcuagcauccucuucaauuccaacuagaaagcuuaccauggagcugcucauccugaaggccaacgccaucaccaccauccugacggcggugaccuucugcuucgccagcggccagaacaucaccgaggaguucuaccaguccacgugcagcgccgucuccaagggguaccucagcgcccugcggaccggcugguacaccuccgugaucaccaucgagcugagcaacaucaaggagaacaagugcaacgggaccgacgccaaggugaagcucaucaagcaggagcuggacaaguacaagaacgcggucacggagcugcagcuccugaugcaguccaccccggcaaccaacaaccgcgcccggcgcgagcugccccgguucaugaacuacacccucaacaacgccaagaagacgaacgugacccugagcaagaagcgcaagcggcgcuuccugggcuuccuccugggggugggcuccgccaucgcgagcggcgucgccgugugcaaggugcugcaccucgagggggaggucaacaagaucaagagcgcccugcuguccaccaacaaggccguggugagccucuccaacggcgucagcgugcugaccuucaaggugcuggaccucaagaacuacaucgacaagcagcugcugcccauccugaacaagcagagcugcuccaucagcaacaucgagacggugaucgaguuccagcagaagaacaaccggcuccuggagaucacccgcgaguucagcgugaacgccggggucaccacccccguguccacguacaugcugaccaacagcgagcuccugucccugaucaacgacaugccgaucaccaacgaccagaagaagcucaugagcaacaacgugcagaucguccggcagcaguccuacagcaucaugugcaucaucaaggaggaggugcuggcguacgugguccagcugccccucuacggcgugaucgacacccccugcuggaagcugcacacgagcccccugugcaccaccaacaccaaggagggguccaacaucugccucacgcgcaccgaccggggcugguacugcgacaacgccggcagcgucuccuucuucccgcaggccgagaccugcaaggugcagagcaaccgcguguucugcgacaccaugaacucccugacgcugcccagcgagguaaaccucugcaacgucgacaucuucaaccccaaguacgacugcaagaucaugaccuccaagaccgacgugagcuccagcgugaucaccucccugggggccaucgucagcugcuacggcaagacgaagugcaccgccagcaacaagaaccgggggaucaucaagaccuucuccaacggcugcgacuacgugagcaacaagggcguggacaccguguccgucgggaacacccuguacuacgugaacaagcaggagggcaagagccucuacgugaagggggagcccaucaucaacuucuacgacccgcuggucuuccccuccgacgaguucgacgcgagcaucucccaggugaacgagaagaucaaccagagccuggccuucauccgcaaguccgacgagcugcuccacaacgugaacgccggcaagagcacgaccaacaucaugaucaccaccaucaucaucgucaucaucgugauccugcugucccucaucgccguggggcugcugcucuacugcaaggcccggugaggacuaguaauaaggaaacuguaugaaugucugugggcaggaagugaagagauccuucuguaaagguuuuuggaauuaugucugcugaauaauaaacuuuuuugaaauaauaaaucugguagaaaaaugagaucuaaaaaaaaaaaaaaaaaaaaaaaaaaaaaaaaaaaaaaaaaaaaaaaaaaaaaaaaaaaaaaaaugcaucccccccccccccccccccccccccccccccaaaggcucuuuucagagccaccagaauu

SEQ ID NO: 1589 - RNA, 2099 nt, Artificial Sequence
  mRNA product Design h-4 comprising derived and/or modified sequence from HRSV(A2)__F-del_DSCav1 (opt1)
gggagagggcgcuuggcuugcaaggacccugagcugcggcauugaagcacacccaacccaacucgacugaagucagccucacugaaccggaucugagaaucuucucucucugggcuugccagggcucuccgaaccuagcuagcauccucuucaauuccaacuagaaagcuuaccauggagcugcucauccugaaggccaacgccaucaccaccauccugacggcggugaccuucugcuucgccagcggccagaacaucaccgaggaguucuaccaguccacgugcagcgccgucuccaagggguaccucagcgcccugcgcaccggcugguacaccuccgugaucaccaucgagcugagcaacaucaaggagaacaagugcaacgggaccgacgccaaggugaagcucaucaagcaggagcuggacaaguacaagaacgcggucacggagcugcagcuccugaugcaguccacccccgccaccaacaaccgggcccgccgggagcugccgcgcuucaugaacuacacccucaacaacgccaagaagacgaacgugacccugagcaagaagcggaagcgccgguuccugggcuuccuccugggggugggcuccgcgaucgccagcggcgucgccgugugcaaggugcugcaccucgagggggaggucaacaagaucaaguccgcccugcugagcaccaacaaggccguggugucccucagcaacggcgucuccgugcugaccuucaaggugcuggaccucaagaacuacaucgacaagcagcugcugcccauccucaacaagcagagcugcuccaucagcaacaucgagacggucaucgaguuccagcagaagaacaaccgccugcuggagaucacccgggaguucuccgugaacgcgggggugaccacccccgucagcacguacaugcucaccaacagcgagcugcugucccucaucaacgacaugcccaucaccaacgaccagaagaagcugaugagcaacaacgugcagaucgugcgccagcaguccuacagcaucaugugcaucaucaaggaggagguccuggccuacguggugcagcucccgcuguacggcgucaucgacacccccugcuggaagcugcacacgagcccccucugcaccaccaacaccaaggaggggagcaacaucugccugacgcggaccgaccgcggcugguacugcgacaacgccggcuccgugagcuucuucccccaggccgagaccugcaagguccaguccaaccggguguucugcgacaccaugaacagccugacgcucccguccgaggugaaccugugcaacgucgacaucuucaaccccaaguacgacugcaagaucaugaccagcaagaccgacguguccagcuccgugaucaccagccugggggccaucgucuccugcuacggcaagacgaagugcaccgcgagcaacaagaaccgcgggaucaucaagaccuucuccaacggcugcgacuacgugagcaacaagggcguggacaccgucagcguggggaacacccucuacuacgugaacaagcaggagggcaagucccuguacgucaagggggagcccaucaucaacuucuacgacccccugguguucccgagcgacgaguucgacgccuccaucagccaggugaacgagaagaucaaccagucccucgccuucauccggaaguccgacgagcugcugcacaacgucaacgccggcaaguccacgaccaacaucaugaucaccaccaucaucaucgugaucaucgugauccugcucagccugaucgccgucgggcugcuccuguacugcaaggcgcgcugaggacuaguaauaaggaaacuguaugaaugucugugggcaggaagugaagagauccuucuguaaagguuuuuggaauuaugucugcugaauaauaaacuuuuuugaaauaauaaaucugguagaaaaaugagaucuaaaaaaaaaaaaaaaaaaaaaaaaaaaaaaaaaaaaaaaaaaaaaaaaaaaaaaaaaaaaaaaaugcaucccccccccccccccccccccccccccccccaaaggcucuuuucagagccaccagaauu

SEQ ID NO: 1590 - RNA, 2099 nt, Artificial Sequence
  mRNA product Design h-4 comprising derived and/or modified sequence from HRSV(A2)__F-del_DSCav1 (opt2)
gggagagggcgcuuggcuugcaaggacccugagcugcggcauugaagcacacccaacccaacucgacugaagucagccucacugaaccggaucugagaaucuucucucucugggcuugccagggcucuccgaaccuagcuagcauccucuucaauuccaacuagaaagcuuaccauggagcuccucauccucaaggccaacgccaucaccaccauccucaccgccgucaccuucugcuucgccuccggccagaacaucaccgaggaguucuaccaguccaccugcuccgccgucuccaagggcuaccucuccgcccuccgcaccggcugguacaccuccgucaucaccaucgagcucuccaacaucaaggagaacaagugcaacggcaccgacgccaaggucaagcucaucaagcaggagcucgacaaguacaagaacgccgucaccgagcuccagcuccucaugcaguccacccccgccaccaacaaccgcgcccgccgcgagcucccccgcuucaugaacuacacccucaacaacgccaagaagaccaacgucacccucuccaagaagcgcaagcgccgcuuccucggcuuccuccucggcgucggcuccgccaucgccuccggcgucgccgucugcaagguccuccaccucgagggcgaggucaacaagaucaaguccgcccuccucuccaccaacaaggccgucgucucccucuccaacggcgucuccguccucaccuucaagguccucgaccucaagaacuacaucgacaagcagcuccuccccauccucaacaagcaguccugcuccaucuccaacaucgagaccgucaucgaguuccagcagaagaacaaccgccuccucgagaucacccgcgaguucuccgucaacgccggcgucaccacccccgucuccaccuacaugcucaccaacuccgagcuccucucccucaucaacgacaugcccaucaccaacgaccagaagaagcucauguccaacaacguccagaucguccgccagcaguccuacuccaucaugugcaucaucaaggaggagguccucgccuacgucguccagcucccccucuacggcgucaucgacacccccugcuggaagcuccacaccuccccccucugcaccaccaacaccaaggagggcuccaacaucugccucacccgcaccgaccgcggcugguacugcgacaacgccggcuccgucuccuucuucccccaggccgagaccugcaagguccaguccaaccgcgucuucugcgacaccaugaacucccucacccuccccuccgaggucaaccucugcaacgucgacaucuucaaccccaaguacgacugcaagaucaugaccuccaagaccgacgucuccuccuccgucaucaccucccucggcgccaucgucuccugcuacggcaagaccaagugcaccgccuccaacaagaaccgcggcaucaucaagaccuucuccaacggcugcgacuacgucuccaacaagggcgucgacaccgucuccgucggcaacacccucuacuacgucaacaagcaggagggcaagucccucuacgucaagggcgagcccaucaucaacuucuacgacccccucgucuuccccuccgacgaguucgacgccuccaucucccaggucaacgagaagaucaaccagucccucgccuucauccgcaaguccgacgagcuccuccacaacgucaacgccggcaaguccaccaccaacaucaugaucaccaccaucaucaucgucaucaucgucauccuccucucccucaucgccgucggccuccuccucuacugcaaggcccgcugaggacuaguaauaaggaaacuguaugaaugucugugggcaggaagugaagagauccuucuguaaagguuuuuggaauuaugucugcugaauaauaaacuuuuuugaaauaauaaaucugguagaaaaaugagaucuaaaaaaaaaaaaaaaaaaaaaaaaaaaaaaaaaaaaaaaaaaaaaaaaaaaaaaaaaaaaaaaaugcaucccccccccccccccccccccccccccccccaaaggcucuuuucagagccaccagaauu

SEQ ID NO: 1591 - RNA, 2099 nt, Artificial Sequence
  mRNA product Design h-4 comprising derived and/or modified sequence from HRSV(A2)__F-del_DSCav1 (opt3)
gggagagggcgcuuggcuugcaaggacccugagcugcggcauugaagcacacccaacccaacucgacugaagucagccucacugaaccggaucugagaaucuucucucucugggcuugccagggcucuccgaaccuagcuagcauccucuucaauuccaacuagaaagcuuaccauggagcugcucauccuuaaggccaacgcuauuaccacaauacugacugcagugacguucugcuuugccagcggccagaauaucaccgaagaguucuaccaauccacauguucugcggucucaaaaggguauuugagugcuuuaagaacuggaugguacaccagcguuauuacaaucgaacuguccaacauuaaggagaauaaaugcaacgguaccgacgccaaggugaaacuaaucaagcaggaacucgauaaguauaaaaaugcaguaacugagcugcagcuucugaugcagucuacacccgccaccaacaauagggcucggcgcgaguugccucgauuuaugaacuacacgcucaauaacgcaaagaaaacuaaugugacccugucgaagaaacguaagagaagguuccugggcuuucucuuaggggucggaucagccauagcuagcggcguggccguuuguaaggugcugcaccuugaaggugaggucaacaaaaucaagagugcguugcuguccacaaauaaagcagugguaucucuaagcaacgggguuuccgugcucacuuucaagguccuggaccuuaaaaauuauauugauaagcaacuguugccaauccucaacaaacagucaugcaguauuagcaacaucgaaaccgugauagaguuucagcagaagaauaaccggcuguuagagauuacacgcgaguucucugugaaugccggagucaccacgccgguuuccacuuacaugcugacaaacucagaacuccuuagccugaucaaugacaugcccauuaccaacgaucaaaagaaauugaugaguaauaacgugcagaucguaagacagcagucuuauuccaucauguguauuauaaaggaagaggugcuagcuuacgucgugcaacugccucucuacggcguuaucgacacuccaugcuggaaacugcauacaagcccccuuuguaccacgaauaccaaggaaggcucgaacauuugccugacaaggacugaucgggggugguauugugacaaugccggaucuguguccuuuuucccucaggcagagaccugcaaaguccagucaaaccgcguguuuugugauacaaugaauaguuugacucucccaagcgagguaaaccugugcaauguugacaucuucaaccccaaguacgauugcaagauaaugaccuccaaaacagacgugucuagcucagucauuaccaguuuaggugcuaucguguccuguuauggcaagacuaaaugcacggccagcaacaagaaucgagggaucauuaaaacauuuucuaacggaugugauuacgucucaaauaagggcguggacaccguuaguguggguaacacucuguauuacguaaauaagcaagaagggaaaagccuauaugucaagggagagccuaucauuaacuucuacgacccacucguguucccguccgaugaauuugacgcgucuauaucgcagguuaaugagaaaaucaaccagagccuggccuucauuagaaaguccgaugaacuuuugcacaaugugaacgcaggcaaaucaaccacaaauaucaugaucaccacuauuauaaucgucauuaucgugauucugcucagucugaucgcuguaggccuucuguuguacugcaaggccaggugaggacuaguaauaaggaaacuguaugaaugucugugggcaggaagugaagagauccuucuguaaagguuuuuggaauuaugucugcugaauaauaaacuuuuuugaaauaauaaaucugguagaaaaaugagaucuaaaaaaaaaaaaaaaaaaaaaaaaaaaaaaaaaaaaaaaaaaaaaaaaaaaaaaaaaaaaaaaaugcaucccccccccccccccccccccccccccccccaaaggcucuuuucagagccaccagaauu

SEQ ID NO: 1592 - RNA, 2099 nt, Artificial Sequence
  mRNA product Design h-4 comprising derived and/or modified sequence from HRSV(A2)__F-del_DSCav1 (opt4)
gggagagggcgcuuggcuugcaaggacccugagcugcggcauugaagcacacccaacccaacucgacugaagucagccucacugaaccggaucugagaaucuucucucucugggcuugccagggcucuccgaaccuagcuagcauccucuucaauuccaacuagaaagcuuaccauggagcugcugauccugaaggccaacgccaucaccaccauccugaccgccgugaccuucugcuucgccagcggccagaacaucaccgaggaguucuaccagagcaccugcagcgccgugagcaagggcuaccugagcgcccugagaaccggcugguacaccagcgugaucaccaucgagcugagcaacaucaaggagaacaagugcaacggcaccgacgccaaggugaagcugaucaagcaggagcuggacaaguacaagaacgccgugaccgagcugcagcugcugaugcagagcacccccgccaccaacaacagagccagaagagagcugcccagauucaugaacuacacccugaacaacgccaagaagaccaacgugacccugagcaagaagagaaagagaagauuccugggcuuccugcugggcgugggcagcgccaucgccagcggcguggccgugugcaaggugcugcaccuggagggcgaggugaacaagaucaagagcgcccugcugagcaccaacaaggccguggugagccugagcaacggcgugagcgugcugaccuucaaggugcuggaccugaagaacuacaucgacaagcagcugcugcccauccugaacaagcagagcugcagcaucagcaacaucgagaccgugaucgaguuccagcagaagaacaacagacugcuggagaucaccagagaguucagcgugaacgccggcgugaccacccccgugagcaccuacaugcugaccaacagcgagcugcugagccugaucaacgacaugcccaucaccaacgaccagaagaagcugaugagcaacaacgugcagaucgugagacagcagagcuacagcaucaugugcaucaucaaggaggaggugcuggccuacguggugcagcugccccuguacggcgugaucgacacccccugcuggaagcugcacaccagcccccugugcaccaccaacaccaaggagggcagcaacaucugccugaccagaaccgacagaggcugguacugcgacaacgccggcagcgugagcuucuucccccaggccgagaccugcaaggugcagagcaacagaguguucugcgacaccaugaacagccugacccugcccagcgaggugaaccugugcaacguggacaucuucaaccccaaguacgacugcaagaucaugaccagcaagaccgacgugagcagcagcgugaucaccagccugggcgccaucgugagcugcuacggcaagaccaagugcaccgccagcaacaagaacagaggcaucaucaagaccuucagcaacggcugcgacuacgugagcaacaagggcguggacaccgugagcgugggcaacacccuguacuacgugaacaagcaggagggcaagagccuguacgugaagggcgagcccaucaucaacuucuacgacccccugguguuccccagcgacgaguucgacgccagcaucagccaggugaacgagaagaucaaccagagccuggccuucaucagaaagagcgacgagcugcugcacaacgugaacgccggcaagagcaccaccaacaucaugaucaccaccaucaucaucgugaucaucgugauccugcugagccugaucgccgugggccugcugcuguacugcaaggccagaugaggacuaguaauaaggaaacuguaugaaugucugugggcaggaagugaagagauccuucuguaaagguuuuuggaauuaugucugcugaauaauaaacuuuuuugaaauaauaaaucugguagaaaaaugagaucuaaaaaaaaaaaaaaaaaaaaaaaaaaaaaaaaaaaaaaaaaaaaaaaaaaaaaaaaaaaaaaaaugcaucccccccccccccccccccccccccccccccaaaggcucuuuucagagccaccagaauu

SEQ ID NO: 1593 - RNA, 2099 nt, Artificial Sequence
  mRNA product Design h-4 comprising derived and/or modified sequence from HRSV(A2)__F-del_DSCav1 (opt5)
gggagagggcgcuuggcuugcaaggacccugagcugcggcauugaagcacacccaacccaacucgacugaagucagccucacugaaccggaucugagaaucuucucucucugggcuugccagggcucuccgaaccuagcuagcauccucuucaauuccaacuagaaagcuuaccauggagcugcucauccugaaggccaacgcuauuaccacaauccuuacggccgugaccuucugcuuugcgagcggccagaauauuacagaagaguucuaccaauccaccuguucugcugucagcaaaggguaucuguccgcccucagaacaggaugguacaccucuguuaucacaauugaacugagcaacaucaaggagaauaaaugcaacggcaccgacgccaaggugaaacuuaucaagcaggaacuggauaaguauaaaaaugcugugacggagcuccagcugcugaugcaguccacccccgccacaaacaaucgggcucgcagagagcucccucgguuuaugaacuacacccugaauaacgccaagaaaacaaaugucacccuuucuaagaaacgcaagagacgguuccugggguuucuccugggagugggcagcgcgauugccuccgggguugcuguguguaagguccuucaccuggaaggagaggugaacaaaaucaagagcgcccuccugucuacgaauaaagcuguugugucccugagcaacggcgucucugugcucacauucaaggugcuggaccuuaaaaauuauauugauaagcaacugcucccgauccugaacaaacaguccugcagcauuucuaacaucgaaaccgucauugaguuucagcagaagaauaaccgccuucuggagaucacaagagaauuuuccguuaaugccggcgugaccacccccgugagcacauacaugcucacgaacuccgagcugcugucucucaucaaugacaugccuauuaccaacgaucaaaagaaacugaugagcaauaacguccagaucgugcggcagcaguccuauagcauuauguguaucauuaaggaagagguucuugcguacgugguccaacugccccucuacggggugaucgacacaccuugcuggaaacugcauaccucuccccuuuguacaaccaauacgaaggaaggauccaacaucugccugacacgcaccgauagaggcugguauugugacaaugccgggagcguuucuuucuucccucaggcugagaccugcaaagugcagagcaaccgggucuuuugugauacaaugaacucccucacccugccgucugaggugaaucugugcaaugucgacauuuucaaccccaaguacgauugcaagaucaugacaagcaaaacggacguguccagcucuguuauuaccucccucggagccaucgugagcuguuauggcaagacaaaaugcaccgcuucuaacaagaaucgcgggauuaucaaaacauuuuccaacggaugugauuacgucagcaauaagggcguggacaccguuuccgugggcaacacgcuguauuacgucaauaagcaagaagggaaaucucuuuaugugaagggagagccuaucauuaacuucuacgacccccugguguucccuagcgaugaauuugacgccuccaucucucagguuaaugagaaaauuaaccagagccucgccuucaucagaaaguccgaugaacugcugcacaaugucaacgcuggcaaaagcaccacaaauauuaugaucaccacaauuaucaucgugauuaucgugauucuucucucucugaucgcggucgggcugcuccuguacugcaaggcccggugaggacuaguaauaaggaaacuguaugaaugucugugggcaggaagugaagagauccuucuguaaagguuuuuggaauuaugucugcugaauaauaaacuuuuuugaaauaauaaaucugguagaaaaaugagaucuaaaaaaaaaaaaaaaaaaaaaaaaaaaaaaaaaaaaaaaaaaaaaaaaaaaaaaaaaaaaaaaaugcaucccccccccccccccccccccccccccccccaaaggcucuuuucagagccaccagaauu

SEQ ID NO: 1594 - RNA, 2099 nt, Artificial Sequence
  mRNA product Design h-4 comprising derived and/or modified sequence from HRSV(A2)__F-del_DSCav1 (opt6)
gggagagggcgcuuggcuugcaaggacccugagcugcggcauugaagcacacccaacccaacucgacugaagucagccucacugaaccggaucugagaaucuucucucucugggcuugccagggcucuccgaaccuagcuagcauccucuucaauuccaacuagaaagcuuaccauggaacuauuaauauuaaaagcaaaugcuauuaccacaauacuuacugcuguaaccuucugcuuugccucuggccaaaacauaacagaagaauuuuaucaaucaacuugcuccgcuguaagcaaaggcuaccuaucagcauuacgcaccggcugguacacaucaguaauaacaauagaacuauccaacauaaaagaaaauaaaugcaacggaacagacgcaaaaguaaaauuaauaaaacaagaacucgacaaauacaaaaacgcaguaacagaauuacaacuacuaaugcaaaguacuccagccaccaacaacagagcaagaagagaauuaccacgauuuaugaacuacacacuaaacaaugcaaaaaaaacaaacguaacacuaucaaaaaaacguaaacgcagauucuuaggcuuccuccuagguguaggcucagcaaucgccucaggaguggcaguuuguaaaguacuacaccuagaaggagaaguaaacaaaaucaaaucugcccuuuuaucgacaaacaaagcaguaguaucguuauccaauggagucucaguauugacauucaaaguauuagaccuaaaaaauuauauagauaaacaacucuuaccuaucuuaaauaaacaaagcugcucaauaaguaacauagaaaccguaauagaauuucaacaaaaaaacaauagacuccuugagaucacucgagaauuuucaguaaacgcagguguaacaacaccaguaagcacauacaugcuaacaaauagugaacuauuaucucuaauuaacgauaugcccauaaccaacgaucaaaaaaaacucaugaguaacaacguacaaauaguaagacaacaauccuauagcauaaugugcauuauaaaagaagaaguacuagcauauguaguccaacuaccacuauacggcguaauagacacaccaugcuggaaacuacacaccucaccccuaugcacaacaaauacaaaagaaggaucaaacauaugcuuaaccaggacagacagaggcugguacugcgauaacgcaggaucuguuucauucuucccccaagcagaaacaugcaaaguacaaucaaacagaguauuuugugauaccaugaacucacucacauuaccauccgaagucaaccucugcaacguagacauauucaaccccaaauacgacugcaaaauaaugaccucaaaaacagauguaucaucaucaguaaucacaucacuaggagcuaucguaucuuguuauggaaaaacaaaaugcacagcauccaacaaaaacagaggaauuaucaaaacauucucaaauggaugugacuauguaucaaacaaaggaguagacaccguaagcguaggcaauacacuauauuacguaaauaaacaagaaggaaaaucacuauacguaaaaggugaaccaauaauaaacuucuaugacccccuaguauucccaucagaugaauuugacgcaagcauaucacaagucaacgaaaaaauaaaccaaucacuggcauucauucgcaaaucagaugaacuucuccacaacguaaacgcugguaaaagcacuacaaacauaaugauaacaacaaucaucauugucauaauaguuauucuauuaucacuaaucgcaguaggauuacuacuauacuguaaagcgagguaaggacuaguaauaaggaaacuguaugaaugucugugggcaggaagugaagagauccuucuguaaagguuuuuggaauuaugucugcugaauaauaaacuuuuuugaaauaauaaaucugguagaaaaaugagaucuaaaaaaaaaaaaaaaaaaaaaaaaaaaaaaaaaaaaaaaaaaaaaaaaaaaaaaaaaaaaaaaaugcaucccccccccccccccccccccccccccccccaaaggcucuuuucagagccaccagaauu

SEQ ID NO: 1595 - RNA, 2099 nt, Artificial Sequence
  mRNA product Design h-4 comprising derived and/or modified sequence from HRSV(A2)__F-del_DSCav1 (opt11)
gggagagggcgcuuggcuugcaaggacccugagcugcggcauugaagcacacccaacccaacucgacugaagucagccucacugaaccggaucugagaaucuucucucucugggcuugccagggcucuccgaaccuagcuagcauccucuucaauuccaacuagaaagcuuaccauggagcugcucauccugaaggccaacgccaucaccacaauccugacggcggugaccuucugcuucgccagcggccagaacaucaccgaggaguucuaccaguccacgugcagcgccgucuccaagggguaccucagcgcccugcgaaccggcugguacaccuccgugaucaccaucgagcugucaaacaucaaggagaacaagugcaacgggaccgaugccaagguuaagcucaucaagcaggagcuggacaaguacaagaacgcggucacggagcugcagcuccugaugcaguccacuccggcaaccaacaaccgcgccaggcgcgagcugccccgguucaugaacuacacccucaacaacgccaagaagacgaaugugacccugagcaagaagcgcaagcggcgcuuccugggcuuccuccuaggggugggcuccgccaucgcgagcggcgucgccgugugcaagguguugcaccucgagggggaggucaacaagaucaagagcgcccugcuguccaccaacaaggccgugguaagccucuccaacggcgucagcguucugaccuucaaggugcuggaccucaagaacuauaucgacaagcagcugcugcccauccugaacaagcagagcugcuccaucucaaacaucgaaacggugauugaguuccagcagaagaacaaccggcuccuggaaaucacccgcgaguucagcgugaacgccggggucaccacccccguguccacguacaugcugaccaacagcgagcuccuaucccugaucaacgacaugccgaucaccaacgaccagaagaagcucaugagcaacaacgugcagaucguccggcagcaguccuacagcaucaugugcaucaucaaggaagaggugcuggcguacgugguccagcugccccucuacggcgugaucgacacccccugcuggaagcugcacacgagcccccugugcacaaccaacaccaaggagggguccaacaucugccucacgcgcaccgaccggggcugguacugcgacaacgccggcagcgucuccuucuucccgcaggccgagaccugcaaggugcagagcaaccgcguguucugcgacaccaugaacucccugacgcugcccucugagguaaaccucugcaacgucgacaucuucaaccccaaguacgacugcaagaucaugaccuccaagacagacgugagcuccagcgugaucacaucccugggggccaucgucagcugcuacggcaagacuaaguguacugccagcaacaagaaccgggggaucaucaagaccuucuccaacggcugcgacuacgugagcaacaagggcguggacaccguguccgucgggaacacccuguacuacguuaauaagcaggagggcaagagccucuacgugaaaggggagcccaucauuaacuucuacgacccacugguuuuccccuccgacgaguucgacgcgagcaucucccaggugaacgagaagaucaaccagagccuggccuucauccgcaaguccgacgagcugcuccacaacgugaacgccggcaagagcacgaccaacaucaugaucaccaccaucaucaucgugaucaucgugauucugcugucccucaucgccguggggcugcugcuuuacugcaaggcccggugaggacuaguaauaaggaaacuguaugaaugucugugggcaggaagugaagagauccuucuguaaagguuuuuggaauuaugucugcugaauaauaaacuuuuuugaaauaauaaaucugguagaaaaaugagaucuaaaaaaaaaaaaaaaaaaaaaaaaaaaaaaaaaaaaaaaaaaaaaaaaaaaaaaaaaaaaaaaaugcaucccccccccccccccccccccccccccccccaaaggcucuuuucagagccaccagaauu

SEQ ID NO: 1596 - RNA, 2115 nt, Artificial Sequence
  mRNA product Design h-5 comprising derived and/or modified sequence from HRSV(A2)__F-del_DSCav1 (opt1)
gggagagggcgcuuggcuugcaaggacccugagcugcggcauugaagcacacccaacccaacucgacugaagucagccucacugaaccggaucugagaaucuucucucucugggcuugccagggcucuccgaaccuagcuagcauccucuucaauuccaacuagaaagcuuaccauggagcugcucauccugaaggccaacgccaucaccaccauccugacggcggugaccuucugcuucgccagcggccagaacaucaccgaggaguucuaccaguccacgugcagcgccgucuccaagggguaccucagcgcccugcggaccggcugguacaccuccgugaucaccaucgagcugagcaacaucaaggagaacaagugcaacgggaccgacgccaaggugaagcucaucaagcaggagcuggacaaguacaagaacgcggucacggagcugcagcuccugaugcaguccaccccggcaaccaacaaccgcgcccggcgcgagcugccccgguucaugaacuacacccucaacaacgccaagaagacgaacgugacccugagcaagaagcgcaagcggcgcuuccugggcuuccuccugggggugggcuccgccaucgcgagcggcgucgccgugugcaaggugcugcaccucgagggggaggucaacaagaucaagagcgcccugcuguccaccaacaaggccguggugagccucuccaacggcgucagcgugcugaccuucaaggugcuggaccucaagaacuacaucgacaagcagcugcugcccauccugaacaagcagagcugcuccaucagcaacaucgagacggugaucgaguuccagcagaagaacaaccggcuccuggagaucacccgcgaguucagcgugaacgccggggucaccacccccguguccacguacaugcugaccaacagcgagcuccugucccugaucaacgacaugccgaucaccaacgaccagaagaagcucaugagcaacaacgugcagaucguccggcagcaguccuacagcaucaugugcaucaucaaggaggaggugcuggcguacgugguccagcugccccucuacggcgugaucgacacccccugcuggaagcugcacacgagcccccugugcaccaccaacaccaaggagggguccaacaucugccucacgcgcaccgaccggggcugguacugcgacaacgccggcagcgucuccuucuucccgcaggccgagaccugcaaggugcagagcaaccgcguguucugcgacaccaugaacucccugacgcugcccagcgagguaaaccucugcaacgucgacaucuucaaccccaaguacgacugcaagaucaugaccuccaagaccgacgugagcuccagcgugaucaccucccugggggccaucgucagcugcuacggcaagacgaagugcaccgccagcaacaagaaccgggggaucaucaagaccuucuccaacggcugcgacuacgugagcaacaagggcguggacaccguguccgucgggaacacccuguacuacgugaacaagcaggagggcaagagccucuacgugaagggggagcccaucaucaacuucuacgacccgcuggucuuccccuccgacgaguucgacgcgagcaucucccaggugaacgagaagaucaaccagagccuggccuucauccgcaaguccgacgagcugcuccacaacgugaacgccggcaagagcacgaccaacaucaugaucaccaccaucaucaucgucaucaucgugauccugcugucccucaucgccguggggcugcugcucuacugcaaggcccggugaggacuaguacuggcugcaucucccuuuccucuguccuccauccuucucccaggauggugaagggggaccugguacccagugauccccaccccaggauccuaaaucaugacuuaccugcuaauaaaaacucauuggaaaagugagaagaucuaaaaaaaaaaaaaaaaaaaaaaaaaaaaaaaaaaaaaaaaaaaaaaaaaaaaaaaaaaaaaaaaugcaucccccccccccccccccccccccccccccccaaaggcucuuuucagagccaccagaauu

SEQ ID NO: 1597 - RNA, 2115 nt, Artificial Sequence
  mRNA product Design h-5 comprising derived and/or modified sequence from HRSV(A2)__F-del_DSCav1 (opt1)
gggagagggcgcuuggcuugcaaggacccugagcugcggcauugaagcacacccaacccaacucgacugaagucagccucacugaaccggaucugagaaucuucucucucugggcuugccagggcucuccgaaccuagcuagcauccucuucaauuccaacuagaaagcuuaccauggagcugcucauccugaaggccaacgccaucaccaccauccugacggcggugaccuucugcuucgccagcggccagaacaucaccgaggaguucuaccaguccacgugcagcgccgucuccaagggguaccucagcgcccugcgcaccggcugguacaccuccgugaucaccaucgagcugagcaacaucaaggagaacaagugcaacgggaccgacgccaaggugaagcucaucaagcaggagcuggacaaguacaagaacgcggucacggagcugcagcuccugaugcaguccacccccgccaccaacaaccgggcccgccgggagcugccgcgcuucaugaacuacacccucaacaacgccaagaagacgaacgugacccugagcaagaagcggaagcgccgguuccugggcuuccuccugggggugggcuccgcgaucgccagcggcgucgccgugugcaaggugcugcaccucgagggggaggucaacaagaucaaguccgcccugcugagcaccaacaaggccguggugucccucagcaacggcgucuccgugcugaccuucaaggugcuggaccucaagaacuacaucgacaagcagcugcugcccauccucaacaagcagagcugcuccaucagcaacaucgagacggucaucgaguuccagcagaagaacaaccgccugcuggagaucacccgggaguucuccgugaacgcgggggugaccacccccgucagcacguacaugcucaccaacagcgagcugcugucccucaucaacgacaugcccaucaccaacgaccagaagaagcugaugagcaacaacgugcagaucgugcgccagcaguccuacagcaucaugugcaucaucaaggaggagguccuggccuacguggugcagcucccgcuguacggcgucaucgacacccccugcuggaagcugcacacgagcccccucugcaccaccaacaccaaggaggggagcaacaucugccugacgcggaccgaccgcggcugguacugcgacaacgccggcuccgugagcuucuucccccaggccgagaccugcaagguccaguccaaccggguguucugcgacaccaugaacagccugacgcucccguccgaggugaaccugugcaacgucgacaucuucaaccccaaguacgacugcaagaucaugaccagcaagaccgacguguccagcuccgugaucaccagccugggggccaucgucuccugcuacggcaagacgaagugcaccgcgagcaacaagaaccgcgggaucaucaagaccuucuccaacggcugcgacuacgugagcaacaagggcguggacaccgucagcguggggaacacccucuacuacgugaacaagcaggagggcaagucccuguacgucaagggggagcccaucaucaacuucuacgacccccugguguucccgagcgacgaguucgacgccuccaucagccaggugaacgagaagaucaaccagucccucgccuucauccggaaguccgacgagcugcugcacaacgucaacgccggcaaguccacgaccaacaucaugaucaccaccaucaucaucgugaucaucgugauccugcucagccugaucgccgucgggcugcuccuguacugcaaggcgcgcugaggacuaguacuggcugcaucucccuuuccucuguccuccauccuucucccaggauggugaagggggaccugguacccagugauccccaccccaggauccuaaaucaugacuuaccugcuaauaaaaacucauuggaaaagugagaagaucuaaaaaaaaaaaaaaaaaaaaaaaaaaaaaaaaaaaaaaaaaaaaaaaaaaaaaaaaaaaaaaaaugcaucccccccccccccccccccccccccccccccaaaggcucuuuucagagccaccagaauu

SEQ ID NO: 1598 - RNA, 2115 nt, Artificial Sequence
  mRNA product Design h-5 comprising derived and/or modified sequence from HRSV(A2)__F-del_DSCav1 (opt2)
gggagagggcgcuuggcuugcaaggacccugagcugcggcauugaagcacacccaacccaacucgacugaagucagccucacugaaccggaucugagaaucuucucucucugggcuugccagggcucuccgaaccuagcuagcauccucuucaauuccaacuagaaagcuuaccauggagcuccucauccucaaggccaacgccaucaccaccauccucaccgccgucaccuucugcuucgccuccggccagaacaucaccgaggaguucuaccaguccaccugcuccgccgucuccaagggcuaccucuccgcccuccgcaccggcugguacaccuccgucaucaccaucgagcucuccaacaucaaggagaacaagugcaacggcaccgacgccaaggucaagcucaucaagcaggagcucgacaaguacaagaacgccgucaccgagcuccagcuccucaugcaguccacccccgccaccaacaaccgcgcccgccgcgagcucccccgcuucaugaacuacacccucaacaacgccaagaagaccaacgucacccucuccaagaagcgcaagcgccgcuuccucggcuuccuccucggcgucggcuccgccaucgccuccggcgucgccgucugcaagguccuccaccucgagggcgaggucaacaagaucaaguccgcccuccucuccaccaacaaggccgucgucucccucuccaacggcgucuccguccucaccuucaagguccucgaccucaagaacuacaucgacaagcagcuccuccccauccucaacaagcaguccugcuccaucuccaacaucgagaccgucaucgaguuccagcagaagaacaaccgccuccucgagaucacccgcgaguucuccgucaacgccggcgucaccacccccgucuccaccuacaugcucaccaacuccgagcuccucucccucaucaacgacaugcccaucaccaacgaccagaagaagcucauguccaacaacguccagaucguccgccagcaguccuacuccaucaugugcaucaucaaggaggagguccucgccuacgucguccagcucccccucuacggcgucaucgacacccccugcuggaagcuccacaccuccccccucugcaccaccaacaccaaggagggcuccaacaucugccucacccgcaccgaccgcggcugguacugcgacaacgccggcuccgucuccuucuucccccaggccgagaccugcaagguccaguccaaccgcgucuucugcgacaccaugaacucccucacccuccccuccgaggucaaccucugcaacgucgacaucuucaaccccaaguacgacugcaagaucaugaccuccaagaccgacgucuccuccuccgucaucaccucccucggcgccaucgucuccugcuacggcaagaccaagugcaccgccuccaacaagaaccgcggcaucaucaagaccuucuccaacggcugcgacuacgucuccaacaagggcgucgacaccgucuccgucggcaacacccucuacuacgucaacaagcaggagggcaagucccucuacgucaagggcgagcccaucaucaacuucuacgacccccucgucuuccccuccgacgaguucgacgccuccaucucccaggucaacgagaagaucaaccagucccucgccuucauccgcaaguccgacgagcuccuccacaacgucaacgccggcaaguccaccaccaacaucaugaucaccaccaucaucaucgucaucaucgucauccuccucucccucaucgccgucggccuccuccucuacugcaaggcccgcugaggacuaguacuggcugcaucucccuuuccucuguccuccauccuucucccaggauggugaagggggaccugguacccagugauccccaccccaggauccuaaaucaugacuuaccugcuaauaaaaacucauuggaaaagugagaagaucuaaaaaaaaaaaaaaaaaaaaaaaaaaaaaaaaaaaaaaaaaaaaaaaaaaaaaaaaaaaaaaaaugcaucccccccccccccccccccccccccccccccaaaggcucuuuucagagccaccagaauu

SEQ ID NO: 1599 - RNA, 2115 nt, Artificial Sequence
  mRNA product Design h-5 comprising derived and/or modified sequence from HRSV(A2)__F-del_DSCav1 (opt3)
gggagagggcgcuuggcuugcaaggacccugagcugcggcauugaagcacacccaacccaacucgacugaagucagccucacugaaccggaucugagaaucuucucucucugggcuugccagggcucuccgaaccuagcuagcauccucuucaauuccaacuagaaagcuuaccauggagcugcucauccuuaaggccaacgcuauuaccacaauacugacugcagugacguucugcuuugccagcggccagaauaucaccgaagaguucuaccaauccacauguucugcggucucaaaaggguauuugagugcuuuaagaacuggaugguacaccagcguuauuacaaucgaacuguccaacauuaaggagaauaaaugcaacgguaccgacgccaaggugaaacuaaucaagcaggaacucgauaaguauaaaaaugcaguaacugagcugcagcuucugaugcagucuacacccgccaccaacaauagggcucggcgcgaguugccucgauuuaugaacuacacgcucaauaacgcaaagaaaacuaaugugacccugucgaagaaacguaagagaagguuccugggcuuucucuuaggggucggaucagccauagcuagcggcguggccguuuguaaggugcugcaccuugaaggugaggucaacaaaaucaagagugcguugcuguccacaaauaaagcagugguaucucuaagcaacgggguuuccgugcucacuuucaagguccuggaccuuaaaaauuauauugauaagcaacuguugccaauccucaacaaacagucaugcaguauuagcaacaucgaaaccgugauagaguuucagcagaagaauaaccggcuguuagagauuacacgcgaguucucugugaaugccggagucaccacgccgguuuccacuuacaugcugacaaacucagaacuccuuagccugaucaaugacaugcccauuaccaacgaucaaaagaaauugaugaguaauaacgugcagaucguaagacagcagucuuauuccaucauguguauuauaaaggaagaggugcuagcuuacgucgugcaacugccucucuacggcguuaucgacacuccaugcuggaaacugcauacaagcccccuuuguaccacgaauaccaaggaaggcucgaacauuugccugacaaggacugaucgggggugguauugugacaaugccggaucuguguccuuuuucccucaggcagagaccugcaaaguccagucaaaccgcguguuuugugauacaaugaauaguuugacucucccaagcgagguaaaccugugcaauguugacaucuucaaccccaaguacgauugcaagauaaugaccuccaaaacagacgugucuagcucagucauuaccaguuuaggugcuaucguguccuguuauggcaagacuaaaugcacggccagcaacaagaaucgagggaucauuaaaacauuuucuaacggaugugauuacgucucaaauaagggcguggacaccguuaguguggguaacacucuguauuacguaaauaagcaagaagggaaaagccuauaugucaagggagagccuaucauuaacuucuacgacccacucguguucccguccgaugaauuugacgcgucuauaucgcagguuaaugagaaaaucaaccagagccuggccuucauuagaaaguccgaugaacuuuugcacaaugugaacgcaggcaaaucaaccacaaauaucaugaucaccacuauuauaaucgucauuaucgugauucugcucagucugaucgcuguaggccuucuguuguacugcaaggccaggugaggacuaguacuggcugcaucucccuuuccucuguccuccauccuucucccaggauggugaagggggaccugguacccagugauccccaccccaggauccuaaaucaugacuuaccugcuaauaaaaacucauuggaaaagugagaagaucuaaaaaaaaaaaaaaaaaaaaaaaaaaaaaaaaaaaaaaaaaaaaaaaaaaaaaaaaaaaaaaaaugcaucccccccccccccccccccccccccccccccaaaggcucuuuucagagccaccagaauu

SEQ ID NO: 1600 - RNA, 2115 nt, Artificial Sequence
  mRNA product Design h-5 comprising derived and/or modified sequence from HRSV(A2)__F-del_DSCav1 (opt4)
gggagagggcgcuuggcuugcaaggacccugagcugcggcauugaagcacacccaacccaacucgacugaagucagccucacugaaccggaucugagaaucuucucucucugggcuugccagggcucuccgaaccuagcuagcauccucuucaauuccaacuagaaagcuuaccauggagcugcugauccugaaggccaacgccaucaccaccauccugaccgccgugaccuucugcuucgccagcggccagaacaucaccgaggaguucuaccagagcaccugcagcgccgugagcaagggcuaccugagcgcccugagaaccggcugguacaccagcgugaucaccaucgagcugagcaacaucaaggagaacaagugcaacggcaccgacgccaaggugaagcugaucaagcaggagcuggacaaguacaagaacgccgugaccgagcugcagcugcugaugcagagcacccccgccaccaacaacagagccagaagagagcugcccagauucaugaacuacacccugaacaacgccaagaagaccaacgugacccugagcaagaagagaaagagaagauuccugggcuuccugcugggcgugggcagcgccaucgccagcggcguggccgugugcaaggugcugcaccuggagggcgaggugaacaagaucaagagcgcccugcugagcaccaacaaggccguggugagccugagcaacggcgugagcgugcugaccuucaaggugcuggaccugaagaacuacaucgacaagcagcugcugcccauccugaacaagcagagcugcagcaucagcaacaucgagaccgugaucgaguuccagcagaagaacaacagacugcuggagaucaccagagaguucagcgugaacgccggcgugaccacccccgugagcaccuacaugcugaccaacagcgagcugcugagccugaucaacgacaugcccaucaccaacgaccagaagaagcugaugagcaacaacgugcagaucgugagacagcagagcuacagcaucaugugcaucaucaaggaggaggugcuggccuacguggugcagcugccccuguacggcgugaucgacacccccugcuggaagcugcacaccagcccccugugcaccaccaacaccaaggagggcagcaacaucugccugaccagaaccgacagaggcugguacugcgacaacgccggcagcgugagcuucuucccccaggccgagaccugcaaggugcagagcaacagaguguucugcgacaccaugaacagccugacccugcccagcgaggugaaccugugcaacguggacaucuucaaccccaaguacgacugcaagaucaugaccagcaagaccgacgugagcagcagcgugaucaccagccugggcgccaucgugagcugcuacggcaagaccaagugcaccgccagcaacaagaacagaggcaucaucaagaccuucagcaacggcugcgacuacgugagcaacaagggcguggacaccgugagcgugggcaacacccuguacuacgugaacaagcaggagggcaagagccuguacgugaagggcgagcccaucaucaacuucuacgacccccugguguuccccagcgacgaguucgacgccagcaucagccaggugaacgagaagaucaaccagagccuggccuucaucagaaagagcgacgagcugcugcacaacgugaacgccggcaagagcaccaccaacaucaugaucaccaccaucaucaucgugaucaucgugauccugcugagccugaucgccgugggccugcugcuguacugcaaggccagaugaggacuaguacuggcugcaucucccuuuccucuguccuccauccuucucccaggauggugaagggggaccugguacccagugauccccaccccaggauccuaaaucaugacuuaccugcuaauaaaaacucauuggaaaagugagaagaucuaaaaaaaaaaaaaaaaaaaaaaaaaaaaaaaaaaaaaaaaaaaaaaaaaaaaaaaaaaaaaaaaugcaucccccccccccccccccccccccccccccccaaaggcucuuuucagagccaccagaauu

SEQ ID NO: 1601 - RNA, 2115 nt, Artificial Sequence
  mRNA product Design h-5 comprising derived and/or modified sequence from HRSV(A2)__F-del_DSCav1 (opt5)
gggagagggcgcuuggcuugcaaggacccugagcugcggcauugaagcacacccaacccaacucgacugaagucagccucacugaaccggaucugagaaucuucucucucugggcuugccagggcucuccgaaccuagcuagcauccucuucaauuccaacuagaaagcuuaccauggagcugcucauccugaaggccaacgcuauuaccacaauccuuacggccgugaccuucugcuuugcgagcggccagaauauuacagaagaguucuaccaauccaccuguucugcugucagcaaaggguaucuguccgcccucagaacaggaugguacaccucuguuaucacaauugaacugagcaacaucaaggagaauaaaugcaacggcaccgacgccaaggugaaacuuaucaagcaggaacuggauaaguauaaaaaugcugugacggagcuccagcugcugaugcaguccacccccgccacaaacaaucgggcucgcagagagcucccucgguuuaugaacuacacccugaauaacgccaagaaaacaaaugucacccuuucuaagaaacgcaagagacgguuccugggguuucuccugggagugggcagcgcgauugccuccgggguugcuguguguaagguccuucaccuggaaggagaggugaacaaaaucaagagcgcccuccugucuacgaauaaagcuguugugucccugagcaacggcgucucugugcucacauucaaggugcuggaccuuaaaaauuauauugauaagcaacugcucccgauccugaacaaacaguccugcagcauuucuaacaucgaaaccgucauugaguuucagcagaagaauaaccgccuucuggagaucacaagagaauuuuccguuaaugccggcgugaccacccccgugagcacauacaugcucacgaacuccgagcugcugucucucaucaaugacaugccuauuaccaacgaucaaaagaaacugaugagcaauaacguccagaucgugcggcagcaguccuauagcauuauguguaucauuaaggaagagguucuugcguacgugguccaacugccccucuacggggugaucgacacaccuugcuggaaacugcauaccucuccccuuuguacaaccaauacgaaggaaggauccaacaucugccugacacgcaccgauagaggcugguauugugacaaugccgggagcguuucuuucuucccucaggcugagaccugcaaagugcagagcaaccgggucuuuugugauacaaugaacucccucacccugccgucugaggugaaucugugcaaugucgacauuuucaaccccaaguacgauugcaagaucaugacaagcaaaacggacguguccagcucuguuauuaccucccucggagccaucgugagcuguuauggcaagacaaaaugcaccgcuucuaacaagaaucgcgggauuaucaaaacauuuuccaacggaugugauuacgucagcaauaagggcguggacaccguuuccgugggcaacacgcuguauuacgucaauaagcaagaagggaaaucucuuuaugugaagggagagccuaucauuaacuucuacgacccccugguguucccuagcgaugaauuugacgccuccaucucucagguuaaugagaaaauuaaccagagccucgccuucaucagaaaguccgaugaacugcugcacaaugucaacgcuggcaaaagcaccacaaauauuaugaucaccacaauuaucaucgugauuaucgugauucuucucucucugaucgcggucgggcugcuccuguacugcaaggcccggugaggacuaguacuggcugcaucucccuuuccucuguccuccauccuucucccaggauggugaagggggaccugguacccagugauccccaccccaggauccuaaaucaugacuuaccugcuaauaaaaacucauuggaaaagugagaagaucuaaaaaaaaaaaaaaaaaaaaaaaaaaaaaaaaaaaaaaaaaaaaaaaaaaaaaaaaaaaaaaaaugcaucccccccccccccccccccccccccccccccaaaggcucuuuucagagccaccagaauu

SEQ ID NO: 1602 - RNA, 2115 nt, Artificial Sequence
  mRNA product Design h-5 comprising derived and/or modified sequence from HRSV(A2)__F-del_DSCav1 (opt6)
gggagagggcgcuuggcuugcaaggacccugagcugcggcauugaagcacacccaacccaacucgacugaagucagccucacugaaccggaucugagaaucuucucucucugggcuugccagggcucuccgaaccuagcuagcauccucuucaauuccaacuagaaagcuuaccauggaacuauuaauauuaaaagcaaaugcuauuaccacaauacuuacugcuguaaccuucugcuuugccucuggccaaaacauaacagaagaauuuuaucaaucaacuugcuccgcuguaagcaaaggcuaccuaucagcauuacgcaccggcugguacacaucaguaauaacaauagaacuauccaacauaaaagaaaauaaaugcaacggaacagacgcaaaaguaaaauuaauaaaacaagaacucgacaaauacaaaaacgcaguaacagaauuacaacuacuaaugcaaaguacuccagccaccaacaacagagcaagaagagaauuaccacgauuuaugaacuacacacuaaacaaugcaaaaaaaacaaacguaacacuaucaaaaaaacguaaacgcagauucuuaggcuuccuccuagguguaggcucagcaaucgccucaggaguggcaguuuguaaaguacuacaccuagaaggagaaguaaacaaaaucaaaucugcccuuuuaucgacaaacaaagcaguaguaucguuauccaauggagucucaguauugacauucaaaguauuagaccuaaaaaauuauauagauaaacaacucuuaccuaucuuaaauaaacaaagcugcucaauaaguaacauagaaaccguaauagaauuucaacaaaaaaacaauagacuccuugagaucacucgagaauuuucaguaaacgcagguguaacaacaccaguaagcacauacaugcuaacaaauagugaacuauuaucucuaauuaacgauaugcccauaaccaacgaucaaaaaaaacucaugaguaacaacguacaaauaguaagacaacaauccuauagcauaaugugcauuauaaaagaagaaguacuagcauauguaguccaacuaccacuauacggcguaauagacacaccaugcuggaaacuacacaccucaccccuaugcacaacaaauacaaaagaaggaucaaacauaugcuuaaccaggacagacagaggcugguacugcgauaacgcaggaucuguuucauucuucccccaagcagaaacaugcaaaguacaaucaaacagaguauuuugugauaccaugaacucacucacauuaccauccgaagucaaccucugcaacguagacauauucaaccccaaauacgacugcaaaauaaugaccucaaaaacagauguaucaucaucaguaaucacaucacuaggagcuaucguaucuuguuauggaaaaacaaaaugcacagcauccaacaaaaacagaggaauuaucaaaacauucucaaauggaugugacuauguaucaaacaaaggaguagacaccguaagcguaggcaauacacuauauuacguaaauaaacaagaaggaaaaucacuauacguaaaaggugaaccaauaauaaacuucuaugacccccuaguauucccaucagaugaauuugacgcaagcauaucacaagucaacgaaaaaauaaaccaaucacuggcauucauucgcaaaucagaugaacuucuccacaacguaaacgcugguaaaagcacuacaaacauaaugauaacaacaaucaucauugucauaauaguuauucuauuaucacuaaucgcaguaggauuacuacuauacuguaaagcgagguaaggacuaguacuggcugcaucucccuuuccucuguccuccauccuucucccaggauggugaagggggaccugguacccagugauccccaccccaggauccuaaaucaugacuuaccugcuaauaaaaacucauuggaaaagugagaagaucuaaaaaaaaaaaaaaaaaaaaaaaaaaaaaaaaaaaaaaaaaaaaaaaaaaaaaaaaaaaaaaaaugcaucccccccccccccccccccccccccccccccaaaggcucuuuucagagccaccagaauu

SEQ ID NO: 1603 - RNA, 2115 nt, Artificial Sequence
  mRNA product Design h-5 comprising derived and/or modified sequence from HRSV(A2)__F-del_DSCav1 (opt11)
gggagagggcgcuuggcuugcaaggacccugagcugcggcauugaagcacacccaacccaacucgacugaagucagccucacugaaccggaucugagaaucuucucucucugggcuugccagggcucuccgaaccuagcuagcauccucuucaauuccaacuagaaagcuuaccauggagcugcucauccugaaggccaacgccaucaccacaauccugacggcggugaccuucugcuucgccagcggccagaacaucaccgaggaguucuaccaguccacgugcagcgccgucuccaagggguaccucagcgcccugcgaaccggcugguacaccuccgugaucaccaucgagcugucaaacaucaaggagaacaagugcaacgggaccgaugccaagguuaagcucaucaagcaggagcuggacaaguacaagaacgcggucacggagcugcagcuccugaugcaguccacuccggcaaccaacaaccgcgccaggcgcgagcugccccgguucaugaacuacacccucaacaacgccaagaagacgaaugugacccugagcaagaagcgcaagcggcgcuuccugggcuuccuccuaggggugggcuccgccaucgcgagcggcgucgccgugugcaagguguugcaccucgagggggaggucaacaagaucaagagcgcccugcuguccaccaacaaggccgugguaagccucuccaacggcgucagcguucugaccuucaaggugcuggaccucaagaacuauaucgacaagcagcugcugcccauccugaacaagcagagcugcuccaucucaaacaucgaaacggugauugaguuccagcagaagaacaaccggcuccuggaaaucacccgcgaguucagcgugaacgccggggucaccacccccguguccacguacaugcugaccaacagcgagcuccuaucccugaucaacgacaugccgaucaccaacgaccagaagaagcucaugagcaacaacgugcagaucguccggcagcaguccuacagcaucaugugcaucaucaaggaagaggugcuggcguacgugguccagcugccccucuacggcgugaucgacacccccugcuggaagcugcacacgagcccccugugcacaaccaacaccaaggagggguccaacaucugccucacgcgcaccgaccggggcugguacugcgacaacgccggcagcgucuccuucuucccgcaggccgagaccugcaaggugcagagcaaccgcguguucugcgacaccaugaacucccugacgcugcccucugagguaaaccucugcaacgucgacaucuucaaccccaaguacgacugcaagaucaugaccuccaagacagacgugagcuccagcgugaucacaucccugggggccaucgucagcugcuacggcaagacuaaguguacugccagcaacaagaaccgggggaucaucaagaccuucuccaacggcugcgacuacgugagcaacaagggcguggacaccguguccgucgggaacacccuguacuacguuaauaagcaggagggcaagagccucuacgugaaaggggagcccaucauuaacuucuacgacccacugguuuuccccuccgacgaguucgacgcgagcaucucccaggugaacgagaagaucaaccagagccuggccuucauccgcaaguccgacgagcugcuccacaacgugaacgccggcaagagcacgaccaacaucaugaucaccaccaucaucaucgugaucaucgugauucugcugucccucaucgccguggggcugcugcuuuacugcaaggcccggugaggacuaguacuggcugcaucucccuuuccucuguccuccauccuucucccaggauggugaagggggaccugguacccagugauccccaccccaggauccuaaaucaugacuuaccugcuaauaaaaacucauuggaaaagugagaagaucuaaaaaaaaaaaaaaaaaaaaaaaaaaaaaaaaaaaaaaaaaaaaaaaaaaaaaaaaaaaaaaaaugcaucccccccccccccccccccccccccccccccaaaggcucuuuucagagccaccagaauu

SEQ ID NO: 1604 - RNA, 2048 nt, Artificial Sequence
  mRNA product Design i-1 comprising derived and/or modified sequence from HRSV(A2)__F-del_DSCav1 (opt1)
gggagagggcgcuuggcuugcaaggacccugagcugcggcauugaagcacacccaacccaacucgacugaagucagccucacugaaccggaucugagaaucuucucucucugggcuugccagggcucuccgaaccuagcuagcauccucuucaauuccaacuagaaagcuuaccauggagcugcucauccugaaggccaacgccaucaccaccauccugacggcggugaccuucugcuucgccagcggccagaacaucaccgaggaguucuaccaguccacgugcagcgccgucuccaagggguaccucagcgcccugcggaccggcugguacaccuccgugaucaccaucgagcugagcaacaucaaggagaacaagugcaacgggaccgacgccaaggugaagcucaucaagcaggagcuggacaaguacaagaacgcggucacggagcugcagcuccugaugcaguccaccccggcaaccaacaaccgcgcccggcgcgagcugccccgguucaugaacuacacccucaacaacgccaagaagacgaacgugacccugagcaagaagcgcaagcggcgcuuccugggcuuccuccugggggugggcuccgccaucgcgagcggcgucgccgugugcaaggugcugcaccucgagggggaggucaacaagaucaagagcgcccugcuguccaccaacaaggccguggugagccucuccaacggcgucagcgugcugaccuucaaggugcuggaccucaagaacuacaucgacaagcagcugcugcccauccugaacaagcagagcugcuccaucagcaacaucgagacggugaucgaguuccagcagaagaacaaccggcuccuggagaucacccgcgaguucagcgugaacgccggggucaccacccccguguccacguacaugcugaccaacagcgagcuccugucccugaucaacgacaugccgaucaccaacgaccagaagaagcucaugagcaacaacgugcagaucguccggcagcaguccuacagcaucaugugcaucaucaaggaggaggugcuggcguacgugguccagcugccccucuacggcgugaucgacacccccugcuggaagcugcacacgagcccccugugcaccaccaacaccaaggagggguccaacaucugccucacgcgcaccgaccggggcugguacugcgacaacgccggcagcgucuccuucuucccgcaggccgagaccugcaaggugcagagcaaccgcguguucugcgacaccaugaacucccugacgcugcccagcgagguaaaccucugcaacgucgacaucuucaaccccaaguacgacugcaagaucaugaccuccaagaccgacgugagcuccagcgugaucaccucccugggggccaucgucagcugcuacggcaagacgaagugcaccgccagcaacaagaaccgggggaucaucaagaccuucuccaacggcugcgacuacgugagcaacaagggcguggacaccguguccgucgggaacacccuguacuacgugaacaagcaggagggcaagagccucuacgugaagggggagcccaucaucaacuucuacgacccgcuggucuuccccuccgacgaguucgacgcgagcaucucccaggugaacgagaagaucaaccagagccuggccuucauccgcaaguccgacgagcugcuccacaacgugaacgccggcaagagcacgaccaacaucaugaucaccaccaucaucaucgucaucaucgugauccugcugucccucaucgccguggggcugcugcucuacugcaaggcccggugaggacuaguguccaccugucccuccugggcugcuggauugucucguuuuccugccaaauaaacaggaucagcgcuuuacagaucuaaaaaaaaaaaaaaaaaaaaaaaaaaaaaaaaaaaaaaaaaaaaaaaaaaaaaaaaaaaaaaaaugcaucccccccccccccccccccccccccccccccaaaggcucuuuucagagccaccagaauu

SEQ ID NO: 1605 - RNA, 2048 nt, Artificial Sequence
  mRNA product Design i-1 comprising derived and/or modified sequence from HRSV(A2)__F-del_DSCav1 (opt1)
gggagagggcgcuuggcuugcaaggacccugagcugcggcauugaagcacacccaacccaacucgacugaagucagccucacugaaccggaucugagaaucuucucucucugggcuugccagggcucuccgaaccuagcuagcauccucuucaauuccaacuagaaagcuuaccauggagcugcucauccugaaggccaacgccaucaccaccauccugacggcggugaccuucugcuucgccagcggccagaacaucaccgaggaguucuaccaguccacgugcagcgccgucuccaagggguaccucagcgcccugcgcaccggcugguacaccuccgugaucaccaucgagcugagcaacaucaaggagaacaagugcaacgggaccgacgccaaggugaagcucaucaagcaggagcuggacaaguacaagaacgcggucacggagcugcagcuccugaugcaguccacccccgccaccaacaaccgggcccgccgggagcugccgcgcuucaugaacuacacccucaacaacgccaagaagacgaacgugacccugagcaagaagcggaagcgccgguuccugggcuuccuccugggggugggcuccgcgaucgccagcggcgucgccgugugcaaggugcugcaccucgagggggaggucaacaagaucaaguccgcccugcugagcaccaacaaggccguggugucccucagcaacggcgucuccgugcugaccuucaaggugcuggaccucaagaacuacaucgacaagcagcugcugcccauccucaacaagcagagcugcuccaucagcaacaucgagacggucaucgaguuccagcagaagaacaaccgccugcuggagaucacccgggaguucuccgugaacgcgggggugaccacccccgucagcacguacaugcucaccaacagcgagcugcugucccucaucaacgacaugcccaucaccaacgaccagaagaagcugaugagcaacaacgugcagaucgugcgccagcaguccuacagcaucaugugcaucaucaaggaggagguccuggccuacguggugcagcucccgcuguacggcgucaucgacacccccugcuggaagcugcacacgagcccccucugcaccaccaacaccaaggaggggagcaacaucugccugacgcggaccgaccgcggcugguacugcgacaacgccggcuccgugagcuucuucccccaggccgagaccugcaagguccaguccaaccggguguucugcgacaccaugaacagccugacgcucccguccgaggugaaccugugcaacgucgacaucuucaaccccaaguacgacugcaagaucaugaccagcaagaccgacguguccagcuccgugaucaccagccugggggccaucgucuccugcuacggcaagacgaagugcaccgcgagcaacaagaaccgcgggaucaucaagaccuucuccaacggcugcgacuacgugagcaacaagggcguggacaccgucagcguggggaacacccucuacuacgugaacaagcaggagggcaagucccuguacgucaagggggagcccaucaucaacuucuacgacccccugguguucccgagcgacgaguucgacgccuccaucagccaggugaacgagaagaucaaccagucccucgccuucauccggaaguccgacgagcugcugcacaacgucaacgccggcaaguccacgaccaacaucaugaucaccaccaucaucaucgugaucaucgugauccugcucagccugaucgccgucgggcugcuccuguacugcaaggcgcgcugaggacuaguguccaccugucccuccugggcugcuggauugucucguuuuccugccaaauaaacaggaucagcgcuuuacagaucuaaaaaaaaaaaaaaaaaaaaaaaaaaaaaaaaaaaaaaaaaaaaaaaaaaaaaaaaaaaaaaaaugcaucccccccccccccccccccccccccccccccaaaggcucuuuucagagccaccagaauu

SEQ ID NO: 1606 - RNA, 2048 nt, Artificial Sequence
  mRNA product Design i-1 comprising derived and/or modified sequence from HRSV(A2)__F-del_DSCav1 (opt2)
gggagagggcgcuuggcuugcaaggacccugagcugcggcauugaagcacacccaacccaacucgacugaagucagccucacugaaccggaucugagaaucuucucucucugggcuugccagggcucuccgaaccuagcuagcauccucuucaauuccaacuagaaagcuuaccauggagcuccucauccucaaggccaacgccaucaccaccauccucaccgccgucaccuucugcuucgccuccggccagaacaucaccgaggaguucuaccaguccaccugcuccgccgucuccaagggcuaccucuccgcccuccgcaccggcugguacaccuccgucaucaccaucgagcucuccaacaucaaggagaacaagugcaacggcaccgacgccaaggucaagcucaucaagcaggagcucgacaaguacaagaacgccgucaccgagcuccagcuccucaugcaguccacccccgccaccaacaaccgcgcccgccgcgagcucccccgcuucaugaacuacacccucaacaacgccaagaagaccaacgucacccucuccaagaagcgcaagcgccgcuuccucggcuuccuccucggcgucggcuccgccaucgccuccggcgucgccgucugcaagguccuccaccucgagggcgaggucaacaagaucaaguccgcccuccucuccaccaacaaggccgucgucucccucuccaacggcgucuccguccucaccuucaagguccucgaccucaagaacuacaucgacaagcagcuccuccccauccucaacaagcaguccugcuccaucuccaacaucgagaccgucaucgaguuccagcagaagaacaaccgccuccucgagaucacccgcgaguucuccgucaacgccggcgucaccacccccgucuccaccuacaugcucaccaacuccgagcuccucucccucaucaacgacaugcccaucaccaacgaccagaagaagcucauguccaacaacguccagaucguccgccagcaguccuacuccaucaugugcaucaucaaggaggagguccucgccuacgucguccagcucccccucuacggcgucaucgacacccccugcuggaagcuccacaccuccccccucugcaccaccaacaccaaggagggcuccaacaucugccucacccgcaccgaccgcggcugguacugcgacaacgccggcuccgucuccuucuucccccaggccgagaccugcaagguccaguccaaccgcgucuucugcgacaccaugaacucccucacccuccccuccgaggucaaccucugcaacgucgacaucuucaaccccaaguacgacugcaagaucaugaccuccaagaccgacgucuccuccuccgucaucaccucccucggcgccaucgucuccugcuacggcaagaccaagugcaccgccuccaacaagaaccgcggcaucaucaagaccuucuccaacggcugcgacuacgucuccaacaagggcgucgacaccgucuccgucggcaacacccucuacuacgucaacaagcaggagggcaagucccucuacgucaagggcgagcccaucaucaacuucuacgacccccucgucuuccccuccgacgaguucgacgccuccaucucccaggucaacgagaagaucaaccagucccucgccuucauccgcaaguccgacgagcuccuccacaacgucaacgccggcaaguccaccaccaacaucaugaucaccaccaucaucaucgucaucaucgucauccuccucucccucaucgccgucggccuccuccucuacugcaaggcccgcugaggacuaguguccaccugucccuccugggcugcuggauugucucguuuuccugccaaauaaacaggaucagcgcuuuacagaucuaaaaaaaaaaaaaaaaaaaaaaaaaaaaaaaaaaaaaaaaaaaaaaaaaaaaaaaaaaaaaaaaugcaucccccccccccccccccccccccccccccccaaaggcucuuuucagagccaccagaauu

SEQ ID NO: 1607 - RNA, 2048 nt, Artificial Sequence
  mRNA product Design i-1 comprising derived and/or modified sequence from HRSV(A2)__F-del_DSCav1 (opt3)
gggagagggcgcuuggcuugcaaggacccugagcugcggcauugaagcacacccaacccaacucgacugaagucagccucacugaaccggaucugagaaucuucucucucugggcuugccagggcucuccgaaccuagcuagcauccucuucaauuccaacuagaaagcuuaccauggagcugcucauccuuaaggccaacgcuauuaccacaauacugacugcagugacguucugcuuugccagcggccagaauaucaccgaagaguucuaccaauccacauguucugcggucucaaaaggguauuugagugcuuuaagaacuggaugguacaccagcguuauuacaaucgaacuguccaacauuaaggagaauaaaugcaacgguaccgacgccaaggugaaacuaaucaagcaggaacucgauaaguauaaaaaugcaguaacugagcugcagcuucugaugcagucuacacccgccaccaacaauagggcucggcgcgaguugccucgauuuaugaacuacacgcucaauaacgcaaagaaaacuaaugugacccugucgaagaaacguaagagaagguuccugggcuuucucuuaggggucggaucagccauagcuagcggcguggccguuuguaaggugcugcaccuugaaggugaggucaacaaaaucaagagugcguugcuguccacaaauaaagcagugguaucucuaagcaacgggguuuccgugcucacuuucaagguccuggaccuuaaaaauuauauugauaagcaacuguugccaauccucaacaaacagucaugcaguauuagcaacaucgaaaccgugauagaguuucagcagaagaauaaccggcuguuagagauuacacgcgaguucucugugaaugccggagucaccacgccgguuuccacuuacaugcugacaaacucagaacuccuuagccugaucaaugacaugcccauuaccaacgaucaaaagaaauugaugaguaauaacgugcagaucguaagacagcagucuuauuccaucauguguauuauaaaggaagaggugcuagcuuacgucgugcaacugccucucuacggcguuaucgacacuccaugcuggaaacugcauacaagcccccuuuguaccacgaauaccaaggaaggcucgaacauuugccugacaaggacugaucgggggugguauugugacaaugccggaucuguguccuuuuucccucaggcagagaccugcaaaguccagucaaaccgcguguuuugugauacaaugaauaguuugacucucccaagcgagguaaaccugugcaauguugacaucuucaaccccaaguacgauugcaagauaaugaccuccaaaacagacgugucuagcucagucauuaccaguuuaggugcuaucguguccuguuauggcaagacuaaaugcacggccagcaacaagaaucgagggaucauuaaaacauuuucuaacggaugugauuacgucucaaauaagggcguggacaccguuaguguggguaacacucuguauuacguaaauaagcaagaagggaaaagccuauaugucaagggagagccuaucauuaacuucuacgacccacucguguucccguccgaugaauuugacgcgucuauaucgcagguuaaugagaaaaucaaccagagccuggccuucauuagaaaguccgaugaacuuuugcacaaugugaacgcaggcaaaucaaccacaaauaucaugaucaccacuauuauaaucgucauuaucgugauucugcucagucugaucgcuguaggccuucuguuguacugcaaggccaggugaggacuaguguccaccugucccuccugggcugcuggauugucucguuuuccugccaaauaaacaggaucagcgcuuuacagaucuaaaaaaaaaaaaaaaaaaaaaaaaaaaaaaaaaaaaaaaaaaaaaaaaaaaaaaaaaaaaaaaaugcaucccccccccccccccccccccccccccccccaaaggcucuuuucagagccaccagaauu

SEQ ID NO: 1608 - RNA, 2048 nt, Artificial Sequence
  mRNA product Design i-1 comprising derived and/or modified sequence from HRSV(A2)__F-del_DSCav1 (opt4)
gggagagggcgcuuggcuugcaaggacccugagcugcggcauugaagcacacccaacccaacucgacugaagucagccucacugaaccggaucugagaaucuucucucucugggcuugccagggcucuccgaaccuagcuagcauccucuucaauuccaacuagaaagcuuaccauggagcugcugauccugaaggccaacgccaucaccaccauccugaccgccgugaccuucugcuucgccagcggccagaacaucaccgaggaguucuaccagagcaccugcagcgccgugagcaagggcuaccugagcgcccugagaaccggcugguacaccagcgugaucaccaucgagcugagcaacaucaaggagaacaagugcaacggcaccgacgccaaggugaagcugaucaagcaggagcuggacaaguacaagaacgccgugaccgagcugcagcugcugaugcagagcacccccgccaccaacaacagagccagaagagagcugcccagauucaugaacuacacccugaacaacgccaagaagaccaacgugacccugagcaagaagagaaagagaagauuccugggcuuccugcugggcgugggcagcgccaucgccagcggcguggccgugugcaaggugcugcaccuggagggcgaggugaacaagaucaagagcgcccugcugagcaccaacaaggccguggugagccugagcaacggcgugagcgugcugaccuucaaggugcuggaccugaagaacuacaucgacaagcagcugcugcccauccugaacaagcagagcugcagcaucagcaacaucgagaccgugaucgaguuccagcagaagaacaacagacugcuggagaucaccagagaguucagcgugaacgccggcgugaccacccccgugagcaccuacaugcugaccaacagcgagcugcugagccugaucaacgacaugcccaucaccaacgaccagaagaagcugaugagcaacaacgugcagaucgugagacagcagagcuacagcaucaugugcaucaucaaggaggaggugcuggccuacguggugcagcugccccuguacggcgugaucgacacccccugcuggaagcugcacaccagcccccugugcaccaccaacaccaaggagggcagcaacaucugccugaccagaaccgacagaggcugguacugcgacaacgccggcagcgugagcuucuucccccaggccgagaccugcaaggugcagagcaacagaguguucugcgacaccaugaacagccugacccugcccagcgaggugaaccugugcaacguggacaucuucaaccccaaguacgacugcaagaucaugaccagcaagaccgacgugagcagcagcgugaucaccagccugggcgccaucgugagcugcuacggcaagaccaagugcaccgccagcaacaagaacagaggcaucaucaagaccuucagcaacggcugcgacuacgugagcaacaagggcguggacaccgugagcgugggcaacacccuguacuacgugaacaagcaggagggcaagagccuguacgugaagggcgagcccaucaucaacuucuacgacccccugguguuccccagcgacgaguucgacgccagcaucagccaggugaacgagaagaucaaccagagccuggccuucaucagaaagagcgacgagcugcugcacaacgugaacgccggcaagagcaccaccaacaucaugaucaccaccaucaucaucgugaucaucgugauccugcugagccugaucgccgugggccugcugcuguacugcaaggccagaugaggacuaguguccaccugucccuccugggcugcuggauugucucguuuuccugccaaauaaacaggaucagcgcuuuacagaucuaaaaaaaaaaaaaaaaaaaaaaaaaaaaaaaaaaaaaaaaaaaaaaaaaaaaaaaaaaaaaaaaugcaucccccccccccccccccccccccccccccccaaaggcucuuuucagagccaccagaauu

SEQ ID NO: 1609 - RNA, 2048 nt, Artificial Sequence
  mRNA product Design i-1 comprising derived and/or modified sequence from HRSV(A2)__F-del_DSCav1 (opt5)
gggagagggcgcuuggcuugcaaggacccugagcugcggcauugaagcacacccaacccaacucgacugaagucagccucacugaaccggaucugagaaucuucucucucugggcuugccagggcucuccgaaccuagcuagcauccucuucaauuccaacuagaaagcuuaccauggagcugcucauccugaaggccaacgcuauuaccacaauccuuacggccgugaccuucugcuuugcgagcggccagaauauuacagaagaguucuaccaauccaccuguucugcugucagcaaaggguaucuguccgcccucagaacaggaugguacaccucuguuaucacaauugaacugagcaacaucaaggagaauaaaugcaacggcaccgacgccaaggugaaacuuaucaagcaggaacuggauaaguauaaaaaugcugugacggagcuccagcugcugaugcaguccacccccgccacaaacaaucgggcucgcagagagcucccucgguuuaugaacuacacccugaauaacgccaagaaaacaaaugucacccuuucuaagaaacgcaagagacgguuccugggguuucuccugggagugggcagcgcgauugccuccgggguugcuguguguaagguccuucaccuggaaggagaggugaacaaaaucaagagcgcccuccugucuacgaauaaagcuguugugucccugagcaacggcgucucugugcucacauucaaggugcuggaccuuaaaaauuauauugauaagcaacugcucccgauccugaacaaacaguccugcagcauuucuaacaucgaaaccgucauugaguuucagcagaagaauaaccgccuucuggagaucacaagagaauuuuccguuaaugccggcgugaccacccccgugagcacauacaugcucacgaacuccgagcugcugucucucaucaaugacaugccuauuaccaacgaucaaaagaaacugaugagcaauaacguccagaucgugcggcagcaguccuauagcauuauguguaucauuaaggaagagguucuugcguacgugguccaacugccccucuacggggugaucgacacaccuugcuggaaacugcauaccucuccccuuuguacaaccaauacgaaggaaggauccaacaucugccugacacgcaccgauagaggcugguauugugacaaugccgggagcguuucuuucuucccucaggcugagaccugcaaagugcagagcaaccgggucuuuugugauacaaugaacucccucacccugccgucugaggugaaucugugcaaugucgacauuuucaaccccaaguacgauugcaagaucaugacaagcaaaacggacguguccagcucuguuauuaccucccucggagccaucgugagcuguuauggcaagacaaaaugcaccgcuucuaacaagaaucgcgggauuaucaaaacauuuuccaacggaugugauuacgucagcaauaagggcguggacaccguuuccgugggcaacacgcuguauuacgucaauaagcaagaagggaaaucucuuuaugugaagggagagccuaucauuaacuucuacgacccccugguguucccuagcgaugaauuugacgccuccaucucucagguuaaugagaaaauuaaccagagccucgccuucaucagaaaguccgaugaacugcugcacaaugucaacgcuggcaaaagcaccacaaauauuaugaucaccacaauuaucaucgugauuaucgugauucuucucucucugaucgcggucgggcugcuccuguacugcaaggcccggugaggacuaguguccaccugucccuccugggcugcuggauugucucguuuuccugccaaauaaacaggaucagcgcuuuacagaucuaaaaaaaaaaaaaaaaaaaaaaaaaaaaaaaaaaaaaaaaaaaaaaaaaaaaaaaaaaaaaaaaugcaucccccccccccccccccccccccccccccccaaaggcucuuuucagagccaccagaauu

SEQ ID NO: 1610 - RNA, 2048 nt, Artificial Sequence
  mRNA product Design i-1 comprising derived and/or modified sequence from HRSV(A2)__F-del_DSCav1 (opt6)
gggagagggcgcuuggcuugcaaggacccugagcugcggcauugaagcacacccaacccaacucgacugaagucagccucacugaaccggaucugagaaucuucucucucugggcuugccagggcucuccgaaccuagcuagcauccucuucaauuccaacuagaaagcuuaccauggaacuauuaauauuaaaagcaaaugcuauuaccacaauacuuacugcuguaaccuucugcuuugccucuggccaaaacauaacagaagaauuuuaucaaucaacuugcuccgcuguaagcaaaggcuaccuaucagcauuacgcaccggcugguacacaucaguaauaacaauagaacuauccaacauaaaagaaaauaaaugcaacggaacagacgcaaaaguaaaauuaauaaaacaagaacucgacaaauacaaaaacgcaguaacagaauuacaacuacuaaugcaaaguacuccagccaccaacaacagagcaagaagagaauuaccacgauuuaugaacuacacacuaaacaaugcaaaaaaaacaaacguaacacuaucaaaaaaacguaaacgcagauucuuaggcuuccuccuagguguaggcucagcaaucgccucaggaguggcaguuuguaaaguacuacaccuagaaggagaaguaaacaaaaucaaaucugcccuuuuaucgacaaacaaagcaguaguaucguuauccaauggagucucaguauugacauucaaaguauuagaccuaaaaaauuauauagauaaacaacucuuaccuaucuuaaauaaacaaagcugcucaauaaguaacauagaaaccguaauagaauuucaacaaaaaaacaauagacuccuugagaucacucgagaauuuucaguaaacgcagguguaacaacaccaguaagcacauacaugcuaacaaauagugaacuauuaucucuaauuaacgauaugcccauaaccaacgaucaaaaaaaacucaugaguaacaacguacaaauaguaagacaacaauccuauagcauaaugugcauuauaaaagaagaaguacuagcauauguaguccaacuaccacuauacggcguaauagacacaccaugcuggaaacuacacaccucaccccuaugcacaacaaauacaaaagaaggaucaaacauaugcuuaaccaggacagacagaggcugguacugcgauaacgcaggaucuguuucauucuucccccaagcagaaacaugcaaaguacaaucaaacagaguauuuugugauaccaugaacucacucacauuaccauccgaagucaaccucugcaacguagacauauucaaccccaaauacgacugcaaaauaaugaccucaaaaacagauguaucaucaucaguaaucacaucacuaggagcuaucguaucuuguuauggaaaaacaaaaugcacagcauccaacaaaaacagaggaauuaucaaaacauucucaaauggaugugacuauguaucaaacaaaggaguagacaccguaagcguaggcaauacacuauauuacguaaauaaacaagaaggaaaaucacuauacguaaaaggugaaccaauaauaaacuucuaugacccccuaguauucccaucagaugaauuugacgcaagcauaucacaagucaacgaaaaaauaaaccaaucacuggcauucauucgcaaaucagaugaacuucuccacaacguaaacgcugguaaaagcacuacaaacauaaugauaacaacaaucaucauugucauaauaguuauucuauuaucacuaaucgcaguaggauuacuacuauacuguaaagcgagguaaggacuaguguccaccugucccuccugggcugcuggauugucucguuuuccugccaaauaaacaggaucagcgcuuuacagaucuaaaaaaaaaaaaaaaaaaaaaaaaaaaaaaaaaaaaaaaaaaaaaaaaaaaaaaaaaaaaaaaaugcaucccccccccccccccccccccccccccccccaaaggcucuuuucagagccaccagaauu

SEQ ID NO: 1611 - RNA, 2048 nt, Artificial Sequence
  mRNA product Design i-1 comprising derived and/or modified sequence from HRSV(A2)__F-del_DSCav1 (opt11)
gggagagggcgcuuggcuugcaaggacccugagcugcggcauugaagcacacccaacccaacucgacugaagucagccucacugaaccggaucugagaaucuucucucucugggcuugccagggcucuccgaaccuagcuagcauccucuucaauuccaacuagaaagcuuaccauggagcugcucauccugaaggccaacgccaucaccacaauccugacggcggugaccuucugcuucgccagcggccagaacaucaccgaggaguucuaccaguccacgugcagcgccgucuccaagggguaccucagcgcccugcgaaccggcugguacaccuccgugaucaccaucgagcugucaaacaucaaggagaacaagugcaacgggaccgaugccaagguuaagcucaucaagcaggagcuggacaaguacaagaacgcggucacggagcugcagcuccugaugcaguccacuccggcaaccaacaaccgcgccaggcgcgagcugccccgguucaugaacuacacccucaacaacgccaagaagacgaaugugacccugagcaagaagcgcaagcggcgcuuccugggcuuccuccuaggggugggcuccgccaucgcgagcggcgucgccgugugcaagguguugcaccucgagggggaggucaacaagaucaagagcgcccugcuguccaccaacaaggccgugguaagccucuccaacggcgucagcguucugaccuucaaggugcuggaccucaagaacuauaucgacaagcagcugcugcccauccugaacaagcagagcugcuccaucucaaacaucgaaacggugauugaguuccagcagaagaacaaccggcuccuggaaaucacccgcgaguucagcgugaacgccggggucaccacccccguguccacguacaugcugaccaacagcgagcuccuaucccugaucaacgacaugccgaucaccaacgaccagaagaagcucaugagcaacaacgugcagaucguccggcagcaguccuacagcaucaugugcaucaucaaggaagaggugcuggcguacgugguccagcugccccucuacggcgugaucgacacccccugcuggaagcugcacacgagcccccugugcacaaccaacaccaaggagggguccaacaucugccucacgcgcaccgaccggggcugguacugcgacaacgccggcagcgucuccuucuucccgcaggccgagaccugcaaggugcagagcaaccgcguguucugcgacaccaugaacucccugacgcugcccucugagguaaaccucugcaacgucgacaucuucaaccccaaguacgacugcaagaucaugaccuccaagacagacgugagcuccagcgugaucacaucccugggggccaucgucagcugcuacggcaagacuaaguguacugccagcaacaagaaccgggggaucaucaagaccuucuccaacggcugcgacuacgugagcaacaagggcguggacaccguguccgucgggaacacccuguacuacguuaauaagcaggagggcaagagccucuacgugaaaggggagcccaucauuaacuucuacgacccacugguuuuccccuccgacgaguucgacgcgagcaucucccaggugaacgagaagaucaaccagagccuggccuucauccgcaaguccgacgagcugcuccacaacgugaacgccggcaagagcacgaccaacaucaugaucaccaccaucaucaucgugaucaucgugauucugcugucccucaucgccguggggcugcugcuuuacugcaaggcccggugaggacuaguguccaccugucccuccugggcugcuggauugucucguuuuccugccaaauaaacaggaucagcgcuuuacagaucuaaaaaaaaaaaaaaaaaaaaaaaaaaaaaaaaaaaaaaaaaaaaaaaaaaaaaaaaaaaaaaaaugcaucccccccccccccccccccccccccccccccaaaggcucuuuucagagccaccagaauu

SEQ ID NO: 1612 - RNA, 2048 nt, Artificial Sequence
  mRNA product Design i-2 comprising derived and/or modified sequence from HRSV(A2)__F-del_DSCav1 (opt1)
gggagaggcgcugccuacggagguggcagccaucuccuucucggcaucaagcuuaccauggagcugcucauccugaaggccaacgccaucaccaccauccugacggcggugaccuucugcuucgccagcggccagaacaucaccgaggaguucuaccaguccacgugcagcgccgucuccaagggguaccucagcgcccugcggaccggcugguacaccuccgugaucaccaucgagcugagcaacaucaaggagaacaagugcaacgggaccgacgccaaggugaagcucaucaagcaggagcuggacaaguacaagaacgcggucacggagcugcagcuccugaugcaguccaccccggcaaccaacaaccgcgcccggcgcgagcugccccgguucaugaacuacacccucaacaacgccaagaagacgaacgugacccugagcaagaagcgcaagcggcgcuuccugggcuuccuccugggggugggcuccgccaucgcgagcggcgucgccgugugcaaggugcugcaccucgagggggaggucaacaagaucaagagcgcccugcuguccaccaacaaggccguggugagccucuccaacggcgucagcgugcugaccuucaaggugcuggaccucaagaacuacaucgacaagcagcugcugcccauccugaacaagcagagcugcuccaucagcaacaucgagacggugaucgaguuccagcagaagaacaaccggcuccuggagaucacccgcgaguucagcgugaacgccggggucaccacccccguguccacguacaugcugaccaacagcgagcuccugucccugaucaacgacaugccgaucaccaacgaccagaagaagcucaugagcaacaacgugcagaucguccggcagcaguccuacagcaucaugugcaucaucaaggaggaggugcuggcguacgugguccagcugccccucuacggcgugaucgacacccccugcuggaagcugcacacgagcccccugugcaccaccaacaccaaggagggguccaacaucugccucacgcgcaccgaccggggcugguacugcgacaacgccggcagcgucuccuucuucccgcaggccgagaccugcaaggugcagagcaaccgcguguucugcgacaccaugaacucccugacgcugcccagcgagguaaaccucugcaacgucgacaucuucaaccccaaguacgacugcaagaucaugaccuccaagaccgacgugagcuccagcgugaucaccucccugggggccaucgucagcugcuacggcaagacgaagugcaccgccagcaacaagaaccgggggaucaucaagaccuucuccaacggcugcgacuacgugagcaacaagggcguggacaccguguccgucgggaacacccuguacuacgugaacaagcaggagggcaagagccucuacgugaagggggagcccaucaucaacuucuacgacccgcuggucuuccccuccgacgaguucgacgcgagcaucucccaggugaacgagaagaucaaccagagccuggccuucauccgcaaguccgacgagcugcuccacaacgugaacgccggcaagagcacgaccaacaucaugaucaccaccaucaucaucgucaucaucgugauccugcugucccucaucgccguggggcugcugcucuacugcaaggcccggugaggacuagugcaucacauuuaaaagcaucucagccuaccaugagaauaagagaaagaaaaugaagaucaauagcuuauucaucucuuuuucuuuuucguugguguaaagccaacacccugucuaaaaaacauaaauuucuuuaaucauuuugccucuuuucucugugcuucaauuaauaaaaaauggaaagaaccuagaucuaaaaaaaaaaaaaaaaaaaaaaaaaaaaaaaaaaaaaaaaaaaaaaaaaaaaaaaaaaaaaaaaugcaucccccccccccccccccccccccccccccccaaaggcucuuuucagagccaccagaauu

SEQ ID NO: 1613 - RNA, 2048 nt, Artificial Sequence
  mRNA product Design i-2 comprising derived and/or modified sequence from HRSV(A2)__F-del_DSCav1 (opt1)
gggagaggcgcugccuacggagguggcagccaucuccuucucggcaucaagcuuaccauggagcugcucauccugaaggccaacgccaucaccaccauccugacggcggugaccuucugcuucgccagcggccagaacaucaccgaggaguucuaccaguccacgugcagcgccgucuccaagggguaccucagcgcccugcgcaccggcugguacaccuccgugaucaccaucgagcugagcaacaucaaggagaacaagugcaacgggaccgacgccaaggugaagcucaucaagcaggagcuggacaaguacaagaacgcggucacggagcugcagcuccugaugcaguccacccccgccaccaacaaccgggcccgccgggagcugccgcgcuucaugaacuacacccucaacaacgccaagaagacgaacgugacccugagcaagaagcggaagcgccgguuccugggcuuccuccugggggugggcuccgcgaucgccagcggcgucgccgugugcaaggugcugcaccucgagggggaggucaacaagaucaaguccgcccugcugagcaccaacaaggccguggugucccucagcaacggcgucuccgugcugaccuucaaggugcuggaccucaagaacuacaucgacaagcagcugcugcccauccucaacaagcagagcugcuccaucagcaacaucgagacggucaucgaguuccagcagaagaacaaccgccugcuggagaucacccgggaguucuccgugaacgcgggggugaccacccccgucagcacguacaugcucaccaacagcgagcugcugucccucaucaacgacaugcccaucaccaacgaccagaagaagcugaugagcaacaacgugcagaucgugcgccagcaguccuacagcaucaugugcaucaucaaggaggagguccuggccuacguggugcagcucccgcuguacggcgucaucgacacccccugcuggaagcugcacacgagcccccucugcaccaccaacaccaaggaggggagcaacaucugccugacgcggaccgaccgcggcugguacugcgacaacgccggcuccgugagcuucuucccccaggccgagaccugcaagguccaguccaaccggguguucugcgacaccaugaacagccugacgcucccguccgaggugaaccugugcaacgucgacaucuucaaccccaaguacgacugcaagaucaugaccagcaagaccgacguguccagcuccgugaucaccagccugggggccaucgucuccugcuacggcaagacgaagugcaccgcgagcaacaagaaccgcgggaucaucaagaccuucuccaacggcugcgacuacgugagcaacaagggcguggacaccgucagcguggggaacacccucuacuacgugaacaagcaggagggcaagucccuguacgucaagggggagcccaucaucaacuucuacgacccccugguguucccgagcgacgaguucgacgccuccaucagccaggugaacgagaagaucaaccagucccucgccuucauccggaaguccgacgagcugcugcacaacgucaacgccggcaaguccacgaccaacaucaugaucaccaccaucaucaucgugaucaucgugauccugcucagccugaucgccgucgggcugcuccuguacugcaaggcgcgcugaggacuagugcaucacauuuaaaagcaucucagccuaccaugagaauaagagaaagaaaaugaagaucaauagcuuauucaucucuuuuucuuuuucguugguguaaagccaacacccugucuaaaaaacauaaauuucuuuaaucauuuugccucuuuucucugugcuucaauuaauaaaaaauggaaagaaccuagaucuaaaaaaaaaaaaaaaaaaaaaaaaaaaaaaaaaaaaaaaaaaaaaaaaaaaaaaaaaaaaaaaaugcaucccccccccccccccccccccccccccccccaaaggcucuuuucagagccaccagaauu

SEQ ID NO: 1614 - RNA, 2048 nt, Artificial Sequence
  mRNA product Design i-2 comprising derived and/or modified sequence from HRSV(A2)__F-del_DSCav1 (opt2)
gggagaggcgcugccuacggagguggcagccaucuccuucucggcaucaagcuuaccauggagcuccucauccucaaggccaacgccaucaccaccauccucaccgccgucaccuucugcuucgccuccggccagaacaucaccgaggaguucuaccaguccaccugcuccgccgucuccaagggcuaccucuccgcccuccgcaccggcugguacaccuccgucaucaccaucgagcucuccaacaucaaggagaacaagugcaacggcaccgacgccaaggucaagcucaucaagcaggagcucgacaaguacaagaacgccgucaccgagcuccagcuccucaugcaguccacccccgccaccaacaaccgcgcccgccgcgagcucccccgcuucaugaacuacacccucaacaacgccaagaagaccaacgucacccucuccaagaagcgcaagcgccgcuuccucggcuuccuccucggcgucggcuccgccaucgccuccggcgucgccgucugcaagguccuccaccucgagggcgaggucaacaagaucaaguccgcccuccucuccaccaacaaggccgucgucucccucuccaacggcgucuccguccucaccuucaagguccucgaccucaagaacuacaucgacaagcagcuccuccccauccucaacaagcaguccugcuccaucuccaacaucgagaccgucaucgaguuccagcagaagaacaaccgccuccucgagaucacccgcgaguucuccgucaacgccggcgucaccacccccgucuccaccuacaugcucaccaacuccgagcuccucucccucaucaacgacaugcccaucaccaacgaccagaagaagcucauguccaacaacguccagaucguccgccagcaguccuacuccaucaugugcaucaucaaggaggagguccucgccuacgucguccagcucccccucuacggcgucaucgacacccccugcuggaagcuccacaccuccccccucugcaccaccaacaccaaggagggcuccaacaucugccucacccgcaccgaccgcggcugguacugcgacaacgccggcuccgucuccuucuucccccaggccgagaccugcaagguccaguccaaccgcgucuucugcgacaccaugaacucccucacccuccccuccgaggucaaccucugcaacgucgacaucuucaaccccaaguacgacugcaagaucaugaccuccaagaccgacgucuccuccuccgucaucaccucccucggcgccaucgucuccugcuacggcaagaccaagugcaccgccuccaacaagaaccgcggcaucaucaagaccuucuccaacggcugcgacuacgucuccaacaagggcgucgacaccgucuccgucggcaacacccucuacuacgucaacaagcaggagggcaagucccucuacgucaagggcgagcccaucaucaacuucuacgacccccucgucuuccccuccgacgaguucgacgccuccaucucccaggucaacgagaagaucaaccagucccucgccuucauccgcaaguccgacgagcuccuccacaacgucaacgccggcaaguccaccaccaacaucaugaucaccaccaucaucaucgucaucaucgucauccuccucucccucaucgccgucggccuccuccucuacugcaaggcccgcugaggacuagugcaucacauuuaaaagcaucucagccuaccaugagaauaagagaaagaaaaugaagaucaauagcuuauucaucucuuuuucuuuuucguugguguaaagccaacacccugucuaaaaaacauaaauuucuuuaaucauuuugccucuuuucucugugcuucaauuaauaaaaaauggaaagaaccuagaucuaaaaaaaaaaaaaaaaaaaaaaaaaaaaaaaaaaaaaaaaaaaaaaaaaaaaaaaaaaaaaaaaugcaucccccccccccccccccccccccccccccccaaaggcucuuuucagagccaccagaauu

SEQ ID NO: 1615 - RNA, 2048 nt, Artificial Sequence
  mRNA product Design i-2 comprising derived and/or modified sequence from HRSV(A2)__F-del_DSCav1 (opt3)
gggagaggcgcugccuacggagguggcagccaucuccuucucggcaucaagcuuaccauggagcugcucauccuuaaggccaacgcuauuaccacaauacugacugcagugacguucugcuuugccagcggccagaauaucaccgaagaguucuaccaauccacauguucugcggucucaaaaggguauuugagugcuuuaagaacuggaugguacaccagcguuauuacaaucgaacuguccaacauuaaggagaauaaaugcaacgguaccgacgccaaggugaaacuaaucaagcaggaacucgauaaguauaaaaaugcaguaacugagcugcagcuucugaugcagucuacacccgccaccaacaauagggcucggcgcgaguugccucgauuuaugaacuacacgcucaauaacgcaaagaaaacuaaugugacccugucgaagaaacguaagagaagguuccugggcuuucucuuaggggucggaucagccauagcuagcggcguggccguuuguaaggugcugcaccuugaaggugaggucaacaaaaucaagagugcguugcuguccacaaauaaagcagugguaucucuaagcaacgggguuuccgugcucacuuucaagguccuggaccuuaaaaauuauauugauaagcaacuguugccaauccucaacaaacagucaugcaguauuagcaacaucgaaaccgugauagaguuucagcagaagaauaaccggcuguuagagauuacacgcgaguucucugugaaugccggagucaccacgccgguuuccacuuacaugcugacaaacucagaacuccuuagccugaucaaugacaugcccauuaccaacgaucaaaagaaauugaugaguaauaacgugcagaucguaagacagcagucuuauuccaucauguguauuauaaaggaagaggugcuagcuuacgucgugcaacugccucucuacggcguuaucgacacuccaugcuggaaacugcauacaagcccccuuuguaccacgaauaccaaggaaggcucgaacauuugccugacaaggacugaucgggggugguauugugacaaugccggaucuguguccuuuuucccucaggcagagaccugcaaaguccagucaaaccgcguguuuugugauacaaugaauaguuugacucucccaagcgagguaaaccugugcaauguugacaucuucaaccccaaguacgauugcaagauaaugaccuccaaaacagacgugucuagcucagucauuaccaguuuaggugcuaucguguccuguuauggcaagacuaaaugcacggccagcaacaagaaucgagggaucauuaaaacauuuucuaacggaugugauuacgucucaaauaagggcguggacaccguuaguguggguaacacucuguauuacguaaauaagcaagaagggaaaagccuauaugucaagggagagccuaucauuaacuucuacgacccacucguguucccguccgaugaauuugacgcgucuauaucgcagguuaaugagaaaaucaaccagagccuggccuucauuagaaaguccgaugaacuuuugcacaaugugaacgcaggcaaaucaaccacaaauaucaugaucaccacuauuauaaucgucauuaucgugauucugcucagucugaucgcuguaggccuucuguuguacugcaaggccaggugaggacuagugcaucacauuuaaaagcaucucagccuaccaugagaauaagagaaagaaaaugaagaucaauagcuuauucaucucuuuuucuuuuucguugguguaaagccaacacccugucuaaaaaacauaaauuucuuuaaucauuuugccucuuuucucugugcuucaauuaauaaaaaauggaaagaaccuagaucuaaaaaaaaaaaaaaaaaaaaaaaaaaaaaaaaaaaaaaaaaaaaaaaaaaaaaaaaaaaaaaaaugcaucccccccccccccccccccccccccccccccaaaggcucuuuucagagccaccagaauu

SEQ ID NO: 1616 - RNA, 2048 nt, Artificial Sequence
  mRNA product Design i-2 comprising derived and/or modified sequence from HRSV(A2)__F-del_DSCav1 (opt4)
gggagaggcgcugccuacggagguggcagccaucuccuucucggcaucaagcuuaccauggagcugcugauccugaaggccaacgccaucaccaccauccugaccgccgugaccuucugcuucgccagcggccagaacaucaccgaggaguucuaccagagcaccugcagcgccgugagcaagggcuaccugagcgcccugagaaccggcugguacaccagcgugaucaccaucgagcugagcaacaucaaggagaacaagugcaacggcaccgacgccaaggugaagcugaucaagcaggagcuggacaaguacaagaacgccgugaccgagcugcagcugcugaugcagagcacccccgccaccaacaacagagccagaagagagcugcccagauucaugaacuacacccugaacaacgccaagaagaccaacgugacccugagcaagaagagaaagagaagauuccugggcuuccugcugggcgugggcagcgccaucgccagcggcguggccgugugcaaggugcugcaccuggagggcgaggugaacaagaucaagagcgcccugcugagcaccaacaaggccguggugagccugagcaacggcgugagcgugcugaccuucaaggugcuggaccugaagaacuacaucgacaagcagcugcugcccauccugaacaagcagagcugcagcaucagcaacaucgagaccgugaucgaguuccagcagaagaacaacagacugcuggagaucaccagagaguucagcgugaacgccggcgugaccacccccgugagcaccuacaugcugaccaacagcgagcugcugagccugaucaacgacaugcccaucaccaacgaccagaagaagcugaugagcaacaacgugcagaucgugagacagcagagcuacagcaucaugugcaucaucaaggaggaggugcuggccuacguggugcagcugccccuguacggcgugaucgacacccccugcuggaagcugcacaccagcccccugugcaccaccaacaccaaggagggcagcaacaucugccugaccagaaccgacagaggcugguacugcgacaacgccggcagcgugagcuucuucccccaggccgagaccugcaaggugcagagcaacagaguguucugcgacaccaugaacagccugacccugcccagcgaggugaaccugugcaacguggacaucuucaaccccaaguacgacugcaagaucaugaccagcaagaccgacgugagcagcagcgugaucaccagccugggcgccaucgugagcugcuacggcaagaccaagugcaccgccagcaacaagaacagaggcaucaucaagaccuucagcaacggcugcgacuacgugagcaacaagggcguggacaccgugagcgugggcaacacccuguacuacgugaacaagcaggagggcaagagccuguacgugaagggcgagcccaucaucaacuucuacgacccccugguguuccccagcgacgaguucgacgccagcaucagccaggugaacgagaagaucaaccagagccuggccuucaucagaaagagcgacgagcugcugcacaacgugaacgccggcaagagcaccaccaacaucaugaucaccaccaucaucaucgugaucaucgugauccugcugagccugaucgccgugggccugcugcuguacugcaaggccagaugaggacuagugcaucacauuuaaaagcaucucagccuaccaugagaauaagagaaagaaaaugaagaucaauagcuuauucaucucuuuuucuuuuucguugguguaaagccaacacccugucuaaaaaacauaaauuucuuuaaucauuuugccucuuuucucugugcuucaauuaauaaaaaauggaaagaaccuagaucuaaaaaaaaaaaaaaaaaaaaaaaaaaaaaaaaaaaaaaaaaaaaaaaaaaaaaaaaaaaaaaaaugcaucccccccccccccccccccccccccccccccaaaggcucuuuucagagccaccagaauu

SEQ ID NO: 1617 - RNA, 2048 nt, Artificial Sequence
  mRNA product Design i-2 comprising derived and/or modified sequence from HRSV(A2)__F-del_DSCav1 (opt5)
gggagaggcgcugccuacggagguggcagccaucuccuucucggcaucaagcuuaccauggagcugcucauccugaaggccaacgcuauuaccacaauccuuacggccgugaccuucugcuuugcgagcggccagaauauuacagaagaguucuaccaauccaccuguucugcugucagcaaaggguaucuguccgcccucagaacaggaugguacaccucuguuaucacaauugaacugagcaacaucaaggagaauaaaugcaacggcaccgacgccaaggugaaacuuaucaagcaggaacuggauaaguauaaaaaugcugugacggagcuccagcugcugaugcaguccacccccgccacaaacaaucgggcucgcagagagcucccucgguuuaugaacuacacccugaauaacgccaagaaaacaaaugucacccuuucuaagaaacgcaagagacgguuccugggguuucuccugggagugggcagcgcgauugccuccgggguugcuguguguaagguccuucaccuggaaggagaggugaacaaaaucaagagcgcccuccugucuacgaauaaagcuguugugucccugagcaacggcgucucugugcucacauucaaggugcuggaccuuaaaaauuauauugauaagcaacugcucccgauccugaacaaacaguccugcagcauuucuaacaucgaaaccgucauugaguuucagcagaagaauaaccgccuucuggagaucacaagagaauuuuccguuaaugccggcgugaccacccccgugagcacauacaugcucacgaacuccgagcugcugucucucaucaaugacaugccuauuaccaacgaucaaaagaaacugaugagcaauaacguccagaucgugcggcagcaguccuauagcauuauguguaucauuaaggaagagguucuugcguacgugguccaacugccccucuacggggugaucgacacaccuugcuggaaacugcauaccucuccccuuuguacaaccaauacgaaggaaggauccaacaucugccugacacgcaccgauagaggcugguauugugacaaugccgggagcguuucuuucuucccucaggcugagaccugcaaagugcagagcaaccgggucuuuugugauacaaugaacucccucacccugccgucugaggugaaucugugcaaugucgacauuuucaaccccaaguacgauugcaagaucaugacaagcaaaacggacguguccagcucuguuauuaccucccucggagccaucgugagcuguuauggcaagacaaaaugcaccgcuucuaacaagaaucgcgggauuaucaaaacauuuuccaacggaugugauuacgucagcaauaagggcguggacaccguuuccgugggcaacacgcuguauuacgucaauaagcaagaagggaaaucucuuuaugugaagggagagccuaucauuaacuucuacgacccccugguguucccuagcgaugaauuugacgccuccaucucucagguuaaugagaaaauuaaccagagccucgccuucaucagaaaguccgaugaacugcugcacaaugucaacgcuggcaaaagcaccacaaauauuaugaucaccacaauuaucaucgugauuaucgugauucuucucucucugaucgcggucgggcugcuccuguacugcaaggcccggugaggacuagugcaucacauuuaaaagcaucucagccuaccaugagaauaagagaaagaaaaugaagaucaauagcuuauucaucucuuuuucuuuuucguugguguaaagccaacacccugucuaaaaaacauaaauuucuuuaaucauuuugccucuuuucucugugcuucaauuaauaaaaaauggaaagaaccuagaucuaaaaaaaaaaaaaaaaaaaaaaaaaaaaaaaaaaaaaaaaaaaaaaaaaaaaaaaaaaaaaaaaugcaucccccccccccccccccccccccccccccccaaaggcucuuuucagagccaccagaauu

SEQ ID NO: 1618 - RNA, 2048 nt, Artificial Sequence
  mRNA product Design i-2 comprising derived and/or modified sequence from HRSV(A2)__F-del_DSCav1 (opt6)
gggagaggcgcugccuacggagguggcagccaucuccuucucggcaucaagcuuaccauggaacuauuaauauuaaaagcaaaugcuauuaccacaauacuuacugcuguaaccuucugcuuugccucuggccaaaacauaacagaagaauuuuaucaaucaacuugcuccgcuguaagcaaaggcuaccuaucagcauuacgcaccggcugguacacaucaguaauaacaauagaacuauccaacauaaaagaaaauaaaugcaacggaacagacgcaaaaguaaaauuaauaaaacaagaacucgacaaauacaaaaacgcaguaacagaauuacaacuacuaaugcaaaguacuccagccaccaacaacagagcaagaagagaauuaccacgauuuaugaacuacacacuaaacaaugcaaaaaaaacaaacguaacacuaucaaaaaaacguaaacgcagauucuuaggcuuccuccuagguguaggcucagcaaucgccucaggaguggcaguuuguaaaguacuacaccuagaaggagaaguaaacaaaaucaaaucugcccuuuuaucgacaaacaaagcaguaguaucguuauccaauggagucucaguauugacauucaaaguauuagaccuaaaaaauuauauagauaaacaacucuuaccuaucuuaaauaaacaaagcugcucaauaaguaacauagaaaccguaauagaauuucaacaaaaaaacaauagacuccuugagaucacucgagaauuuucaguaaacgcagguguaacaacaccaguaagcacauacaugcuaacaaauagugaacuauuaucucuaauuaacgauaugcccauaaccaacgaucaaaaaaaacucaugaguaacaacguacaaauaguaagacaacaauccuauagcauaaugugcauuauaaaagaagaaguacuagcauauguaguccaacuaccacuauacggcguaauagacacaccaugcuggaaacuacacaccucaccccuaugcacaacaaauacaaaagaaggaucaaacauaugcuuaaccaggacagacagaggcugguacugcgauaacgcaggaucuguuucauucuucccccaagcagaaacaugcaaaguacaaucaaacagaguauuuugugauaccaugaacucacucacauuaccauccgaagucaaccucugcaacguagacauauucaaccccaaauacgacugcaaaauaaugaccucaaaaacagauguaucaucaucaguaaucacaucacuaggagcuaucguaucuuguuauggaaaaacaaaaugcacagcauccaacaaaaacagaggaauuaucaaaacauucucaaauggaugugacuauguaucaaacaaaggaguagacaccguaagcguaggcaauacacuauauuacguaaauaaacaagaaggaaaaucacuauacguaaaaggugaaccaauaauaaacuucuaugacccccuaguauucccaucagaugaauuugacgcaagcauaucacaagucaacgaaaaaauaaaccaaucacuggcauucauucgcaaaucagaugaacuucuccacaacguaaacgcugguaaaagcacuacaaacauaaugauaacaacaaucaucauugucauaauaguuauucuauuaucacuaaucgcaguaggauuacuacuauacuguaaagcgagguaaggacuagugcaucacauuuaaaagcaucucagccuaccaugagaauaagagaaagaaaaugaagaucaauagcuuauucaucucuuuuucuuuuucguugguguaaagccaacacccugucuaaaaaacauaaauuucuuuaaucauuuugccucuuuucucugugcuucaauuaauaaaaaauggaaagaaccuagaucuaaaaaaaaaaaaaaaaaaaaaaaaaaaaaaaaaaaaaaaaaaaaaaaaaaaaaaaaaaaaaaaaugcaucccccccccccccccccccccccccccccccaaaggcucuuuucagagccaccagaauu

SEQ ID NO: 1619 - RNA, 2048 nt, Artificial Sequence
  mRNA product Design i-2 comprising derived and/or modified sequence from HRSV(A2)__F-del_DSCav1 (opt11)
gggagaggcgcugccuacggagguggcagccaucuccuucucggcaucaagcuuaccauggagcugcucauccugaaggccaacgccaucaccacaauccugacggcggugaccuucugcuucgccagcggccagaacaucaccgaggaguucuaccaguccacgugcagcgccgucuccaagggguaccucagcgcccugcgaaccggcugguacaccuccgugaucaccaucgagcugucaaacaucaaggagaacaagugcaacgggaccgaugccaagguuaagcucaucaagcaggagcuggacaaguacaagaacgcggucacggagcugcagcuccugaugcaguccacuccggcaaccaacaaccgcgccaggcgcgagcugccccgguucaugaacuacacccucaacaacgccaagaagacgaaugugacccugagcaagaagcgcaagcggcgcuuccugggcuuccuccuaggggugggcuccgccaucgcgagcggcgucgccgugugcaagguguugcaccucgagggggaggucaacaagaucaagagcgcccugcuguccaccaacaaggccgugguaagccucuccaacggcgucagcguucugaccuucaaggugcuggaccucaagaacuauaucgacaagcagcugcugcccauccugaacaagcagagcugcuccaucucaaacaucgaaacggugauugaguuccagcagaagaacaaccggcuccuggaaaucacccgcgaguucagcgugaacgccggggucaccacccccguguccacguacaugcugaccaacagcgagcuccuaucccugaucaacgacaugccgaucaccaacgaccagaagaagcucaugagcaacaacgugcagaucguccggcagcaguccuacagcaucaugugcaucaucaaggaagaggugcuggcguacgugguccagcugccccucuacggcgugaucgacacccccugcuggaagcugcacacgagcccccugugcacaaccaacaccaaggagggguccaacaucugccucacgcgcaccgaccggggcugguacugcgacaacgccggcagcgucuccuucuucccgcaggccgagaccugcaaggugcagagcaaccgcguguucugcgacaccaugaacucccugacgcugcccucugagguaaaccucugcaacgucgacaucuucaaccccaaguacgacugcaagaucaugaccuccaagacagacgugagcuccagcgugaucacaucccugggggccaucgucagcugcuacggcaagacuaaguguacugccagcaacaagaaccgggggaucaucaagaccuucuccaacggcugcgacuacgugagcaacaagggcguggacaccguguccgucgggaacacccuguacuacguuaauaagcaggagggcaagagccucuacgugaaaggggagcccaucauuaacuucuacgacccacugguuuuccccuccgacgaguucgacgcgagcaucucccaggugaacgagaagaucaaccagagccuggccuucauccgcaaguccgacgagcugcuccacaacgugaacgccggcaagagcacgaccaacaucaugaucaccaccaucaucaucgugaucaucgugauucugcugucccucaucgccguggggcugcugcuuuacugcaaggcccggugaggacuagugcaucacauuuaaaagcaucucagccuaccaugagaauaagagaaagaaaaugaagaucaauagcuuauucaucucuuuuucuuuuucguugguguaaagccaacacccugucuaaaaaacauaaauuucuuuaaucauuuugccucuuuucucugugcuucaauuaauaaaaaauggaaagaaccuagaucuaaaaaaaaaaaaaaaaaaaaaaaaaaaaaaaaaaaaaaaaaaaaaaaaaaaaaaaaaaaaaaaaugcaucccccccccccccccccccccccccccccccaaaggcucuuuucagagccaccagaauu

SEQ ID NO: 1620 - RNA, 2044 nt, Artificial Sequence
  mRNA product Design i-2 comprising derived and/or modified sequence from HRSV(A2)__F-del_DSCav1 (opt1) R6122
ggggcgcugccuacggagguggcagccaucuccuucucggcaucaagcuuaccauggagcugcucauccugaaggccaacgccaucaccaccauccugacggcggugaccuucugcuucgccagcggccagaacaucaccgaggaguucuaccaguccacgugcagcgccgucuccaagggguaccucagcgcccugcggaccggcugguacaccuccgugaucaccaucgagcugagcaacaucaaggagaacaagugcaacgggaccgacgccaaggugaagcucaucaagcaggagcuggacaaguacaagaacgcggucacggagcugcagcuccugaugcaguccaccccggcaaccaacaaccgcgcccggcgcgagcugccccgguucaugaacuacacccucaacaacgccaagaagacgaacgugacccugagcaagaagcgcaagcggcgcuuccugggcuuccuccugggggugggcuccgccaucgcgagcggcgucgccgugugcaaggugcugcaccucgagggggaggucaacaagaucaagagcgcccugcuguccaccaacaaggccguggugagccucuccaacggcgucagcgugcugaccuucaaggugcuggaccucaagaacuacaucgacaagcagcugcugcccauccugaacaagcagagcugcuccaucagcaacaucgagacggugaucgaguuccagcagaagaacaaccggcuccuggagaucacccgcgaguucagcgugaacgccggggucaccacccccguguccacguacaugcugaccaacagcgagcuccugucccugaucaacgacaugccgaucaccaacgaccagaagaagcucaugagcaacaacgugcagaucguccggcagcaguccuacagcaucaugugcaucaucaaggaggaggugcuggcguacgugguccagcugccccucuacggcgugaucgacacccccugcuggaagcugcacacgagcccccugugcaccaccaacaccaaggagggguccaacaucugccucacgcgcaccgaccggggcugguacugcgacaacgccggcagcgucuccuucuucccgcaggccgagaccugcaaggugcagagcaaccgcguguucugcgacaccaugaacucccugacgcugcccagcgagguaaaccucugcaacgucgacaucuucaaccccaaguacgacugcaagaucaugaccuccaagaccgacgugagcuccagcgugaucaccucccugggggccaucgucagcugcuacggcaagacgaagugcaccgccagcaacaagaaccgggggaucaucaagaccuucuccaacggcugcgacuacgugagcaacaagggcguggacaccguguccgucgggaacacccuguacuacgugaacaagcaggagggcaagagccucuacgugaagggggagcccaucaucaacuucuacgacccgcuggucuuccccuccgacgaguucgacgcgagcaucucccaggugaacgagaagaucaaccagagccuggccuucauccgcaaguccgacgagcugcuccacaacgugaacgccggcaagagcacgaccaacaucaugaucaccaccaucaucaucgucaucaucgugauccugcugucccucaucgccguggggcugcugcucuacugcaaggcccggugaggacuagugcaucacauuuaaaagcaucucagccuaccaugagaauaagagaaagaaaaugaagaucaauagcuuauucaucucuuuuucuuuuucguugguguaaagccaacacccugucuaaaaaacauaaauuucuuuaaucauuuugccucuuuucucugugcuucaauuaauaaaaaauggaaagaaccuagaucuaaaaaaaaaaaaaaaaaaaaaaaaaaaaaaaaaaaaaaaaaaaaaaaaaaaaaaaaaaaaaaaaugcaucccccccccccccccccccccccccccccccaaaggcucuuuucagagccaccagaauu

SEQ ID NO: 1621 - RNA, 2044 nt, Artificial Sequence
  mRNA product Design i-2 comprising derived and/or modified sequence from HRSV(A2)__F-del_DSCav1 (opt1)
ggggcgcugccuacggagguggcagccaucuccuucucggcaucaagcuuaccauggagcugcucauccugaaggccaacgccaucaccaccauccugacggcggugaccuucugcuucgccagcggccagaacaucaccgaggaguucuaccaguccacgugcagcgccgucuccaagggguaccucagcgcccugcgcaccggcugguacaccuccgugaucaccaucgagcugagcaacaucaaggagaacaagugcaacgggaccgacgccaaggugaagcucaucaagcaggagcuggacaaguacaagaacgcggucacggagcugcagcuccugaugcaguccacccccgccaccaacaaccgggcccgccgggagcugccgcgcuucaugaacuacacccucaacaacgccaagaagacgaacgugacccugagcaagaagcggaagcgccgguuccugggcuuccuccugggggugggcuccgcgaucgccagcggcgucgccgugugcaaggugcugcaccucgagggggaggucaacaagaucaaguccgcccugcugagcaccaacaaggccguggugucccucagcaacggcgucuccgugcugaccuucaaggugcuggaccucaagaacuacaucgacaagcagcugcugcccauccucaacaagcagagcugcuccaucagcaacaucgagacggucaucgaguuccagcagaagaacaaccgccugcuggagaucacccgggaguucuccgugaacgcgggggugaccacccccgucagcacguacaugcucaccaacagcgagcugcugucccucaucaacgacaugcccaucaccaacgaccagaagaagcugaugagcaacaacgugcagaucgugcgccagcaguccuacagcaucaugugcaucaucaaggaggagguccuggccuacguggugcagcucccgcuguacggcgucaucgacacccccugcuggaagcugcacacgagcccccucugcaccaccaacaccaaggaggggagcaacaucugccugacgcggaccgaccgcggcugguacugcgacaacgccggcuccgugagcuucuucccccaggccgagaccugcaagguccaguccaaccggguguucugcgacaccaugaacagccugacgcucccguccgaggugaaccugugcaacgucgacaucuucaaccccaaguacgacugcaagaucaugaccagcaagaccgacguguccagcuccgugaucaccagccugggggccaucgucuccugcuacggcaagacgaagugcaccgcgagcaacaagaaccgcgggaucaucaagaccuucuccaacggcugcgacuacgugagcaacaagggcguggacaccgucagcguggggaacacccucuacuacgugaacaagcaggagggcaagucccuguacgucaagggggagcccaucaucaacuucuacgacccccugguguucccgagcgacgaguucgacgccuccaucagccaggugaacgagaagaucaaccagucccucgccuucauccggaaguccgacgagcugcugcacaacgucaacgccggcaaguccacgaccaacaucaugaucaccaccaucaucaucgugaucaucgugauccugcucagccugaucgccgucgggcugcuccuguacugcaaggcgcgcugaggacuagugcaucacauuuaaaagcaucucagccuaccaugagaauaagagaaagaaaaugaagaucaauagcuuauucaucucuuuuucuuuuucguugguguaaagccaacacccugucuaaaaaacauaaauuucuuuaaucauuuugccucuuuucucugugcuucaauuaauaaaaaauggaaagaaccuagaucuaaaaaaaaaaaaaaaaaaaaaaaaaaaaaaaaaaaaaaaaaaaaaaaaaaaaaaaaaaaaaaaaugcaucccccccccccccccccccccccccccccccaaaggcucuuuucagagccaccagaauu

SEQ ID NO: 1622 - RNA, 2044 nt, Artificial Sequence
  mRNA product Design i-2 comprising derived and/or modified sequence from HRSV(A2)__F-del_DSCav1 (opt2)
ggggcgcugccuacggagguggcagccaucuccuucucggcaucaagcuuaccauggagcuccucauccucaaggccaacgccaucaccaccauccucaccgccgucaccuucugcuucgccuccggccagaacaucaccgaggaguucuaccaguccaccugcuccgccgucuccaagggcuaccucuccgcccuccgcaccggcugguacaccuccgucaucaccaucgagcucuccaacaucaaggagaacaagugcaacggcaccgacgccaaggucaagcucaucaagcaggagcucgacaaguacaagaacgccgucaccgagcuccagcuccucaugcaguccacccccgccaccaacaaccgcgcccgccgcgagcucccccgcuucaugaacuacacccucaacaacgccaagaagaccaacgucacccucuccaagaagcgcaagcgccgcuuccucggcuuccuccucggcgucggcuccgccaucgccuccggcgucgccgucugcaagguccuccaccucgagggcgaggucaacaagaucaaguccgcccuccucuccaccaacaaggccgucgucucccucuccaacggcgucuccguccucaccuucaagguccucgaccucaagaacuacaucgacaagcagcuccuccccauccucaacaagcaguccugcuccaucuccaacaucgagaccgucaucgaguuccagcagaagaacaaccgccuccucgagaucacccgcgaguucuccgucaacgccggcgucaccacccccgucuccaccuacaugcucaccaacuccgagcuccucucccucaucaacgacaugcccaucaccaacgaccagaagaagcucauguccaacaacguccagaucguccgccagcaguccuacuccaucaugugcaucaucaaggaggagguccucgccuacgucguccagcucccccucuacggcgucaucgacacccccugcuggaagcuccacaccuccccccucugcaccaccaacaccaaggagggcuccaacaucugccucacccgcaccgaccgcggcugguacugcgacaacgccggcuccgucuccuucuucccccaggccgagaccugcaagguccaguccaaccgcgucuucugcgacaccaugaacucccucacccuccccuccgaggucaaccucugcaacgucgacaucuucaaccccaaguacgacugcaagaucaugaccuccaagaccgacgucuccuccuccgucaucaccucccucggcgccaucgucuccugcuacggcaagaccaagugcaccgccuccaacaagaaccgcggcaucaucaagaccuucuccaacggcugcgacuacgucuccaacaagggcgucgacaccgucuccgucggcaacacccucuacuacgucaacaagcaggagggcaagucccucuacgucaagggcgagcccaucaucaacuucuacgacccccucgucuuccccuccgacgaguucgacgccuccaucucccaggucaacgagaagaucaaccagucccucgccuucauccgcaaguccgacgagcuccuccacaacgucaacgccggcaaguccaccaccaacaucaugaucaccaccaucaucaucgucaucaucgucauccuccucucccucaucgccgucggccuccuccucuacugcaaggcccgcugaggacuagugcaucacauuuaaaagcaucucagccuaccaugagaauaagagaaagaaaaugaagaucaauagcuuauucaucucuuuuucuuuuucguugguguaaagccaacacccugucuaaaaaacauaaauuucuuuaaucauuuugccucuuuucucugugcuucaauuaauaaaaaauggaaagaaccuagaucuaaaaaaaaaaaaaaaaaaaaaaaaaaaaaaaaaaaaaaaaaaaaaaaaaaaaaaaaaaaaaaaaugcaucccccccccccccccccccccccccccccccaaaggcucuuuucagagccaccagaauu

SEQ ID NO: 1623 - RNA, 2044 nt, Artificial Sequence
  mRNA product Design i-2 comprising derived and/or modified sequence from HRSV(A2)__F-del_DSCav1 (opt3)
ggggcgcugccuacggagguggcagccaucuccuucucggcaucaagcuuaccauggagcugcucauccuuaaggccaacgcuauuaccacaauacugacugcagugacguucugcuuugccagcggccagaauaucaccgaagaguucuaccaauccacauguucugcggucucaaaaggguauuugagugcuuuaagaacuggaugguacaccagcguuauuacaaucgaacuguccaacauuaaggagaauaaaugcaacgguaccgacgccaaggugaaacuaaucaagcaggaacucgauaaguauaaaaaugcaguaacugagcugcagcuucugaugcagucuacacccgccaccaacaauagggcucggcgcgaguugccucgauuuaugaacuacacgcucaauaacgcaaagaaaacuaaugugacccugucgaagaaacguaagagaagguuccugggcuuucucuuaggggucggaucagccauagcuagcggcguggccguuuguaaggugcugcaccuugaaggugaggucaacaaaaucaagagugcguugcuguccacaaauaaagcagugguaucucuaagcaacgggguuuccgugcucacuuucaagguccuggaccuuaaaaauuauauugauaagcaacuguugccaauccucaacaaacagucaugcaguauuagcaacaucgaaaccgugauagaguuucagcagaagaauaaccggcuguuagagauuacacgcgaguucucugugaaugccggagucaccacgccgguuuccacuuacaugcugacaaacucagaacuccuuagccugaucaaugacaugcccauuaccaacgaucaaaagaaauugaugaguaauaacgugcagaucguaagacagcagucuuauuccaucauguguauuauaaaggaagaggugcuagcuuacgucgugcaacugccucucuacggcguuaucgacacuccaugcuggaaacugcauacaagcccccuuuguaccacgaauaccaaggaaggcucgaacauuugccugacaaggacugaucgggggugguauugugacaaugccggaucuguguccuuuuucccucaggcagagaccugcaaaguccagucaaaccgcguguuuugugauacaaugaauaguuugacucucccaagcgagguaaaccugugcaauguugacaucuucaaccccaaguacgauugcaagauaaugaccuccaaaacagacgugucuagcucagucauuaccaguuuaggugcuaucguguccuguuauggcaagacuaaaugcacggccagcaacaagaaucgagggaucauuaaaacauuuucuaacggaugugauuacgucucaaauaagggcguggacaccguuaguguggguaacacucuguauuacguaaauaagcaagaagggaaaagccuauaugucaagggagagccuaucauuaacuucuacgacccacucguguucccguccgaugaauuugacgcgucuauaucgcagguuaaugagaaaaucaaccagagccuggccuucauuagaaaguccgaugaacuuuugcacaaugugaacgcaggcaaaucaaccacaaauaucaugaucaccacuauuauaaucgucauuaucgugauucugcucagucugaucgcuguaggccuucuguuguacugcaaggccaggugaggacuagugcaucacauuuaaaagcaucucagccuaccaugagaauaagagaaagaaaaugaagaucaauagcuuauucaucucuuuuucuuuuucguugguguaaagccaacacccugucuaaaaaacauaaauuucuuuaaucauuuugccucuuuucucugugcuucaauuaauaaaaaauggaaagaaccuagaucuaaaaaaaaaaaaaaaaaaaaaaaaaaaaaaaaaaaaaaaaaaaaaaaaaaaaaaaaaaaaaaaaugcaucccccccccccccccccccccccccccccccaaaggcucuuuucagagccaccagaauu

SEQ ID NO: 1624 - RNA, 2044 nt, Artificial Sequence
  mRNA product Design i-2 comprising derived and/or modified sequence from HRSV(A2)__F-del_DSCav1 (opt4)
ggggcgcugccuacggagguggcagccaucuccuucucggcaucaagcuuaccauggagcugcugauccugaaggccaacgccaucaccaccauccugaccgccgugaccuucugcuucgccagcggccagaacaucaccgaggaguucuaccagagcaccugcagcgccgugagcaagggcuaccugagcgcccugagaaccggcugguacaccagcgugaucaccaucgagcugagcaacaucaaggagaacaagugcaacggcaccgacgccaaggugaagcugaucaagcaggagcuggacaaguacaagaacgccgugaccgagcugcagcugcugaugcagagcacccccgccaccaacaacagagccagaagagagcugcccagauucaugaacuacacccugaacaacgccaagaagaccaacgugacccugagcaagaagagaaagagaagauuccugggcuuccugcugggcgugggcagcgccaucgccagcggcguggccgugugcaaggugcugcaccuggagggcgaggugaacaagaucaagagcgcccugcugagcaccaacaaggccguggugagccugagcaacggcgugagcgugcugaccuucaaggugcuggaccugaagaacuacaucgacaagcagcugcugcccauccugaacaagcagagcugcagcaucagcaacaucgagaccgugaucgaguuccagcagaagaacaacagacugcuggagaucaccagagaguucagcgugaacgccggcgugaccacccccgugagcaccuacaugcugaccaacagcgagcugcugagccugaucaacgacaugcccaucaccaacgaccagaagaagcugaugagcaacaacgugcagaucgugagacagcagagcuacagcaucaugugcaucaucaaggaggaggugcuggccuacguggugcagcugccccuguacggcgugaucgacacccccugcuggaagcugcacaccagcccccugugcaccaccaacaccaaggagggcagcaacaucugccugaccagaaccgacagaggcugguacugcgacaacgccggcagcgugagcuucuucccccaggccgagaccugcaaggugcagagcaacagaguguucugcgacaccaugaacagccugacccugcccagcgaggugaaccugugcaacguggacaucuucaaccccaaguacgacugcaagaucaugaccagcaagaccgacgugagcagcagcgugaucaccagccugggcgccaucgugagcugcuacggcaagaccaagugcaccgccagcaacaagaacagaggcaucaucaagaccuucagcaacggcugcgacuacgugagcaacaagggcguggacaccgugagcgugggcaacacccuguacuacgugaacaagcaggagggcaagagccuguacgugaagggcgagcccaucaucaacuucuacgacccccugguguuccccagcgacgaguucgacgccagcaucagccaggugaacgagaagaucaaccagagccuggccuucaucagaaagagcgacgagcugcugcacaacgugaacgccggcaagagcaccaccaacaucaugaucaccaccaucaucaucgugaucaucgugauccugcugagccugaucgccgugggccugcugcuguacugcaaggccagaugaggacuagugcaucacauuuaaaagcaucucagccuaccaugagaauaagagaaagaaaaugaagaucaauagcuuauucaucucuuuuucuuuuucguugguguaaagccaacacccugucuaaaaaacauaaauuucuuuaaucauuuugccucuuuucucugugcuucaauuaauaaaaaauggaaagaaccuagaucuaaaaaaaaaaaaaaaaaaaaaaaaaaaaaaaaaaaaaaaaaaaaaaaaaaaaaaaaaaaaaaaaugcaucccccccccccccccccccccccccccccccaaaggcucuuuucagagccaccagaauu

SEQ ID NO: 1625 - RNA, 2044 nt, Artificial Sequence
  mRNA product Design i-2 comprising derived and/or modified sequence from HRSV(A2)__F-del_DSCav1 (opt5)
ggggcgcugccuacggagguggcagccaucuccuucucggcaucaagcuuaccauggagcugcucauccugaaggccaacgcuauuaccacaauccuuacggccgugaccuucugcuuugcgagcggccagaauauuacagaagaguucuaccaauccaccuguucugcugucagcaaaggguaucuguccgcccucagaacaggaugguacaccucuguuaucacaauugaacugagcaacaucaaggagaauaaaugcaacggcaccgacgccaaggugaaacuuaucaagcaggaacuggauaaguauaaaaaugcugugacggagcuccagcugcugaugcaguccacccccgccacaaacaaucgggcucgcagagagcucccucgguuuaugaacuacacccugaauaacgccaagaaaacaaaugucacccuuucuaagaaacgcaagagacgguuccugggguuucuccugggagugggcagcgcgauugccuccgggguugcuguguguaagguccuucaccuggaaggagaggugaacaaaaucaagagcgcccuccugucuacgaauaaagcuguugugucccugagcaacggcgucucugugcucacauucaaggugcuggaccuuaaaaauuauauugauaagcaacugcucccgauccugaacaaacaguccugcagcauuucuaacaucgaaaccgucauugaguuucagcagaagaauaaccgccuucuggagaucacaagagaauuuuccguuaaugccggcgugaccacccccgugagcacauacaugcucacgaacuccgagcugcugucucucaucaaugacaugccuauuaccaacgaucaaaagaaacugaugagcaauaacguccagaucgugcggcagcaguccuauagcauuauguguaucauuaaggaagagguucuugcguacgugguccaacugccccucuacggggugaucgacacaccuugcuggaaacugcauaccucuccccuuuguacaaccaauacgaaggaaggauccaacaucugccugacacgcaccgauagaggcugguauugugacaaugccgggagcguuucuuucuucccucaggcugagaccugcaaagugcagagcaaccgggucuuuugugauacaaugaacucccucacccugccgucugaggugaaucugugcaaugucgacauuuucaaccccaaguacgauugcaagaucaugacaagcaaaacggacguguccagcucuguuauuaccucccucggagccaucgugagcuguuauggcaagacaaaaugcaccgcuucuaacaagaaucgcgggauuaucaaaacauuuuccaacggaugugauuacgucagcaauaagggcguggacaccguuuccgugggcaacacgcuguauuacgucaauaagcaagaagggaaaucucuuuaugugaagggagagccuaucauuaacuucuacgacccccugguguucccuagcgaugaauuugacgccuccaucucucagguuaaugagaaaauuaaccagagccucgccuucaucagaaaguccgaugaacugcugcacaaugucaacgcuggcaaaagcaccacaaauauuaugaucaccacaauuaucaucgugauuaucgugauucuucucucucugaucgcggucgggcugcuccuguacugcaaggcccggugaggacuagugcaucacauuuaaaagcaucucagccuaccaugagaauaagagaaagaaaaugaagaucaauagcuuauucaucucuuuuucuuuuucguugguguaaagccaacacccugucuaaaaaacauaaauuucuuuaaucauuuugccucuuuucucugugcuucaauuaauaaaaaauggaaagaaccuagaucuaaaaaaaaaaaaaaaaaaaaaaaaaaaaaaaaaaaaaaaaaaaaaaaaaaaaaaaaaaaaaaaaugcaucccccccccccccccccccccccccccccccaaaggcucuuuucagagccaccagaauu

SEQ ID NO: 1626 - RNA, 2044 nt, Artificial Sequence
  mRNA product Design i-2 comprising derived and/or modified sequence from HRSV(A2)__F-del_DSCav1 (opt6)
ggggcgcugccuacggagguggcagccaucuccuucucggcaucaagcuuaccauggaacuauuaauauuaaaagcaaaugcuauuaccacaauacuuacugcuguaaccuucugcuuugccucuggccaaaacauaacagaagaauuuuaucaaucaacuugcuccgcuguaagcaaaggcuaccuaucagcauuacgcaccggcugguacacaucaguaauaacaauagaacuauccaacauaaaagaaaauaaaugcaacggaacagacgcaaaaguaaaauuaauaaaacaagaacucgacaaauacaaaaacgcaguaacagaauuacaacuacuaaugcaaaguacuccagccaccaacaacagagcaagaagagaauuaccacgauuuaugaacuacacacuaaacaaugcaaaaaaaacaaacguaacacuaucaaaaaaacguaaacgcagauucuuaggcuuccuccuagguguaggcucagcaaucgccucaggaguggcaguuuguaaaguacuacaccuagaaggagaaguaaacaaaaucaaaucugcccuuuuaucgacaaacaaagcaguaguaucguuauccaauggagucucaguauugacauucaaaguauuagaccuaaaaaauuauauagauaaacaacucuuaccuaucuuaaauaaacaaagcugcucaauaaguaacauagaaaccguaauagaauuucaacaaaaaaacaauagacuccuugagaucacucgagaauuuucaguaaacgcagguguaacaacaccaguaagcacauacaugcuaacaaauagugaacuauuaucucuaauuaacgauaugcccauaaccaacgaucaaaaaaaacucaugaguaacaacguacaaauaguaagacaacaauccuauagcauaaugugcauuauaaaagaagaaguacuagcauauguaguccaacuaccacuauacggcguaauagacacaccaugcuggaaacuacacaccucaccccuaugcacaacaaauacaaaagaaggaucaaacauaugcuuaaccaggacagacagaggcugguacugcgauaacgcaggaucuguuucauucuucccccaagcagaaacaugcaaaguacaaucaaacagaguauuuugugauaccaugaacucacucacauuaccauccgaagucaaccucugcaacguagacauauucaaccccaaauacgacugcaaaauaaugaccucaaaaacagauguaucaucaucaguaaucacaucacuaggagcuaucguaucuuguuauggaaaaacaaaaugcacagcauccaacaaaaacagaggaauuaucaaaacauucucaaauggaugugacuauguaucaaacaaaggaguagacaccguaagcguaggcaauacacuauauuacguaaauaaacaagaaggaaaaucacuauacguaaaaggugaaccaauaauaaacuucuaugacccccuaguauucccaucagaugaauuugacgcaagcauaucacaagucaacgaaaaaauaaaccaaucacuggcauucauucgcaaaucagaugaacuucuccacaacguaaacgcugguaaaagcacuacaaacauaaugauaacaacaaucaucauugucauaauaguuauucuauuaucacuaaucgcaguaggauuacuacuauacuguaaagcgagguaaggacuagugcaucacauuuaaaagcaucucagccuaccaugagaauaagagaaagaaaaugaagaucaauagcuuauucaucucuuuuucuuuuucguugguguaaagccaacacccugucuaaaaaacauaaauuucuuuaaucauuuugccucuuuucucugugcuucaauuaauaaaaaauggaaagaaccuagaucuaaaaaaaaaaaaaaaaaaaaaaaaaaaaaaaaaaaaaaaaaaaaaaaaaaaaaaaaaaaaaaaaugcaucccccccccccccccccccccccccccccccaaaggcucuuuucagagccaccagaauu

SEQ ID NO: 1627 - RNA, 2044 nt, Artificial Sequence
  mRNA product Design i-2 comprising derived and/or modified sequence from HRSV(A2)__F-del_DSCav1 (opt11)
ggggcgcugccuacggagguggcagccaucuccuucucggcaucaagcuuaccauggagcugcucauccugaaggccaacgccaucaccacaauccugacggcggugaccuucugcuucgccagcggccagaacaucaccgaggaguucuaccaguccacgugcagcgccgucuccaagggguaccucagcgcccugcgaaccggcugguacaccuccgugaucaccaucgagcugucaaacaucaaggagaacaagugcaacgggaccgaugccaagguuaagcucaucaagcaggagcuggacaaguacaagaacgcggucacggagcugcagcuccugaugcaguccacuccggcaaccaacaaccgcgccaggcgcgagcugccccgguucaugaacuacacccucaacaacgccaagaagacgaaugugacccugagcaagaagcgcaagcggcgcuuccugggcuuccuccuaggggugggcuccgccaucgcgagcggcgucgccgugugcaagguguugcaccucgagggggaggucaacaagaucaagagcgcccugcuguccaccaacaaggccgugguaagccucuccaacggcgucagcguucugaccuucaaggugcuggaccucaagaacuauaucgacaagcagcugcugcccauccugaacaagcagagcugcuccaucucaaacaucgaaacggugauugaguuccagcagaagaacaaccggcuccuggaaaucacccgcgaguucagcgugaacgccggggucaccacccccguguccacguacaugcugaccaacagcgagcuccuaucccugaucaacgacaugccgaucaccaacgaccagaagaagcucaugagcaacaacgugcagaucguccggcagcaguccuacagcaucaugugcaucaucaaggaagaggugcuggcguacgugguccagcugccccucuacggcgugaucgacacccccugcuggaagcugcacacgagcccccugugcacaaccaacaccaaggagggguccaacaucugccucacgcgcaccgaccggggcugguacugcgacaacgccggcagcgucuccuucuucccgcaggccgagaccugcaaggugcagagcaaccgcguguucugcgacaccaugaacucccugacgcugcccucugagguaaaccucugcaacgucgacaucuucaaccccaaguacgacugcaagaucaugaccuccaagacagacgugagcuccagcgugaucacaucccugggggccaucgucagcugcuacggcaagacuaaguguacugccagcaacaagaaccgggggaucaucaagaccuucuccaacggcugcgacuacgugagcaacaagggcguggacaccguguccgucgggaacacccuguacuacguuaauaagcaggagggcaagagccucuacgugaaaggggagcccaucauuaacuucuacgacccacugguuuuccccuccgacgaguucgacgcgagcaucucccaggugaacgagaagaucaaccagagccuggccuucauccgcaaguccgacgagcugcuccacaacgugaacgccggcaagagcacgaccaacaucaugaucaccaccaucaucaucgugaucaucgugauucugcugucccucaucgccguggggcugcugcuuuacugcaaggcccggugaggacuagugcaucacauuuaaaagcaucucagccuaccaugagaauaagagaaagaaaaugaagaucaauagcuuauucaucucuuuuucuuuuucguugguguaaagccaacacccugucuaaaaaacauaaauuucuuuaaucauuuugccucuuuucucugugcuucaauuaauaaaaaauggaaagaaccuagaucuaaaaaaaaaaaaaaaaaaaaaaaaaaaaaaaaaaaaaaaaaaaaaaaaaaaaaaaaaaaaaaaaugcaucccccccccccccccccccccccccccccccaaaggcucuuuucagagccaccagaauu

SEQ ID NO: 1628 - RNA, 1879 nt, Artificial Sequence
  mRNA product Design i-3 comprising derived and/or modified sequence from HRSV(A2)__F-del_DSCav1 (opt1) R5453
gggagaaagcuuaccauggagcugcucauccugaaggccaacgccaucaccaccauccugacggcggugaccuucugcuucgccagcggccagaacaucaccgaggaguucuaccaguccacgugcagcgccgucuccaagggguaccucagcgcccugcggaccggcugguacaccuccgugaucaccaucgagcugagcaacaucaaggagaacaagugcaacgggaccgacgccaaggugaagcucaucaagcaggagcuggacaaguacaagaacgcggucacggagcugcagcuccugaugcaguccaccccggcaaccaacaaccgcgcccggcgcgagcugccccgguucaugaacuacacccucaacaacgccaagaagacgaacgugacccugagcaagaagcgcaagcggcgcuuccugggcuuccuccugggggugggcuccgccaucgcgagcggcgucgccgugugcaaggugcugcaccucgagggggaggucaacaagaucaagagcgcccugcuguccaccaacaaggccguggugagccucuccaacggcgucagcgugcugaccuucaaggugcuggaccucaagaacuacaucgacaagcagcugcugcccauccugaacaagcagagcugcuccaucagcaacaucgagacggugaucgaguuccagcagaagaacaaccggcuccuggagaucacccgcgaguucagcgugaacgccggggucaccacccccguguccacguacaugcugaccaacagcgagcuccugucccugaucaacgacaugccgaucaccaacgaccagaagaagcucaugagcaacaacgugcagaucguccggcagcaguccuacagcaucaugugcaucaucaaggaggaggugcuggcguacgugguccagcugccccucuacggcgugaucgacacccccugcuggaagcugcacacgagcccccugugcaccaccaacaccaaggagggguccaacaucugccucacgcgcaccgaccggggcugguacugcgacaacgccggcagcgucuccuucuucccgcaggccgagaccugcaaggugcagagcaaccgcguguucugcgacaccaugaacucccugacgcugcccagcgagguaaaccucugcaacgucgacaucuucaaccccaaguacgacugcaagaucaugaccuccaagaccgacgugagcuccagcgugaucaccucccugggggccaucgucagcugcuacggcaagacgaagugcaccgccagcaacaagaaccgggggaucaucaagaccuucuccaacggcugcgacuacgugagcaacaagggcguggacaccguguccgucgggaacacccuguacuacgugaacaagcaggagggcaagagccucuacgugaagggggagcccaucaucaacuucuacgacccgcuggucuuccccuccgacgaguucgacgcgagcaucucccaggugaacgagaagaucaaccagagccuggccuucauccgcaaguccgacgagcugcuccacaacgugaacgccggcaagagcacgaccaacaucaugaucaccaccaucaucaucgucaucaucgugauccugcugucccucaucgccguggggcugcugcucuacugcaaggcccggugaggacuaguuauaagacugacuagcccgaugggccucccaacgggcccuccuccccuccuugcaccgagauuaauaaaaaaaaaaaaaaaaaaaaaaaaaaaaaaaaaaaaaaaaaaaaaaaaaaaaaaaaaaaaaaaaugcaucccccccccccccccccccccccccccccccaaaggcucuuuucagagccaccagaauu

SEQ ID NO: 1629 - RNA, 1879 nt, Artificial Sequence
  mRNA product Design i-3 comprising derived and/or modified sequence from HRSV(A2)__F-del_DSCav1 (opt1)
gggagaaagcuuaccauggagcugcucauccugaaggccaacgccaucaccaccauccugacggcggugaccuucugcuucgccagcggccagaacaucaccgaggaguucuaccaguccacgugcagcgccgucuccaagggguaccucagcgcccugcgcaccggcugguacaccuccgugaucaccaucgagcugagcaacaucaaggagaacaagugcaacgggaccgacgccaaggugaagcucaucaagcaggagcuggacaaguacaagaacgcggucacggagcugcagcuccugaugcaguccacccccgccaccaacaaccgggcccgccgggagcugccgcgcuucaugaacuacacccucaacaacgccaagaagacgaacgugacccugagcaagaagcggaagcgccgguuccugggcuuccuccugggggugggcuccgcgaucgccagcggcgucgccgugugcaaggugcugcaccucgagggggaggucaacaagaucaaguccgcccugcugagcaccaacaaggccguggugucccucagcaacggcgucuccgugcugaccuucaaggugcuggaccucaagaacuacaucgacaagcagcugcugcccauccucaacaagcagagcugcuccaucagcaacaucgagacggucaucgaguuccagcagaagaacaaccgccugcuggagaucacccgggaguucuccgugaacgcgggggugaccacccccgucagcacguacaugcucaccaacagcgagcugcugucccucaucaacgacaugcccaucaccaacgaccagaagaagcugaugagcaacaacgugcagaucgugcgccagcaguccuacagcaucaugugcaucaucaaggaggagguccuggccuacguggugcagcucccgcuguacggcgucaucgacacccccugcuggaagcugcacacgagcccccucugcaccaccaacaccaaggaggggagcaacaucugccugacgcggaccgaccgcggcugguacugcgacaacgccggcuccgugagcuucuucccccaggccgagaccugcaagguccaguccaaccggguguucugcgacaccaugaacagccugacgcucccguccgaggugaaccugugcaacgucgacaucuucaaccccaaguacgacugcaagaucaugaccagcaagaccgacguguccagcuccgugaucaccagccugggggccaucgucuccugcuacggcaagacgaagugcaccgcgagcaacaagaaccgcgggaucaucaagaccuucuccaacggcugcgacuacgugagcaacaagggcguggacaccgucagcguggggaacacccucuacuacgugaacaagcaggagggcaagucccuguacgucaagggggagcccaucaucaacuucuacgacccccugguguucccgagcgacgaguucgacgccuccaucagccaggugaacgagaagaucaaccagucccucgccuucauccggaaguccgacgagcugcugcacaacgucaacgccggcaaguccacgaccaacaucaugaucaccaccaucaucaucgugaucaucgugauccugcucagccugaucgccgucgggcugcuccuguacugcaaggcgcgcugaggacuaguuauaagacugacuagcccgaugggccucccaacgggcccuccuccccuccuugcaccgagauuaauaaaaaaaaaaaaaaaaaaaaaaaaaaaaaaaaaaaaaaaaaaaaaaaaaaaaaaaaaaaaaaaaugcaucccccccccccccccccccccccccccccccaaaggcucuuuucagagccaccagaauu

SEQ ID NO: 1630 - RNA, 1879 nt, Artificial Sequence
  mRNA product Design i-3 comprising derived and/or modified sequence from HRSV(A2)__F-del_DSCav1 (opt2)
gggagaaagcuuaccauggagcuccucauccucaaggccaacgccaucaccaccauccucaccgccgucaccuucugcuucgccuccggccagaacaucaccgaggaguucuaccaguccaccugcuccgccgucuccaagggcuaccucuccgcccuccgcaccggcugguacaccuccgucaucaccaucgagcucuccaacaucaaggagaacaagugcaacggcaccgacgccaaggucaagcucaucaagcaggagcucgacaaguacaagaacgccgucaccgagcuccagcuccucaugcaguccacccccgccaccaacaaccgcgcccgccgcgagcucccccgcuucaugaacuacacccucaacaacgccaagaagaccaacgucacccucuccaagaagcgcaagcgccgcuuccucggcuuccuccucggcgucggcuccgccaucgccuccggcgucgccgucugcaagguccuccaccucgagggcgaggucaacaagaucaaguccgcccuccucuccaccaacaaggccgucgucucccucuccaacggcgucuccguccucaccuucaagguccucgaccucaagaacuacaucgacaagcagcuccuccccauccucaacaagcaguccugcuccaucuccaacaucgagaccgucaucgaguuccagcagaagaacaaccgccuccucgagaucacccgcgaguucuccgucaacgccggcgucaccacccccgucuccaccuacaugcucaccaacuccgagcuccucucccucaucaacgacaugcccaucaccaacgaccagaagaagcucauguccaacaacguccagaucguccgccagcaguccuacuccaucaugugcaucaucaaggaggagguccucgccuacgucguccagcucccccucuacggcgucaucgacacccccugcuggaagcuccacaccuccccccucugcaccaccaacaccaaggagggcuccaacaucugccucacccgcaccgaccgcggcugguacugcgacaacgccggcuccgucuccuucuucccccaggccgagaccugcaagguccaguccaaccgcgucuucugcgacaccaugaacucccucacccuccccuccgaggucaaccucugcaacgucgacaucuucaaccccaaguacgacugcaagaucaugaccuccaagaccgacgucuccuccuccgucaucaccucccucggcgccaucgucuccugcuacggcaagaccaagugcaccgccuccaacaagaaccgcggcaucaucaagaccuucuccaacggcugcgacuacgucuccaacaagggcgucgacaccgucuccgucggcaacacccucuacuacgucaacaagcaggagggcaagucccucuacgucaagggcgagcccaucaucaacuucuacgacccccucgucuuccccuccgacgaguucgacgccuccaucucccaggucaacgagaagaucaaccagucccucgccuucauccgcaaguccgacgagcuccuccacaacgucaacgccggcaaguccaccaccaacaucaugaucaccaccaucaucaucgucaucaucgucauccuccucucccucaucgccgucggccuccuccucuacugcaaggcccgcugaggacuaguuauaagacugacuagcccgaugggccucccaacgggcccuccuccccuccuugcaccgagauuaauaaaaaaaaaaaaaaaaaaaaaaaaaaaaaaaaaaaaaaaaaaaaaaaaaaaaaaaaaaaaaaaaugcaucccccccccccccccccccccccccccccccaaaggcucuuuucagagccaccagaauu

SEQ ID NO: 1631 - RNA, 1879 nt, Artificial Sequence
  mRNA product Design i-3 comprising derived and/or modified sequence from HRSV(A2)__F-del_DSCav1 (opt3)
gggagaaagcuuaccauggagcugcucauccuuaaggccaacgcuauuaccacaauacugacugcagugacguucugcuuugccagcggccagaauaucaccgaagaguucuaccaauccacauguucugcggucucaaaaggguauuugagugcuuuaagaacuggaugguacaccagcguuauuacaaucgaacuguccaacauuaaggagaauaaaugcaacgguaccgacgccaaggugaaacuaaucaagcaggaacucgauaaguauaaaaaugcaguaacugagcugcagcuucugaugcagucuacacccgccaccaacaauagggcucggcgcgaguugccucgauuuaugaacuacacgcucaauaacgcaaagaaaacuaaugugacccugucgaagaaacguaagagaagguuccugggcuuucucuuaggggucggaucagccauagcuagcggcguggccguuuguaaggugcugcaccuugaaggugaggucaacaaaaucaagagugcguugcuguccacaaauaaagcagugguaucucuaagcaacgggguuuccgugcucacuuucaagguccuggaccuuaaaaauuauauugauaagcaacuguugccaauccucaacaaacagucaugcaguauuagcaacaucgaaaccgugauagaguuucagcagaagaauaaccggcuguuagagauuacacgcgaguucucugugaaugccggagucaccacgccgguuuccacuuacaugcugacaaacucagaacuccuuagccugaucaaugacaugcccauuaccaacgaucaaaagaaauugaugaguaauaacgugcagaucguaagacagcagucuuauuccaucauguguauuauaaaggaagaggugcuagcuuacgucgugcaacugccucucuacggcguuaucgacacuccaugcuggaaacugcauacaagcccccuuuguaccacgaauaccaaggaaggcucgaacauuugccugacaaggacugaucgggggugguauugugacaaugccggaucuguguccuuuuucccucaggcagagaccugcaaaguccagucaaaccgcguguuuugugauacaaugaauaguuugacucucccaagcgagguaaaccugugcaauguugacaucuucaaccccaaguacgauugcaagauaaugaccuccaaaacagacgugucuagcucagucauuaccaguuuaggugcuaucguguccuguuauggcaagacuaaaugcacggccagcaacaagaaucgagggaucauuaaaacauuuucuaacggaugugauuacgucucaaauaagggcguggacaccguuaguguggguaacacucuguauuacguaaauaagcaagaagggaaaagccuauaugucaagggagagccuaucauuaacuucuacgacccacucguguucccguccgaugaauuugacgcgucuauaucgcagguuaaugagaaaaucaaccagagccuggccuucauuagaaaguccgaugaacuuuugcacaaugugaacgcaggcaaaucaaccacaaauaucaugaucaccacuauuauaaucgucauuaucgugauucugcucagucugaucgcuguaggccuucuguuguacugcaaggccaggugaggacuaguuauaagacugacuagcccgaugggccucccaacgggcccuccuccccuccuugcaccgagauuaauaaaaaaaaaaaaaaaaaaaaaaaaaaaaaaaaaaaaaaaaaaaaaaaaaaaaaaaaaaaaaaaaugcaucccccccccccccccccccccccccccccccaaaggcucuuuucagagccaccagaauu

SEQ ID NO: 1632 - RNA, 1879 nt, Artificial Sequence
  mRNA product Design i-3 comprising derived and/or modified sequence from HRSV(A2)__F-del_DSCav1 (opt4)
gggagaaagcuuaccauggagcugcugauccugaaggccaacgccaucaccaccauccugaccgccgugaccuucugcuucgccagcggccagaacaucaccgaggaguucuaccagagcaccugcagcgccgugagcaagggcuaccugagcgcccugagaaccggcugguacaccagcgugaucaccaucgagcugagcaacaucaaggagaacaagugcaacggcaccgacgccaaggugaagcugaucaagcaggagcuggacaaguacaagaacgccgugaccgagcugcagcugcugaugcagagcacccccgccaccaacaacagagccagaagagagcugcccagauucaugaacuacacccugaacaacgccaagaagaccaacgugacccugagcaagaagagaaagagaagauuccugggcuuccugcugggcgugggcagcgccaucgccagcggcguggccgugugcaaggugcugcaccuggagggcgaggugaacaagaucaagagcgcccugcugagcaccaacaaggccguggugagccugagcaacggcgugagcgugcugaccuucaaggugcuggaccugaagaacuacaucgacaagcagcugcugcccauccugaacaagcagagcugcagcaucagcaacaucgagaccgugaucgaguuccagcagaagaacaacagacugcuggagaucaccagagaguucagcgugaacgccggcgugaccacccccgugagcaccuacaugcugaccaacagcgagcugcugagccugaucaacgacaugcccaucaccaacgaccagaagaagcugaugagcaacaacgugcagaucgugagacagcagagcuacagcaucaugugcaucaucaaggaggaggugcuggccuacguggugcagcugccccuguacggcgugaucgacacccccugcuggaagcugcacaccagcccccugugcaccaccaacaccaaggagggcagcaacaucugccugaccagaaccgacagaggcugguacugcgacaacgccggcagcgugagcuucuucccccaggccgagaccugcaaggugcagagcaacagaguguucugcgacaccaugaacagccugacccugcccagcgaggugaaccugugcaacguggacaucuucaaccccaaguacgacugcaagaucaugaccagcaagaccgacgugagcagcagcgugaucaccagccugggcgccaucgugagcugcuacggcaagaccaagugcaccgccagcaacaagaacagaggcaucaucaagaccuucagcaacggcugcgacuacgugagcaacaagggcguggacaccgugagcgugggcaacacccuguacuacgugaacaagcaggagggcaagagccuguacgugaagggcgagcccaucaucaacuucuacgacccccugguguuccccagcgacgaguucgacgccagcaucagccaggugaacgagaagaucaaccagagccuggccuucaucagaaagagcgacgagcugcugcacaacgugaacgccggcaagagcaccaccaacaucaugaucaccaccaucaucaucgugaucaucgugauccugcugagccugaucgccgugggccugcugcuguacugcaaggccagaugaggacuaguuauaagacugacuagcccgaugggccucccaacgggcccuccuccccuccuugcaccgagauuaauaaaaaaaaaaaaaaaaaaaaaaaaaaaaaaaaaaaaaaaaaaaaaaaaaaaaaaaaaaaaaaaaugcaucccccccccccccccccccccccccccccccaaaggcucuuuucagagccaccagaauu

SEQ ID NO: 1633 - RNA, 1879 nt, Artificial Sequence
  mRNA product Design i-3 comprising derived and/or modified sequence from HRSV(A2)__F-del_DSCav1 (opt5)
gggagaaagcuuaccauggagcugcucauccugaaggccaacgcuauuaccacaauccuuacggccgugaccuucugcuuugcgagcggccagaauauuacagaagaguucuaccaauccaccuguucugcugucagcaaaggguaucuguccgcccucagaacaggaugguacaccucuguuaucacaauugaacugagcaacaucaaggagaauaaaugcaacggcaccgacgccaaggugaaacuuaucaagcaggaacuggauaaguauaaaaaugcugugacggagcuccagcugcugaugcaguccacccccgccacaaacaaucgggcucgcagagagcucccucgguuuaugaacuacacccugaauaacgccaagaaaacaaaugucacccuuucuaagaaacgcaagagacgguuccugggguuucuccugggagugggcagcgcgauugccuccgggguugcuguguguaagguccuucaccuggaaggagaggugaacaaaaucaagagcgcccuccugucuacgaauaaagcuguugugucccugagcaacggcgucucugugcucacauucaaggugcuggaccuuaaaaauuauauugauaagcaacugcucccgauccugaacaaacaguccugcagcauuucuaacaucgaaaccgucauugaguuucagcagaagaauaaccgccuucuggagaucacaagagaauuuuccguuaaugccggcgugaccacccccgugagcacauacaugcucacgaacuccgagcugcugucucucaucaaugacaugccuauuaccaacgaucaaaagaaacugaugagcaauaacguccagaucgugcggcagcaguccuauagcauuauguguaucauuaaggaagagguucuugcguacgugguccaacugccccucuacggggugaucgacacaccuugcuggaaacugcauaccucuccccuuuguacaaccaauacgaaggaaggauccaacaucugccugacacgcaccgauagaggcugguauugugacaaugccgggagcguuucuuucuucccucaggcugagaccugcaaagugcagagcaaccgggucuuuugugauacaaugaacucccucacccugccgucugaggugaaucugugcaaugucgacauuuucaaccccaaguacgauugcaagaucaugacaagcaaaacggacguguccagcucuguuauuaccucccucggagccaucgugagcuguuauggcaagacaaaaugcaccgcuucuaacaagaaucgcgggauuaucaaaacauuuuccaacggaugugauuacgucagcaauaagggcguggacaccguuuccgugggcaacacgcuguauuacgucaauaagcaagaagggaaaucucuuuaugugaagggagagccuaucauuaacuucuacgacccccugguguucccuagcgaugaauuugacgccuccaucucucagguuaaugagaaaauuaaccagagccucgccuucaucagaaaguccgaugaacugcugcacaaugucaacgcuggcaaaagcaccacaaauauuaugaucaccacaauuaucaucgugauuaucgugauucuucucucucugaucgcggucgggcugcuccuguacugcaaggcccggugaggacuaguuauaagacugacuagcccgaugggccucccaacgggcccuccuccccuccuugcaccgagauuaauaaaaaaaaaaaaaaaaaaaaaaaaaaaaaaaaaaaaaaaaaaaaaaaaaaaaaaaaaaaaaaaaugcaucccccccccccccccccccccccccccccccaaaggcucuuuucagagccaccagaauu

SEQ ID NO: 1634 - RNA, 1879 nt, Artificial Sequence
  mRNA product Design i-3 comprising derived and/or modified sequence from HRSV(A2)__F-del_DSCav1 (opt6)
gggagaaagcuuaccauggaacuauuaauauuaaaagcaaaugcuauuaccacaauacuuacugcuguaaccuucugcuuugccucuggccaaaacauaacagaagaauuuuaucaaucaacuugcuccgcuguaagcaaaggcuaccuaucagcauuacgcaccggcugguacacaucaguaauaacaauagaacuauccaacauaaaagaaaauaaaugcaacggaacagacgcaaaaguaaaauuaauaaaacaagaacucgacaaauacaaaaacgcaguaacagaauuacaacuacuaaugcaaaguacuccagccaccaacaacagagcaagaagagaauuaccacgauuuaugaacuacacacuaaacaaugcaaaaaaaacaaacguaacacuaucaaaaaaacguaaacgcagauucuuaggcuuccuccuagguguaggcucagcaaucgccucaggaguggcaguuuguaaaguacuacaccuagaaggagaaguaaacaaaaucaaaucugcccuuuuaucgacaaacaaagcaguaguaucguuauccaauggagucucaguauugacauucaaaguauuagaccuaaaaaauuauauagauaaacaacucuuaccuaucuuaaauaaacaaagcugcucaauaaguaacauagaaaccguaauagaauuucaacaaaaaaacaauagacuccuugagaucacucgagaauuuucaguaaacgcagguguaacaacaccaguaagcacauacaugcuaacaaauagugaacuauuaucucuaauuaacgauaugcccauaaccaacgaucaaaaaaaacucaugaguaacaacguacaaauaguaagacaacaauccuauagcauaaugugcauuauaaaagaagaaguacuagcauauguaguccaacuaccacuauacggcguaauagacacaccaugcuggaaacuacacaccucaccccuaugcacaacaaauacaaaagaaggaucaaacauaugcuuaaccaggacagacagaggcugguacugcgauaacgcaggaucuguuucauucuucccccaagcagaaacaugcaaaguacaaucaaacagaguauuuugugauaccaugaacucacucacauuaccauccgaagucaaccucugcaacguagacauauucaaccccaaauacgacugcaaaauaaugaccucaaaaacagauguaucaucaucaguaaucacaucacuaggagcuaucguaucuuguuauggaaaaacaaaaugcacagcauccaacaaaaacagaggaauuaucaaaacauucucaaauggaugugacuauguaucaaacaaaggaguagacaccguaagcguaggcaauacacuauauuacguaaauaaacaagaaggaaaaucacuauacguaaaaggugaaccaauaauaaacuucuaugacccccuaguauucccaucagaugaauuugacgcaagcauaucacaagucaacgaaaaaauaaaccaaucacuggcauucauucgcaaaucagaugaacuucuccacaacguaaacgcugguaaaagcacuacaaacauaaugauaacaacaaucaucauugucauaauaguuauucuauuaucacuaaucgcaguaggauuacuacuauacuguaaagcgagguaaggacuaguuauaagacugacuagcccgaugggccucccaacgggcccuccuccccuccuugcaccgagauuaauaaaaaaaaaaaaaaaaaaaaaaaaaaaaaaaaaaaaaaaaaaaaaaaaaaaaaaaaaaaaaaaaugcaucccccccccccccccccccccccccccccccaaaggcucuuuucagagccaccagaauu

SEQ ID NO: 1635 - RNA, 1879 nt, Artificial Sequence
  mRNA product Design i-3 comprising derived and/or modified sequence from HRSV(A2)__F-del_DSCav1 (opt11)
gggagaaagcuuaccauggagcugcucauccugaaggccaacgccaucaccacaauccugacggcggugaccuucugcuucgccagcggccagaacaucaccgaggaguucuaccaguccacgugcagcgccgucuccaagggguaccucagcgcccugcgaaccggcugguacaccuccgugaucaccaucgagcugucaaacaucaaggagaacaagugcaacgggaccgaugccaagguuaagcucaucaagcaggagcuggacaaguacaagaacgcggucacggagcugcagcuccugaugcaguccacuccggcaaccaacaaccgcgccaggcgcgagcugccccgguucaugaacuacacccucaacaacgccaagaagacgaaugugacccugagcaagaagcgcaagcggcgcuuccugggcuuccuccuaggggugggcuccgccaucgcgagcggcgucgccgugugcaagguguugcaccucgagggggaggucaacaagaucaagagcgcccugcuguccaccaacaaggccgugguaagccucuccaacggcgucagcguucugaccuucaaggugcuggaccucaagaacuauaucgacaagcagcugcugcccauccugaacaagcagagcugcuccaucucaaacaucgaaacggugauugaguuccagcagaagaacaaccggcuccuggaaaucacccgcgaguucagcgugaacgccggggucaccacccccguguccacguacaugcugaccaacagcgagcuccuaucccugaucaacgacaugccgaucaccaacgaccagaagaagcucaugagcaacaacgugcagaucguccggcagcaguccuacagcaucaugugcaucaucaaggaagaggugcuggcguacgugguccagcugccccucuacggcgugaucgacacccccugcuggaagcugcacacgagcccccugugcacaaccaacaccaaggagggguccaacaucugccucacgcgcaccgaccggggcugguacugcgacaacgccggcagcgucuccuucuucccgcaggccgagaccugcaaggugcagagcaaccgcguguucugcgacaccaugaacucccugacgcugcccucugagguaaaccucugcaacgucgacaucuucaaccccaaguacgacugcaagaucaugaccuccaagacagacgugagcuccagcgugaucacaucccugggggccaucgucagcugcuacggcaagacuaaguguacugccagcaacaagaaccgggggaucaucaagaccuucuccaacggcugcgacuacgugagcaacaagggcguggacaccguguccgucgggaacacccuguacuacguuaauaagcaggagggcaagagccucuacgugaaaggggagcccaucauuaacuucuacgacccacugguuuuccccuccgacgaguucgacgcgagcaucucccaggugaacgagaagaucaaccagagccuggccuucauccgcaaguccgacgagcugcuccacaacgugaacgccggcaagagcacgaccaacaucaugaucaccaccaucaucaucgugaucaucgugauucugcugucccucaucgccguggggcugcugcuuuacugcaaggcccggugaggacuaguuauaagacugacuagcccgaugggccucccaacgggcccuccuccccuccuugcaccgagauuaauaaaaaaaaaaaaaaaaaaaaaaaaaaaaaaaaaaaaaaaaaaaaaaaaaaaaaaaaaaaaaaaaugcaucccccccccccccccccccccccccccccccaaaggcucuuuucagagccaccagaauu

SEQ ID NO: 1636 - protein, 535 aa, Artificial Sequence
  derived and/or modified protein sequence (artificial) from HRSV(A2)__F_DSCav1_mut1
MELLILKANAITTILTAVTFCFASGQNITEEFYQSTCSAVSKGYLGALRTGWYTSVITIELSNIKENKCNGTDAKVKLIKQELDKYKNAVTELQLLMQSTPATGSGSAICSGVAVCKVLHLEGEVNKIKSALLSTNKAVVSLSNGVSVLTFKVLDLKNYIDKQLLPILNKQSCSIPNIETVIEFQQKNNRLLEITREFSVNAGVTTPVSTYMLTNSELLSLINDMPITNDQKKLMSNNVQIVRQQSYSIMCIIKEEVLAYVVQLPLYGVIDTPCWKLHTSPLCTTNTKEGSNICLTRTDRGWYCDNAGSVSFFPQAETCKVQSNRVFCDTMNSLTLPSEVNLCNVDIFNPKYDCKIMTSKTDVSSSVITSLGAIVSCYGKTKCTASNKNRGIIKTFSNGCDYVSNKGVDTVSVGNTLYCVNKQEGQSLYVKGEPIINFYDPLVFPSDEFDASISQVNEKINQSLAFIRKSDELLHNVNAGKSTTNIMITTIIIVIIVILLSLIAVGLLLYCKARSTPVTLSKDQLSGINNIAFSN

SEQ ID NO: 1637 - RNA, 1608 nt, Artificial Sequence
  derived and/or modified CDS sequence (opt1) from HRSV(A2)__F_DSCav1_mut1
auggagcugcucauccugaaggccaacgccaucaccaccauccugacggcggugaccuucugcuucgccagcggccagaacaucaccgaggaguucuaccaguccacgugcagcgccgucuccaagggguaccucggcgcccugcggaccggcugguacaccuccgugaucaccaucgagcugagcaacaucaaggagaacaagugcaacgggaccgacgccaaggugaagcucaucaagcaggagcuggacaaguacaagaacgcggucacggagcugcagcuccugaugcaguccaccccggcaaccggcuccggcuccgccaucugcagcggcgucgccgugugcaaggugcugcaccucgagggggaggucaacaagaucaagagcgcccugcuguccaccaacaaggccguggugagccucuccaacggcgucagcgugcugaccuucaaggugcuggaccucaagaacuacaucgacaagcagcugcugcccauccugaacaagcagagcugcuccauccccaacaucgagacggugaucgaguuccagcagaagaacaaccggcuccuggagaucacccgcgaguucagcgugaacgccggggucaccacccccguguccacguacaugcugaccaacagcgagcuccugucccugaucaacgacaugccgaucaccaacgaccagaagaagcucaugagcaacaacgugcagaucguccggcagcaguccuacagcaucaugugcaucaucaaggaggaggugcuggcguacgugguccagcugccccucuacggcgugaucgacacccccugcuggaagcugcacacgagcccccugugcaccaccaacaccaaggagggguccaacaucugccucacgcgcaccgaccggggcugguacugcgacaacgccggcagcgucuccuucuucccgcaggccgagaccugcaaggugcagagcaaccgcguguucugcgacaccaugaacucccugacgcugcccagcgagguaaaccucugcaacgucgacaucuucaaccccaaguacgacugcaagaucaugaccuccaagaccgacgugagcuccagcgugaucaccucccugggggccaucgucagcugcuacggcaagacgaagugcaccgccagcaacaagaaccgggggaucaucaagaccuucuccaacggcugcgacuacgugagcaacaagggcguggacaccguguccgucgggaacacccuguacugcgugaacaagcaggagggccagagccucuacgugaagggggagcccaucaucaacuucuacgacccgcuggucuuccccuccgacgaguucgacgcgagcaucucccaggugaacgagaagaucaaccagagccuggccuucauccgcaaguccgacgagcugcuccacaacgugaacgccggcaagagcacgaccaacaucaugaucaccaccaucaucaucgucaucaucgugauccugcugucccucaucgccguggggcugcugcucuacugcaaggcccggagcacgcccgucacccuguccaaggaccagcugagcggcaucaacaacaucgcguucuccaacuga

SEQ ID NO: 1638 - RNA, 1608 nt, Artificial Sequence
  derived and/or modified CDS sequence (opt1) from HRSV(A2)__F_DSCav1_mut1
auggagcugcucauccugaaggccaacgccaucaccaccauccugacggcggugaccuucugcuucgccagcggccagaacaucaccgaggaguucuaccaguccacgugcagcgccgucuccaagggguaccucggcgcccugcgcaccgggugguacaccagcgugaucaccaucgagcuguccaacaucaaggagaacaagugcaacggcaccgacgccaaggugaagcucaucaagcaggagcuggacaaguacaagaacgcggucacggagcugcagcuccugaugcagagcacccccgccaccggguccggcagcgccaucugcuccggcguggccgugugcaagguccugcaccucgagggggaggugaacaagaucaagagcgcgcugcuguccaccaacaaggccguggucagccucuccaacggcgugagcgugcugacguucaagguccuggaccucaagaacuacaucgacaagcagcugcugccgauccucaacaagcaguccugcagcauccccaacaucgagaccgugaucgaguuccagcagaagaacaaccggcugcuggagaucacccgcgaguucuccgugaacgccggggucaccacgcccgugagcaccuacaugcucaccaacuccgagcugcugagccucaucaacgacaugcccaucaccaacgaccagaagaagcugaugagcaacaacgugcagaucguccggcagcaguccuacagcaucaugugcaucaucaaggaggaggugcuggccuacgugguccagcucccgcuguacggcgugaucgacacgcccugcuggaagcugcacaccagcccccucugcaccaccaacacgaaggagggguccaacaucugccugacccgcaccgaccggggcugguacugcgacaacgccggcuccgugagcuucuucccccaggcggagaccugcaagguccaguccaaccgcguguucugcgacacgaugaacagccugacccucccguccgaggucaaccugugcaacguggacaucuucaaccccaaguacgacugcaagaucaugaccagcaagaccgacguguccagcuccgucaucacgagccugggggccaucguguccugcuacggcaagaccaagugcaccgccagcaacaagaaccgggggaucaucaagaccuucuccaacggcugcgacuacgugagcaacaagggcgucgacacgguguccguggggaacacccucuacugcgucaacaagcaggagggccagagccuguacgugaagggggagcccaucaucaacuucuacgacccccugguguucccgagcgacgaguucgacgccuccaucagccaggucaacgagaagaucaaccagucccucgccuucauccgcaagagcgacgagcugcugcacaacgugaacgcgggcaaguccaccaccaacaucaugaucaccacgaucaucaucgugaucaucgucauccuccugagccugaucgccguggggcuccugcuguacugcaaggcccgguccacccccgugacccugagcaaggaccagcucuccggcaucaacaacaucgccuucagcaacuga

SEQ ID NO: 1639 - RNA, 1608 nt, Artificial Sequence
  derived and/or modified CDS sequence (opt2) from HRSV(A2)__F_DSCav1_mut1
auggagcuccucauccucaaggccaacgccaucaccaccauccucaccgccgucaccuucugcuucgccuccggccagaacaucaccgaggaguucuaccaguccaccugcuccgccgucuccaagggcuaccucggcgcccuccgcaccggcugguacaccuccgucaucaccaucgagcucuccaacaucaaggagaacaagugcaacggcaccgacgccaaggucaagcucaucaagcaggagcucgacaaguacaagaacgccgucaccgagcuccagcuccucaugcaguccacccccgccaccggcuccggcuccgccaucugcuccggcgucgccgucugcaagguccuccaccucgagggcgaggucaacaagaucaaguccgcccuccucuccaccaacaaggccgucgucucccucuccaacggcgucuccguccucaccuucaagguccucgaccucaagaacuacaucgacaagcagcuccuccccauccucaacaagcaguccugcuccauccccaacaucgagaccgucaucgaguuccagcagaagaacaaccgccuccucgagaucacccgcgaguucuccgucaacgccggcgucaccacccccgucuccaccuacaugcucaccaacuccgagcuccucucccucaucaacgacaugcccaucaccaacgaccagaagaagcucauguccaacaacguccagaucguccgccagcaguccuacuccaucaugugcaucaucaaggaggagguccucgccuacgucguccagcucccccucuacggcgucaucgacacccccugcuggaagcuccacaccuccccccucugcaccaccaacaccaaggagggcuccaacaucugccucacccgcaccgaccgcggcugguacugcgacaacgccggcuccgucuccuucuucccccaggccgagaccugcaagguccaguccaaccgcgucuucugcgacaccaugaacucccucacccuccccuccgaggucaaccucugcaacgucgacaucuucaaccccaaguacgacugcaagaucaugaccuccaagaccgacgucuccuccuccgucaucaccucccucggcgccaucgucuccugcuacggcaagaccaagugcaccgccuccaacaagaaccgcggcaucaucaagaccuucuccaacggcugcgacuacgucuccaacaagggcgucgacaccgucuccgucggcaacacccucuacugcgucaacaagcaggagggccagucccucuacgucaagggcgagcccaucaucaacuucuacgacccccucgucuuccccuccgacgaguucgacgccuccaucucccaggucaacgagaagaucaaccagucccucgccuucauccgcaaguccgacgagcuccuccacaacgucaacgccggcaaguccaccaccaacaucaugaucaccaccaucaucaucgucaucaucgucauccuccucucccucaucgccgucggccuccuccucuacugcaaggcccgcuccacccccgucacccucuccaaggaccagcucuccggcaucaacaacaucgccuucuccaacuga

SEQ ID NO: 1640 - RNA, 1608 nt, Artificial Sequence
  derived and/or modified CDS sequence (opt3) from HRSV(A2)__F_DSCav1_mut1
auggagcugcucauccuuaaggccaacgcuauuaccacaauacugacugcagugacguucugcuuugccagcggccagaauaucaccgaagaguucuaccaauccacauguucugcggucucaaaaggguauuugggagcuuuaagaacugguugguacaccaguguuauuacaaucgaacugagcaacauuaaggagaauaaaugcaacggcaccgacgccaaggugaaacuaaucaagcaggaacucgauaaguauaaaaaugcaguaacugagcugcagcuucugaugcaguccacacccgccaccgggucuggaucggcuauauguucaggcguggcagucugcaagguguugcaccucgagggugaaguuaacaaaaucaagagcgcccugcugaguacgaauaaagcuguggucucccucucuaacggggugagcguauuaacuuuuaagguucuggaccuuaagaauuacauugauaaacaauugcugccuauccuaaacaagcaguccuguucaauuccaaauaucgagaccgugauagaguuccagcagaaaaacaauaggcuccuggaaauuacacgggaguuuagugucaacgccggagugacuaccccggugagcacauauaugcuuaccaauucugaacuguugucccucaucaacgacaugcccauuacgaacgaucaaaagaaacugaugucaaauaacguccagaucguucgccagcagagcuacaguaucaugugcauuauaaaggaggaaguguuagcguauguagugcaacugccucucuacggcgucaucgacacuccauguuggaaacuucauacaucuccccugugcaccacuaauacaaaggagggcuccaacauuuguuugacccgaacggaucgugggugguacugcgacaaugcaggaagcgugucguucuuuccucaggccgaaaccuguaagguucagucuaacagaguguucugcgauacaaugaacucccuaacucugccaucagaggucaaucucugcaauguggacaucuuuaaccccaaauaugauuguaagauaaugaccaguaaaacagacguaagcuccucuguuauuacuagccugggugcuaucgugucaugcuacggcaagaccaaauguacagccaguaauaagaacagggggaucauuaagaccuucuccaauggaugcgauuaugucagcaacaaaggcguggacacugucucuguggguaauacgcuuuacuguguuaacaagcaagaggggcagucacuguaugugaaaggagaaccuaucauuaacuuuuacgacccauugguauucccgagugaugaguuugacgcaagcauaucccaggucaaugaaaagaucaaccagucucucgcuuucauucggaaaucggaugagcuguuacacaaugugaacgccggcaagagcacaaccaauaucaugaucacuaccauuauaaucguuauuaucgugauucugcuaucccucaucgcggucggccugcuuuuguauugcaaggcccgcucaacacccgugacccugaguaaagaccaacucucugggauaaacaauaucgcauucagcaacuga

SEQ ID NO: 1641 - RNA, 1608 nt, Artificial Sequence
  derived and/or modified CDS sequence (opt4) from HRSV(A2)__F_DSCav1_mut1
auggagcugcugauccugaaggccaacgccaucaccaccauccugaccgccgugaccuucugcuucgccagcggccagaacaucaccgaggaguucuaccagagcaccugcagcgccgugagcaagggcuaccugggcgcccugagaaccggcugguacaccagcgugaucaccaucgagcugagcaacaucaaggagaacaagugcaacggcaccgacgccaaggugaagcugaucaagcaggagcuggacaaguacaagaacgccgugaccgagcugcagcugcugaugcagagcacccccgccaccggcagcggcagcgccaucugcagcggcguggccgugugcaaggugcugcaccuggagggcgaggugaacaagaucaagagcgcccugcugagcaccaacaaggccguggugagccugagcaacggcgugagcgugcugaccuucaaggugcuggaccugaagaacuacaucgacaagcagcugcugcccauccugaacaagcagagcugcagcauccccaacaucgagaccgugaucgaguuccagcagaagaacaacagacugcuggagaucaccagagaguucagcgugaacgccggcgugaccacccccgugagcaccuacaugcugaccaacagcgagcugcugagccugaucaacgacaugcccaucaccaacgaccagaagaagcugaugagcaacaacgugcagaucgugagacagcagagcuacagcaucaugugcaucaucaaggaggaggugcuggccuacguggugcagcugccccuguacggcgugaucgacacccccugcuggaagcugcacaccagcccccugugcaccaccaacaccaaggagggcagcaacaucugccugaccagaaccgacagaggcugguacugcgacaacgccggcagcgugagcuucuucccccaggccgagaccugcaaggugcagagcaacagaguguucugcgacaccaugaacagccugacccugcccagcgaggugaaccugugcaacguggacaucuucaaccccaaguacgacugcaagaucaugaccagcaagaccgacgugagcagcagcgugaucaccagccugggcgccaucgugagcugcuacggcaagaccaagugcaccgccagcaacaagaacagaggcaucaucaagaccuucagcaacggcugcgacuacgugagcaacaagggcguggacaccgugagcgugggcaacacccuguacugcgugaacaagcaggagggccagagccuguacgugaagggcgagcccaucaucaacuucuacgacccccugguguuccccagcgacgaguucgacgccagcaucagccaggugaacgagaagaucaaccagagccuggccuucaucagaaagagcgacgagcugcugcacaacgugaacgccggcaagagcaccaccaacaucaugaucaccaccaucaucaucgugaucaucgugauccugcugagccugaucgccgugggccugcugcuguacugcaaggccagaagcacccccgugacccugagcaaggaccagcugagcggcaucaacaacaucgccuucagcaacuga

SEQ ID NO: 1642 - RNA, 1608 nt, Artificial Sequence
  derived and/or modified CDS sequence (opt5) from HRSV(A2)__F_DSCav1_mut1
auggagcugcucauccugaaggccaacgcuauuaccacaauccuuacggccgugaccuucugcuuugcgagcggccagaauauuacagaagaguucuaccaauccaccuguucugcugucagcaaaggguaucugggagcccucagaacaggcugguacaccuccguuaucacaauugaacugucuaacaucaaggagaauaaaugcaacgggaccgacgccaaggugaaacuuaucaagcaggaacuggauaaguauaaaaaugcugugacggagcuccagcugcugaugcagagcacccccgccacaggauccggcucugcuauuuguagcggggucgccgugugcaagguucuccaccuggagggagaagugaacaaaaucaaguccgcgcuucugagcaccaauaaagccgucgugucucucuccaacggcguuagcgugcugacauuuaagguccuugaccugaagaauuacauugauaaacaacuccugccuauccugaacaagcagucuuguuccauuccgaauaucgagaccgugauugaguuccagcagaaaaacaaucggcuccuggaaaucacgcgcgaguuuagcgugaacgcuggcgucacaacccccguuucuacauauaugcuuaccaauuccgaacugcucagccugaucaacgacaugccuauuaccaacgaucaaaagaaacuuauguccaauaacgugcagaucgugagacagcagucuuacagcauuaugugcaucauuaaggaggaaguccuggccuaugugguucaacucccccuguacggggugaucgacacaccuuguuggaaacugcauacgagcccccucugcaccacaaauaccaaggagggauccaacaucugucugacacggaccgaucgcggcugguacugcgacaaugcugggucugucuccuucuuuccucaggccgaaacguguaaggugcagagcaacagaguuuucugcgauacaaugaacucucuuacccugccgagcgaggugaaucucugcaaugucgacauuuuuaaccccaaauaugauuguaagaucaugaccuccaaaacagacgugucuagcuccgucauuaccagccugggagcgaucgugucuugcuacggcaagacaaaauguacggccuccaauaagaaccgggggauuaucaagaccuucagcaauggaugcgauuauguuucuaacaaaggcguggacacagucuccgugggcaauacccuuuacuguguuaacaagcaagaggggcagagccuguaugugaaaggagaaccuaucauuaacuuuuacgacccccucgucuucccuuccgaugaguuugacgcuucuaucagccaggugaaugaaaagauuaaccagucccuggccuucauccgcaaaucugaugagcugcuccacaaugugaacgcuggcaagagcacaaccaauauuaugaucacgaccauuaucaucguuauuaucgucauucugcuuucccugaucgccguggggcuccugcuguauugcaaggccagaagcacacccgugacccuuucuaaagaccaacucuccggaauuaacaauaucgcuuucagcaacuga

SEQ ID NO: 1643 - RNA, 1608 nt, Artificial Sequence
  derived and/or modified CDS sequence (opt6) from HRSV(A2)__F_DSCav1_mut1
auggaacuauuaauacuaaaagcaaacgcuauaacaacaauacuaacagcagucacauucugcuuugcaucaggccaaaacaucacagaagaauuuuaccaaucaacaugcuccgccguaucgaaaggauaccuaggcgcauuaagaaccggaugguauacaucagucauaacaauugaacuaucuaacauaaaagaaaacaaauguaacggcacagaugccaaaguaaaacucaucaaacaagaauuagauaaauacaaaaacgcagucacugaacuacaacucuuaaugcaaucaacaccugcaacaggaucaggaucagcaauaugcucaggaguagccguauguaaaguacuacaccuagaaggagaagucaacaaaauaaaaucagcccuccuaaguacaaacaaagcugucguaucacuauccaaugguguuucaguacuaacuuucaaaguucuagaccuaaaaaacuacauagacaaacaacuacuaccaauacuaaauaaacaaaguuguucuauacccaacauagaaaccgucauagaauuucaacaaaaaaauaauagacuccuagaaauaacaagagaauuuucaguuaacgcagguguaacaaccccaguauccaccuauaugcuaacaaauucagaauuacuuucccuaaucaacgacaugcccauaacaaaugaccaaaaaaaauuaaugucaaacaacguccaaauaguucgucaacaaucauauucaauaaugugcauaauaaaagaagaagucuuagccuacguaguacaacuuccccuuuauggaguuaucgacacacccugcuggaaacuccacacuucaccacuauguacuacaaacacaaaagaaggauccaacaucugccucacaagaaccgaucgaggaugguacugugauaacgccggauccgucucauucuucccacaagcagaaacaugcaaaguacaaucaaacagaguauuuugcgacacaaugaacucccucacauuaccuucugaaguaaaccuauguaauguagacauauucaaccccaaauacgauugcaaaauaaugacaucaaagacagauguaucaucaagugucaucacaucccuaggagcaauugucucauguuaugguaaaacaaaaugcaccgcaucaaauaaaaacagaggcauaauaaaaaccuucucaaacgguugugacuacguauccaauaaaggcgucgacacaguaucaguagguaacacauuauauuguguaaacaaacaagaaggacagucccuauauguaaaaggagaaccaauaaucaacuucuacgacccacuuguuuucccuucugaugaauuugacgcaaguauaucacaaguaaaugaaaaaaucaaucaaucacuagccuuuauaagaaaaucagaugaauuauuacacaacguaaacgccggaaaaucaacaaccaacauaaugauaaccacaauaauaaucgucauaauagucauccuacuaucacucauagcaguuggacuccuacuauacugcaaagcacgaucaacaccaguaacauuauccaaagaccaacuaagugguaucaauaacaucgccuuuucaaacuga

SEQ ID NO: 1644 - RNA, 1608 nt, Artificial Sequence
  derived and/or modified CDS sequence (opt11) from HRSV(A2)__F_DSCav1_mut1
auggaacuccuaauccucaaagccaacgcaaucaccacaauccucacugccgucaccuucugcuucgccuccggccaaaacauaacagaagaauuuuaccaaucaaccuguucagcggucuccaaaggcuaccucggcgcccuccgcaccggcugguacaccuccgugaucaccauagaacucuccaacaucaaggaaaacaaaugcaacggcaccgacgcgaaggucaaacuuauuaaacaagaacucgacaaauacaaaaacgcagucaccgaacuacaacuccuaaugcaguccacgccagccaccggcucuggcucagccauaugcuccgguguggccguaugcaaaguccuacaccucgaaggagaagucaacaaaauaaaauccgcccuacuguccacaaacaaggccguagucucccucucaaacggcgucucaguacucaccuucaaaguccuagaccucaagaacuacaucgacaaacaacuccuacccauacuaaacaaacaauccugcucaauccccaacaucgaaaccguaauagaauuucaacaaaaaaacaacagacuccuggagaucacccgggaauuuuccguaaacgccggagucacaacacccgucucaaccuacaugcuaacgaacucagagcuccucucacuuaucaacgacaugcccauaacaaacgaccaaaaaaaacucauguccaacaacgugcaaaucguccgacaacaauccuacuccaucaugugcaucauuaaagaagaaguccucgcauacguaguccagcucccccucuacggcgucauagacacccccugcuggaaacuacacacaucaccccucugcacaacaaacaccaaagaaggcuccaacaucugccucacccgcaccgaccgaggcugguacugcgauaacgccggcagcgucuccuucuucccccaagcagaaaccugcaagguccaauccaaccgaguuuucugcgacacuaugaacucgcucacccuccccuccgaagucaaccucugcaacgucgacauuuucaaccccaaauacgacugcaaaaucaugaccuccaagaccgacguauccuccuccgucaucaccucccuaggcgccauaguaaguugcuacggcaaaaccaagugcacagcaagcaacaaaaaccgaggaauaaucaaaaccuucuccaacggcugcgacuacguauccaacaagggcgucgacaccguauccguagggaacacccuuuacugcguaaacaaacaagaaggacaaucacucuacguaaaaggcgaacccauaaucaacuucuacgacccccucguauuucccuccgacgaauuugacgcaucaaucucacaggucaacgaaaaaauaaaccaaucgcuagcauucaucagaaaaucagacgaacuccuacacaacgucaacgcaggcaagagcaccaccaacaucaugaucaccaccaucaucaucgucauaaucgucauacuacucucacucauagcagucggccuccuccuauacuguaaagcaaggucgaccccagucacccuauccaaagaccaacuaagcggcaucaacaacaucgcguucucaaacuaa

SEQ ID NO: 1645 - RNA, 1884 nt, Artificial Sequence
  mRNA product Design a-1 comprising derived and/or modified sequence from HRSV(A2)__F_DSCav1_mut1 (opt1)
gggagagucccgcagucggcguccagcggcucugcuuguucgugugugugucguugcaggccuuauucaagcuuaccauggagcugcucauccugaaggccaacgccaucaccaccauccugacggcggugaccuucugcuucgccagcggccagaacaucaccgaggaguucuaccaguccacgugcagcgccgucuccaagggguaccucggcgcccugcggaccggcugguacaccuccgugaucaccaucgagcugagcaacaucaaggagaacaagugcaacgggaccgacgccaaggugaagcucaucaagcaggagcuggacaaguacaagaacgcggucacggagcugcagcuccugaugcaguccaccccggcaaccggcuccggcuccgccaucugcagcggcgucgccgugugcaaggugcugcaccucgagggggaggucaacaagaucaagagcgcccugcuguccaccaacaaggccguggugagccucuccaacggcgucagcgugcugaccuucaaggugcuggaccucaagaacuacaucgacaagcagcugcugcccauccugaacaagcagagcugcuccauccccaacaucgagacggugaucgaguuccagcagaagaacaaccggcuccuggagaucacccgcgaguucagcgugaacgccggggucaccacccccguguccacguacaugcugaccaacagcgagcuccugucccugaucaacgacaugccgaucaccaacgaccagaagaagcucaugagcaacaacgugcagaucguccggcagcaguccuacagcaucaugugcaucaucaaggaggaggugcuggcguacgugguccagcugccccucuacggcgugaucgacacccccugcuggaagcugcacacgagcccccugugcaccaccaacaccaaggagggguccaacaucugccucacgcgcaccgaccggggcugguacugcgacaacgccggcagcgucuccuucuucccgcaggccgagaccugcaaggugcagagcaaccgcguguucugcgacaccaugaacucccugacgcugcccagcgagguaaaccucugcaacgucgacaucuucaaccccaaguacgacugcaagaucaugaccuccaagaccgacgugagcuccagcgugaucaccucccugggggccaucgucagcugcuacggcaagacgaagugcaccgccagcaacaagaaccgggggaucaucaagaccuucuccaacggcugcgacuacgugagcaacaagggcguggacaccguguccgucgggaacacccuguacugcgugaacaagcaggagggccagagccucuacgugaagggggagcccaucaucaacuucuacgacccgcuggucuuccccuccgacgaguucgacgcgagcaucucccaggugaacgagaagaucaaccagagccuggccuucauccgcaaguccgacgagcugcuccacaacgugaacgccggcaagagcacgaccaacaucaugaucaccaccaucaucaucgucaucaucgugauccugcugucccucaucgccguggggcugcugcucuacugcaaggcccggagcacgcccgucacccuguccaaggaccagcugagcggcaucaacaacaucgcguucuccaacugaggacuagucccuguucccagagcccacuuuuuuuucuuuuuuugaaauaaaauagccugucuuucagaucuaaaaaaaaaaaaaaaaaaaaaaaaaaaaaaaaaaaaaaaaaaaaaaaaaaaaaaaaaaaaaaaaugcaucccccccccccccccccccccccccccccccaaaggcucuuuucagagccaccagaauu

SEQ ID NO: 1646 - RNA, 1884 nt, Artificial Sequence
  mRNA product Design a-1 comprising derived and/or modified sequence from HRSV(A2)__F_DSCav1_mut1 (opt1)
gggagagucccgcagucggcguccagcggcucugcuuguucgugugugugucguugcaggccuuauucaagcuuaccauggagcugcucauccugaaggccaacgccaucaccaccauccugacggcggugaccuucugcuucgccagcggccagaacaucaccgaggaguucuaccaguccacgugcagcgccgucuccaagggguaccucggcgcccugcgcaccgggugguacaccagcgugaucaccaucgagcuguccaacaucaaggagaacaagugcaacggcaccgacgccaaggugaagcucaucaagcaggagcuggacaaguacaagaacgcggucacggagcugcagcuccugaugcagagcacccccgccaccggguccggcagcgccaucugcuccggcguggccgugugcaagguccugcaccucgagggggaggugaacaagaucaagagcgcgcugcuguccaccaacaaggccguggucagccucuccaacggcgugagcgugcugacguucaagguccuggaccucaagaacuacaucgacaagcagcugcugccgauccucaacaagcaguccugcagcauccccaacaucgagaccgugaucgaguuccagcagaagaacaaccggcugcuggagaucacccgcgaguucuccgugaacgccggggucaccacgcccgugagcaccuacaugcucaccaacuccgagcugcugagccucaucaacgacaugcccaucaccaacgaccagaagaagcugaugagcaacaacgugcagaucguccggcagcaguccuacagcaucaugugcaucaucaaggaggaggugcuggccuacgugguccagcucccgcuguacggcgugaucgacacgcccugcuggaagcugcacaccagcccccucugcaccaccaacacgaaggagggguccaacaucugccugacccgcaccgaccggggcugguacugcgacaacgccggcuccgugagcuucuucccccaggcggagaccugcaagguccaguccaaccgcguguucugcgacacgaugaacagccugacccucccguccgaggucaaccugugcaacguggacaucuucaaccccaaguacgacugcaagaucaugaccagcaagaccgacguguccagcuccgucaucacgagccugggggccaucguguccugcuacggcaagaccaagugcaccgccagcaacaagaaccgggggaucaucaagaccuucuccaacggcugcgacuacgugagcaacaagggcgucgacacgguguccguggggaacacccucuacugcgucaacaagcaggagggccagagccuguacgugaagggggagcccaucaucaacuucuacgacccccugguguucccgagcgacgaguucgacgccuccaucagccaggucaacgagaagaucaaccagucccucgccuucauccgcaagagcgacgagcugcugcacaacgugaacgcgggcaaguccaccaccaacaucaugaucaccacgaucaucaucgugaucaucgucauccuccugagccugaucgccguggggcuccugcuguacugcaaggcccgguccacccccgugacccugagcaaggaccagcucuccggcaucaacaacaucgccuucagcaacugaggacuagucccuguucccagagcccacuuuuuuuucuuuuuuugaaauaaaauagccugucuuucagaucuaaaaaaaaaaaaaaaaaaaaaaaaaaaaaaaaaaaaaaaaaaaaaaaaaaaaaaaaaaaaaaaaugcaucccccccccccccccccccccccccccccccaaaggcucuuuucagagccaccagaauu

SEQ ID NO: 1647 - RNA, 1884 nt, Artificial Sequence
  mRNA product Design a-1 comprising derived and/or modified sequence from HRSV(A2)__F_DSCav1_mut1 (opt2)
gggagagucccgcagucggcguccagcggcucugcuuguucgugugugugucguugcaggccuuauucaagcuuaccauggagcuccucauccucaaggccaacgccaucaccaccauccucaccgccgucaccuucugcuucgccuccggccagaacaucaccgaggaguucuaccaguccaccugcuccgccgucuccaagggcuaccucggcgcccuccgcaccggcugguacaccuccgucaucaccaucgagcucuccaacaucaaggagaacaagugcaacggcaccgacgccaaggucaagcucaucaagcaggagcucgacaaguacaagaacgccgucaccgagcuccagcuccucaugcaguccacccccgccaccggcuccggcuccgccaucugcuccggcgucgccgucugcaagguccuccaccucgagggcgaggucaacaagaucaaguccgcccuccucuccaccaacaaggccgucgucucccucuccaacggcgucuccguccucaccuucaagguccucgaccucaagaacuacaucgacaagcagcuccuccccauccucaacaagcaguccugcuccauccccaacaucgagaccgucaucgaguuccagcagaagaacaaccgccuccucgagaucacccgcgaguucuccgucaacgccggcgucaccacccccgucuccaccuacaugcucaccaacuccgagcuccucucccucaucaacgacaugcccaucaccaacgaccagaagaagcucauguccaacaacguccagaucguccgccagcaguccuacuccaucaugugcaucaucaaggaggagguccucgccuacgucguccagcucccccucuacggcgucaucgacacccccugcuggaagcuccacaccuccccccucugcaccaccaacaccaaggagggcuccaacaucugccucacccgcaccgaccgcggcugguacugcgacaacgccggcuccgucuccuucuucccccaggccgagaccugcaagguccaguccaaccgcgucuucugcgacaccaugaacucccucacccuccccuccgaggucaaccucugcaacgucgacaucuucaaccccaaguacgacugcaagaucaugaccuccaagaccgacgucuccuccuccgucaucaccucccucggcgccaucgucuccugcuacggcaagaccaagugcaccgccuccaacaagaaccgcggcaucaucaagaccuucuccaacggcugcgacuacgucuccaacaagggcgucgacaccgucuccgucggcaacacccucuacugcgucaacaagcaggagggccagucccucuacgucaagggcgagcccaucaucaacuucuacgacccccucgucuuccccuccgacgaguucgacgccuccaucucccaggucaacgagaagaucaaccagucccucgccuucauccgcaaguccgacgagcuccuccacaacgucaacgccggcaaguccaccaccaacaucaugaucaccaccaucaucaucgucaucaucgucauccuccucucccucaucgccgucggccuccuccucuacugcaaggcccgcuccacccccgucacccucuccaaggaccagcucuccggcaucaacaacaucgccuucuccaacugaggacuagucccuguucccagagcccacuuuuuuuucuuuuuuugaaauaaaauagccugucuuucagaucuaaaaaaaaaaaaaaaaaaaaaaaaaaaaaaaaaaaaaaaaaaaaaaaaaaaaaaaaaaaaaaaaugcaucccccccccccccccccccccccccccccccaaaggcucuuuucagagccaccagaauu

SEQ ID NO: 1648 - RNA, 1884 nt, Artificial Sequence
  mRNA product Design a-1 comprising derived and/or modified sequence from HRSV(A2)__F_DSCav1_mut1 (opt3)
gggagagucccgcagucggcguccagcggcucugcuuguucgugugugugucguugcaggccuuauucaagcuuaccauggagcugcucauccuuaaggccaacgcuauuaccacaauacugacugcagugacguucugcuuugccagcggccagaauaucaccgaagaguucuaccaauccacauguucugcggucucaaaaggguauuugggagcuuuaagaacugguugguacaccaguguuauuacaaucgaacugagcaacauuaaggagaauaaaugcaacggcaccgacgccaaggugaaacuaaucaagcaggaacucgauaaguauaaaaaugcaguaacugagcugcagcuucugaugcaguccacacccgccaccgggucuggaucggcuauauguucaggcguggcagucugcaagguguugcaccucgagggugaaguuaacaaaaucaagagcgcccugcugaguacgaauaaagcuguggucucccucucuaacggggugagcguauuaacuuuuaagguucuggaccuuaagaauuacauugauaaacaauugcugccuauccuaaacaagcaguccuguucaauuccaaauaucgagaccgugauagaguuccagcagaaaaacaauaggcuccuggaaauuacacgggaguuuagugucaacgccggagugacuaccccggugagcacauauaugcuuaccaauucugaacuguugucccucaucaacgacaugcccauuacgaacgaucaaaagaaacugaugucaaauaacguccagaucguucgccagcagagcuacaguaucaugugcauuauaaaggaggaaguguuagcguauguagugcaacugccucucuacggcgucaucgacacuccauguuggaaacuucauacaucuccccugugcaccacuaauacaaaggagggcuccaacauuuguuugacccgaacggaucgugggugguacugcgacaaugcaggaagcgugucguucuuuccucaggccgaaaccuguaagguucagucuaacagaguguucugcgauacaaugaacucccuaacucugccaucagaggucaaucucugcaauguggacaucuuuaaccccaaauaugauuguaagauaaugaccaguaaaacagacguaagcuccucuguuauuacuagccugggugcuaucgugucaugcuacggcaagaccaaauguacagccaguaauaagaacagggggaucauuaagaccuucuccaauggaugcgauuaugucagcaacaaaggcguggacacugucucuguggguaauacgcuuuacuguguuaacaagcaagaggggcagucacuguaugugaaaggagaaccuaucauuaacuuuuacgacccauugguauucccgagugaugaguuugacgcaagcauaucccaggucaaugaaaagaucaaccagucucucgcuuucauucggaaaucggaugagcuguuacacaaugugaacgccggcaagagcacaaccaauaucaugaucacuaccauuauaaucguuauuaucgugauucugcuaucccucaucgcggucggccugcuuuuguauugcaaggcccgcucaacacccgugacccugaguaaagaccaacucucugggauaaacaauaucgcauucagcaacugaggacuagucccuguucccagagcccacuuuuuuuucuuuuuuugaaauaaaauagccugucuuucagaucuaaaaaaaaaaaaaaaaaaaaaaaaaaaaaaaaaaaaaaaaaaaaaaaaaaaaaaaaaaaaaaaaugcaucccccccccccccccccccccccccccccccaaaggcucuuuucagagccaccagaauu

SEQ ID NO: 1649 - RNA, 1884 nt, Artificial Sequence
  mRNA product Design a-1 comprising derived and/or modified sequence from HRSV(A2)__F_DSCav1_mut1 (opt4)
gggagagucccgcagucggcguccagcggcucugcuuguucgugugugugucguugcaggccuuauucaagcuuaccauggagcugcugauccugaaggccaacgccaucaccaccauccugaccgccgugaccuucugcuucgccagcggccagaacaucaccgaggaguucuaccagagcaccugcagcgccgugagcaagggcuaccugggcgcccugagaaccggcugguacaccagcgugaucaccaucgagcugagcaacaucaaggagaacaagugcaacggcaccgacgccaaggugaagcugaucaagcaggagcuggacaaguacaagaacgccgugaccgagcugcagcugcugaugcagagcacccccgccaccggcagcggcagcgccaucugcagcggcguggccgugugcaaggugcugcaccuggagggcgaggugaacaagaucaagagcgcccugcugagcaccaacaaggccguggugagccugagcaacggcgugagcgugcugaccuucaaggugcuggaccugaagaacuacaucgacaagcagcugcugcccauccugaacaagcagagcugcagcauccccaacaucgagaccgugaucgaguuccagcagaagaacaacagacugcuggagaucaccagagaguucagcgugaacgccggcgugaccacccccgugagcaccuacaugcugaccaacagcgagcugcugagccugaucaacgacaugcccaucaccaacgaccagaagaagcugaugagcaacaacgugcagaucgugagacagcagagcuacagcaucaugugcaucaucaaggaggaggugcuggccuacguggugcagcugccccuguacggcgugaucgacacccccugcuggaagcugcacaccagcccccugugcaccaccaacaccaaggagggcagcaacaucugccugaccagaaccgacagaggcugguacugcgacaacgccggcagcgugagcuucuucccccaggccgagaccugcaaggugcagagcaacagaguguucugcgacaccaugaacagccugacccugcccagcgaggugaaccugugcaacguggacaucuucaaccccaaguacgacugcaagaucaugaccagcaagaccgacgugagcagcagcgugaucaccagccugggcgccaucgugagcugcuacggcaagaccaagugcaccgccagcaacaagaacagaggcaucaucaagaccuucagcaacggcugcgacuacgugagcaacaagggcguggacaccgugagcgugggcaacacccuguacugcgugaacaagcaggagggccagagccuguacgugaagggcgagcccaucaucaacuucuacgacccccugguguuccccagcgacgaguucgacgccagcaucagccaggugaacgagaagaucaaccagagccuggccuucaucagaaagagcgacgagcugcugcacaacgugaacgccggcaagagcaccaccaacaucaugaucaccaccaucaucaucgugaucaucgugauccugcugagccugaucgccgugggccugcugcuguacugcaaggccagaagcacccccgugacccugagcaaggaccagcugagcggcaucaacaacaucgccuucagcaacugaggacuagucccuguucccagagcccacuuuuuuuucuuuuuuugaaauaaaauagccugucuuucagaucuaaaaaaaaaaaaaaaaaaaaaaaaaaaaaaaaaaaaaaaaaaaaaaaaaaaaaaaaaaaaaaaaugcaucccccccccccccccccccccccccccccccaaaggcucuuuucagagccaccagaauu

SEQ ID NO: 1650 - RNA, 1884 nt, Artificial Sequence
  mRNA product Design a-1 comprising derived and/or modified sequence from HRSV(A2)__F_DSCav1_mut1 (opt5)
gggagagucccgcagucggcguccagcggcucugcuuguucgugugugugucguugcaggccuuauucaagcuuaccauggagcugcucauccugaaggccaacgcuauuaccacaauccuuacggccgugaccuucugcuuugcgagcggccagaauauuacagaagaguucuaccaauccaccuguucugcugucagcaaaggguaucugggagcccucagaacaggcugguacaccuccguuaucacaauugaacugucuaacaucaaggagaauaaaugcaacgggaccgacgccaaggugaaacuuaucaagcaggaacuggauaaguauaaaaaugcugugacggagcuccagcugcugaugcagagcacccccgccacaggauccggcucugcuauuuguagcggggucgccgugugcaagguucuccaccuggagggagaagugaacaaaaucaaguccgcgcuucugagcaccaauaaagccgucgugucucucuccaacggcguuagcgugcugacauuuaagguccuugaccugaagaauuacauugauaaacaacuccugccuauccugaacaagcagucuuguuccauuccgaauaucgagaccgugauugaguuccagcagaaaaacaaucggcuccuggaaaucacgcgcgaguuuagcgugaacgcuggcgucacaacccccguuucuacauauaugcuuaccaauuccgaacugcucagccugaucaacgacaugccuauuaccaacgaucaaaagaaacuuauguccaauaacgugcagaucgugagacagcagucuuacagcauuaugugcaucauuaaggaggaaguccuggccuaugugguucaacucccccuguacggggugaucgacacaccuuguuggaaacugcauacgagcccccucugcaccacaaauaccaaggagggauccaacaucugucugacacggaccgaucgcggcugguacugcgacaaugcugggucugucuccuucuuuccucaggccgaaacguguaaggugcagagcaacagaguuuucugcgauacaaugaacucucuuacccugccgagcgaggugaaucucugcaaugucgacauuuuuaaccccaaauaugauuguaagaucaugaccuccaaaacagacgugucuagcuccgucauuaccagccugggagcgaucgugucuugcuacggcaagacaaaauguacggccuccaauaagaaccgggggauuaucaagaccuucagcaauggaugcgauuauguuucuaacaaaggcguggacacagucuccgugggcaauacccuuuacuguguuaacaagcaagaggggcagagccuguaugugaaaggagaaccuaucauuaacuuuuacgacccccucgucuucccuuccgaugaguuugacgcuucuaucagccaggugaaugaaaagauuaaccagucccuggccuucauccgcaaaucugaugagcugcuccacaaugugaacgcuggcaagagcacaaccaauauuaugaucacgaccauuaucaucguuauuaucgucauucugcuuucccugaucgccguggggcuccugcuguauugcaaggccagaagcacacccgugacccuuucuaaagaccaacucuccggaauuaacaauaucgcuuucagcaacugaggacuagucccuguucccagagcccacuuuuuuuucuuuuuuugaaauaaaauagccugucuuucagaucuaaaaaaaaaaaaaaaaaaaaaaaaaaaaaaaaaaaaaaaaaaaaaaaaaaaaaaaaaaaaaaaaugcaucccccccccccccccccccccccccccccccaaaggcucuuuucagagccaccagaauu

SEQ ID NO: 1651 - RNA, 1884 nt, Artificial Sequence
  mRNA product Design a-1 comprising derived and/or modified sequence from HRSV(A2)__F_DSCav1_mut1 (opt6)
gggagagucccgcagucggcguccagcggcucugcuuguucgugugugugucguugcaggccuuauucaagcuuaccauggaacuauuaauacuaaaagcaaacgcuauaacaacaauacuaacagcagucacauucugcuuugcaucaggccaaaacaucacagaagaauuuuaccaaucaacaugcuccgccguaucgaaaggauaccuaggcgcauuaagaaccggaugguauacaucagucauaacaauugaacuaucuaacauaaaagaaaacaaauguaacggcacagaugccaaaguaaaacucaucaaacaagaauuagauaaauacaaaaacgcagucacugaacuacaacucuuaaugcaaucaacaccugcaacaggaucaggaucagcaauaugcucaggaguagccguauguaaaguacuacaccuagaaggagaagucaacaaaauaaaaucagcccuccuaaguacaaacaaagcugucguaucacuauccaaugguguuucaguacuaacuuucaaaguucuagaccuaaaaaacuacauagacaaacaacuacuaccaauacuaaauaaacaaaguuguucuauacccaacauagaaaccgucauagaauuucaacaaaaaaauaauagacuccuagaaauaacaagagaauuuucaguuaacgcagguguaacaaccccaguauccaccuauaugcuaacaaauucagaauuacuuucccuaaucaacgacaugcccauaacaaaugaccaaaaaaaauuaaugucaaacaacguccaaauaguucgucaacaaucauauucaauaaugugcauaauaaaagaagaagucuuagccuacguaguacaacuuccccuuuauggaguuaucgacacacccugcuggaaacuccacacuucaccacuauguacuacaaacacaaaagaaggauccaacaucugccucacaagaaccgaucgaggaugguacugugauaacgccggauccgucucauucuucccacaagcagaaacaugcaaaguacaaucaaacagaguauuuugcgacacaaugaacucccucacauuaccuucugaaguaaaccuauguaauguagacauauucaaccccaaauacgauugcaaaauaaugacaucaaagacagauguaucaucaagugucaucacaucccuaggagcaauugucucauguuaugguaaaacaaaaugcaccgcaucaaauaaaaacagaggcauaauaaaaaccuucucaaacgguugugacuacguauccaauaaaggcgucgacacaguaucaguagguaacacauuauauuguguaaacaaacaagaaggacagucccuauauguaaaaggagaaccaauaaucaacuucuacgacccacuuguuuucccuucugaugaauuugacgcaaguauaucacaaguaaaugaaaaaaucaaucaaucacuagccuuuauaagaaaaucagaugaauuauuacacaacguaaacgccggaaaaucaacaaccaacauaaugauaaccacaauaauaaucgucauaauagucauccuacuaucacucauagcaguuggacuccuacuauacugcaaagcacgaucaacaccaguaacauuauccaaagaccaacuaagugguaucaauaacaucgccuuuucaaacugaggacuagucccuguucccagagcccacuuuuuuuucuuuuuuugaaauaaaauagccugucuuucagaucuaaaaaaaaaaaaaaaaaaaaaaaaaaaaaaaaaaaaaaaaaaaaaaaaaaaaaaaaaaaaaaaaugcaucccccccccccccccccccccccccccccccaaaggcucuuuucagagccaccagaauu

SEQ ID NO: 1652 - RNA, 1884 nt, Artificial Sequence
  mRNA product Design a-1 comprising derived and/or modified sequence from HRSV(A2)__F_DSCav1_mut1 (opt11)
gggagagucccgcagucggcguccagcggcucugcuuguucgugugugugucguugcaggccuuauucaagcuuaccauggaacuccuaauccucaaagccaacgcaaucaccacaauccucacugccgucaccuucugcuucgccuccggccaaaacauaacagaagaauuuuaccaaucaaccuguucagcggucuccaaaggcuaccucggcgcccuccgcaccggcugguacaccuccgugaucaccauagaacucuccaacaucaaggaaaacaaaugcaacggcaccgacgcgaaggucaaacuuauuaaacaagaacucgacaaauacaaaaacgcagucaccgaacuacaacuccuaaugcaguccacgccagccaccggcucuggcucagccauaugcuccgguguggccguaugcaaaguccuacaccucgaaggagaagucaacaaaauaaaauccgcccuacuguccacaaacaaggccguagucucccucucaaacggcgucucaguacucaccuucaaaguccuagaccucaagaacuacaucgacaaacaacuccuacccauacuaaacaaacaauccugcucaauccccaacaucgaaaccguaauagaauuucaacaaaaaaacaacagacuccuggagaucacccgggaauuuuccguaaacgccggagucacaacacccgucucaaccuacaugcuaacgaacucagagcuccucucacuuaucaacgacaugcccauaacaaacgaccaaaaaaaacucauguccaacaacgugcaaaucguccgacaacaauccuacuccaucaugugcaucauuaaagaagaaguccucgcauacguaguccagcucccccucuacggcgucauagacacccccugcuggaaacuacacacaucaccccucugcacaacaaacaccaaagaaggcuccaacaucugccucacccgcaccgaccgaggcugguacugcgauaacgccggcagcgucuccuucuucccccaagcagaaaccugcaagguccaauccaaccgaguuuucugcgacacuaugaacucgcucacccuccccuccgaagucaaccucugcaacgucgacauuuucaaccccaaauacgacugcaaaaucaugaccuccaagaccgacguauccuccuccgucaucaccucccuaggcgccauaguaaguugcuacggcaaaaccaagugcacagcaagcaacaaaaaccgaggaauaaucaaaaccuucuccaacggcugcgacuacguauccaacaagggcgucgacaccguauccguagggaacacccuuuacugcguaaacaaacaagaaggacaaucacucuacguaaaaggcgaacccauaaucaacuucuacgacccccucguauuucccuccgacgaauuugacgcaucaaucucacaggucaacgaaaaaauaaaccaaucgcuagcauucaucagaaaaucagacgaacuccuacacaacgucaacgcaggcaagagcaccaccaacaucaugaucaccaccaucaucaucgucauaaucgucauacuacucucacucauagcagucggccuccuccuauacuguaaagcaaggucgaccccagucacccuauccaaagaccaacuaagcggcaucaacaacaucgcguucucaaacuaaggacuagucccuguucccagagcccacuuuuuuuucuuuuuuugaaauaaaauagccugucuuucagaucuaaaaaaaaaaaaaaaaaaaaaaaaaaaaaaaaaaaaaaaaaaaaaaaaaaaaaaaaaaaaaaaaugcaucccccccccccccccccccccccccccccccaaaggcucuuuucagagccaccagaauu

SEQ ID NO: 1653 - RNA, 1903 nt, Artificial Sequence
  mRNA product Design a-2 comprising derived and/or modified sequence from HRSV(A2)__F_DSCav1_mut1 (opt1)
gggagaguccgcucagccagguugcagaagcggcuuagcguguguccuaaucuucucucugcguguagguaggccugugccgcaaacaagcuuaccauggagcugcucauccugaaggccaacgccaucaccaccauccugacggcggugaccuucugcuucgccagcggccagaacaucaccgaggaguucuaccaguccacgugcagcgccgucuccaagggguaccucggcgcccugcggaccggcugguacaccuccgugaucaccaucgagcugagcaacaucaaggagaacaagugcaacgggaccgacgccaaggugaagcucaucaagcaggagcuggacaaguacaagaacgcggucacggagcugcagcuccugaugcaguccaccccggcaaccggcuccggcuccgccaucugcagcggcgucgccgugugcaaggugcugcaccucgagggggaggucaacaagaucaagagcgcccugcuguccaccaacaaggccguggugagccucuccaacggcgucagcgugcugaccuucaaggugcuggaccucaagaacuacaucgacaagcagcugcugcccauccugaacaagcagagcugcuccauccccaacaucgagacggugaucgaguuccagcagaagaacaaccggcuccuggagaucacccgcgaguucagcgugaacgccggggucaccacccccguguccacguacaugcugaccaacagcgagcuccugucccugaucaacgacaugccgaucaccaacgaccagaagaagcucaugagcaacaacgugcagaucguccggcagcaguccuacagcaucaugugcaucaucaaggaggaggugcuggcguacgugguccagcugccccucuacggcgugaucgacacccccugcuggaagcugcacacgagcccccugugcaccaccaacaccaaggagggguccaacaucugccucacgcgcaccgaccggggcugguacugcgacaacgccggcagcgucuccuucuucccgcaggccgagaccugcaaggugcagagcaaccgcguguucugcgacaccaugaacucccugacgcugcccagcgagguaaaccucugcaacgucgacaucuucaaccccaaguacgacugcaagaucaugaccuccaagaccgacgugagcuccagcgugaucaccucccugggggccaucgucagcugcuacggcaagacgaagugcaccgccagcaacaagaaccgggggaucaucaagaccuucuccaacggcugcgacuacgugagcaacaagggcguggacaccguguccgucgggaacacccuguacugcgugaacaagcaggagggccagagccucuacgugaagggggagcccaucaucaacuucuacgacccgcuggucuuccccuccgacgaguucgacgcgagcaucucccaggugaacgagaagaucaaccagagccuggccuucauccgcaaguccgacgagcugcuccacaacgugaacgccggcaagagcacgaccaacaucaugaucaccaccaucaucaucgucaucaucgugauccugcugucccucaucgccguggggcugcugcucuacugcaaggcccggagcacgcccgucacccuguccaaggaccagcugagcggcaucaacaacaucgcguucuccaacugaggacuagucccuguucccagagcccacuuuuuuuucuuuuuuugaaauaaaauagccugucuuucagaucuaaaaaaaaaaaaaaaaaaaaaaaaaaaaaaaaaaaaaaaaaaaaaaaaaaaaaaaaaaaaaaaaugcaucccccccccccccccccccccccccccccccaaaggcucuuuucagagccaccagaauu

SEQ ID NO: 1654 - RNA, 1903 nt, Artificial Sequence
  mRNA product Design a-2 comprising derived and/or modified sequence from HRSV(A2)__F_DSCav1_mut1 (opt1)
gggagaguccgcucagccagguugcagaagcggcuuagcguguguccuaaucuucucucugcguguagguaggccugugccgcaaacaagcuuaccauggagcugcucauccugaaggccaacgccaucaccaccauccugacggcggugaccuucugcuucgccagcggccagaacaucaccgaggaguucuaccaguccacgugcagcgccgucuccaagggguaccucggcgcccugcgcaccgggugguacaccagcgugaucaccaucgagcuguccaacaucaaggagaacaagugcaacggcaccgacgccaaggugaagcucaucaagcaggagcuggacaaguacaagaacgcggucacggagcugcagcuccugaugcagagcacccccgccaccggguccggcagcgccaucugcuccggcguggccgugugcaagguccugcaccucgagggggaggugaacaagaucaagagcgcgcugcuguccaccaacaaggccguggucagccucuccaacggcgugagcgugcugacguucaagguccuggaccucaagaacuacaucgacaagcagcugcugccgauccucaacaagcaguccugcagcauccccaacaucgagaccgugaucgaguuccagcagaagaacaaccggcugcuggagaucacccgcgaguucuccgugaacgccggggucaccacgcccgugagcaccuacaugcucaccaacuccgagcugcugagccucaucaacgacaugcccaucaccaacgaccagaagaagcugaugagcaacaacgugcagaucguccggcagcaguccuacagcaucaugugcaucaucaaggaggaggugcuggccuacgugguccagcucccgcuguacggcgugaucgacacgcccugcuggaagcugcacaccagcccccucugcaccaccaacacgaaggagggguccaacaucugccugacccgcaccgaccggggcugguacugcgacaacgccggcuccgugagcuucuucccccaggcggagaccugcaagguccaguccaaccgcguguucugcgacacgaugaacagccugacccucccguccgaggucaaccugugcaacguggacaucuucaaccccaaguacgacugcaagaucaugaccagcaagaccgacguguccagcuccgucaucacgagccugggggccaucguguccugcuacggcaagaccaagugcaccgccagcaacaagaaccgggggaucaucaagaccuucuccaacggcugcgacuacgugagcaacaagggcgucgacacgguguccguggggaacacccucuacugcgucaacaagcaggagggccagagccuguacgugaagggggagcccaucaucaacuucuacgacccccugguguucccgagcgacgaguucgacgccuccaucagccaggucaacgagaagaucaaccagucccucgccuucauccgcaagagcgacgagcugcugcacaacgugaacgcgggcaaguccaccaccaacaucaugaucaccacgaucaucaucgugaucaucgucauccuccugagccugaucgccguggggcuccugcuguacugcaaggcccgguccacccccgugacccugagcaaggaccagcucuccggcaucaacaacaucgccuucagcaacugaggacuagucccuguucccagagcccacuuuuuuuucuuuuuuugaaauaaaauagccugucuuucagaucuaaaaaaaaaaaaaaaaaaaaaaaaaaaaaaaaaaaaaaaaaaaaaaaaaaaaaaaaaaaaaaaaugcaucccccccccccccccccccccccccccccccaaaggcucuuuucagagccaccagaauu

SEQ ID NO: 1655 - RNA, 1903 nt, Artificial Sequence
  mRNA product Design a-2 comprising derived and/or modified sequence from HRSV(A2)__F_DSCav1_mut1 (opt2)
gggagaguccgcucagccagguugcagaagcggcuuagcguguguccuaaucuucucucugcguguagguaggccugugccgcaaacaagcuuaccauggagcuccucauccucaaggccaacgccaucaccaccauccucaccgccgucaccuucugcuucgccuccggccagaacaucaccgaggaguucuaccaguccaccugcuccgccgucuccaagggcuaccucggcgcccuccgcaccggcugguacaccuccgucaucaccaucgagcucuccaacaucaaggagaacaagugcaacggcaccgacgccaaggucaagcucaucaagcaggagcucgacaaguacaagaacgccgucaccgagcuccagcuccucaugcaguccacccccgccaccggcuccggcuccgccaucugcuccggcgucgccgucugcaagguccuccaccucgagggcgaggucaacaagaucaaguccgcccuccucuccaccaacaaggccgucgucucccucuccaacggcgucuccguccucaccuucaagguccucgaccucaagaacuacaucgacaagcagcuccuccccauccucaacaagcaguccugcuccauccccaacaucgagaccgucaucgaguuccagcagaagaacaaccgccuccucgagaucacccgcgaguucuccgucaacgccggcgucaccacccccgucuccaccuacaugcucaccaacuccgagcuccucucccucaucaacgacaugcccaucaccaacgaccagaagaagcucauguccaacaacguccagaucguccgccagcaguccuacuccaucaugugcaucaucaaggaggagguccucgccuacgucguccagcucccccucuacggcgucaucgacacccccugcuggaagcuccacaccuccccccucugcaccaccaacaccaaggagggcuccaacaucugccucacccgcaccgaccgcggcugguacugcgacaacgccggcuccgucuccuucuucccccaggccgagaccugcaagguccaguccaaccgcgucuucugcgacaccaugaacucccucacccuccccuccgaggucaaccucugcaacgucgacaucuucaaccccaaguacgacugcaagaucaugaccuccaagaccgacgucuccuccuccgucaucaccucccucggcgccaucgucuccugcuacggcaagaccaagugcaccgccuccaacaagaaccgcggcaucaucaagaccuucuccaacggcugcgacuacgucuccaacaagggcgucgacaccgucuccgucggcaacacccucuacugcgucaacaagcaggagggccagucccucuacgucaagggcgagcccaucaucaacuucuacgacccccucgucuuccccuccgacgaguucgacgccuccaucucccaggucaacgagaagaucaaccagucccucgccuucauccgcaaguccgacgagcuccuccacaacgucaacgccggcaaguccaccaccaacaucaugaucaccaccaucaucaucgucaucaucgucauccuccucucccucaucgccgucggccuccuccucuacugcaaggcccgcuccacccccgucacccucuccaaggaccagcucuccggcaucaacaacaucgccuucuccaacugaggacuagucccuguucccagagcccacuuuuuuuucuuuuuuugaaauaaaauagccugucuuucagaucuaaaaaaaaaaaaaaaaaaaaaaaaaaaaaaaaaaaaaaaaaaaaaaaaaaaaaaaaaaaaaaaaugcaucccccccccccccccccccccccccccccccaaaggcucuuuucagagccaccagaauu

SEQ ID NO: 1656 - RNA, 1903 nt, Artificial Sequence
  mRNA product Design a-2 comprising derived and/or modified sequence from HRSV(A2)__F_DSCav1_mut1 (opt3)
gggagaguccgcucagccagguugcagaagcggcuuagcguguguccuaaucuucucucugcguguagguaggccugugccgcaaacaagcuuaccauggagcugcucauccuuaaggccaacgcuauuaccacaauacugacugcagugacguucugcuuugccagcggccagaauaucaccgaagaguucuaccaauccacauguucugcggucucaaaaggguauuugggagcuuuaagaacugguugguacaccaguguuauuacaaucgaacugagcaacauuaaggagaauaaaugcaacggcaccgacgccaaggugaaacuaaucaagcaggaacucgauaaguauaaaaaugcaguaacugagcugcagcuucugaugcaguccacacccgccaccgggucuggaucggcuauauguucaggcguggcagucugcaagguguugcaccucgagggugaaguuaacaaaaucaagagcgcccugcugaguacgaauaaagcuguggucucccucucuaacggggugagcguauuaacuuuuaagguucuggaccuuaagaauuacauugauaaacaauugcugccuauccuaaacaagcaguccuguucaauuccaaauaucgagaccgugauagaguuccagcagaaaaacaauaggcuccuggaaauuacacgggaguuuagugucaacgccggagugacuaccccggugagcacauauaugcuuaccaauucugaacuguugucccucaucaacgacaugcccauuacgaacgaucaaaagaaacugaugucaaauaacguccagaucguucgccagcagagcuacaguaucaugugcauuauaaaggaggaaguguuagcguauguagugcaacugccucucuacggcgucaucgacacuccauguuggaaacuucauacaucuccccugugcaccacuaauacaaaggagggcuccaacauuuguuugacccgaacggaucgugggugguacugcgacaaugcaggaagcgugucguucuuuccucaggccgaaaccuguaagguucagucuaacagaguguucugcgauacaaugaacucccuaacucugccaucagaggucaaucucugcaauguggacaucuuuaaccccaaauaugauuguaagauaaugaccaguaaaacagacguaagcuccucuguuauuacuagccugggugcuaucgugucaugcuacggcaagaccaaauguacagccaguaauaagaacagggggaucauuaagaccuucuccaauggaugcgauuaugucagcaacaaaggcguggacacugucucuguggguaauacgcuuuacuguguuaacaagcaagaggggcagucacuguaugugaaaggagaaccuaucauuaacuuuuacgacccauugguauucccgagugaugaguuugacgcaagcauaucccaggucaaugaaaagaucaaccagucucucgcuuucauucggaaaucggaugagcuguuacacaaugugaacgccggcaagagcacaaccaauaucaugaucacuaccauuauaaucguuauuaucgugauucugcuaucccucaucgcggucggccugcuuuuguauugcaaggcccgcucaacacccgugacccugaguaaagaccaacucucugggauaaacaauaucgcauucagcaacugaggacuagucccuguucccagagcccacuuuuuuuucuuuuuuugaaauaaaauagccugucuuucagaucuaaaaaaaaaaaaaaaaaaaaaaaaaaaaaaaaaaaaaaaaaaaaaaaaaaaaaaaaaaaaaaaaugcaucccccccccccccccccccccccccccccccaaaggcucuuuucagagccaccagaauu

SEQ ID NO: 1657 - RNA, 1903 nt, Artificial Sequence
  mRNA product Design a-2 comprising derived and/or modified sequence from HRSV(A2)__F_DSCav1_mut1 (opt4)
gggagaguccgcucagccagguugcagaagcggcuuagcguguguccuaaucuucucucugcguguagguaggccugugccgcaaacaagcuuaccauggagcugcugauccugaaggccaacgccaucaccaccauccugaccgccgugaccuucugcuucgccagcggccagaacaucaccgaggaguucuaccagagcaccugcagcgccgugagcaagggcuaccugggcgcccugagaaccggcugguacaccagcgugaucaccaucgagcugagcaacaucaaggagaacaagugcaacggcaccgacgccaaggugaagcugaucaagcaggagcuggacaaguacaagaacgccgugaccgagcugcagcugcugaugcagagcacccccgccaccggcagcggcagcgccaucugcagcggcguggccgugugcaaggugcugcaccuggagggcgaggugaacaagaucaagagcgcccugcugagcaccaacaaggccguggugagccugagcaacggcgugagcgugcugaccuucaaggugcuggaccugaagaacuacaucgacaagcagcugcugcccauccugaacaagcagagcugcagcauccccaacaucgagaccgugaucgaguuccagcagaagaacaacagacugcuggagaucaccagagaguucagcgugaacgccggcgugaccacccccgugagcaccuacaugcugaccaacagcgagcugcugagccugaucaacgacaugcccaucaccaacgaccagaagaagcugaugagcaacaacgugcagaucgugagacagcagagcuacagcaucaugugcaucaucaaggaggaggugcuggccuacguggugcagcugccccuguacggcgugaucgacacccccugcuggaagcugcacaccagcccccugugcaccaccaacaccaaggagggcagcaacaucugccugaccagaaccgacagaggcugguacugcgacaacgccggcagcgugagcuucuucccccaggccgagaccugcaaggugcagagcaacagaguguucugcgacaccaugaacagccugacccugcccagcgaggugaaccugugcaacguggacaucuucaaccccaaguacgacugcaagaucaugaccagcaagaccgacgugagcagcagcgugaucaccagccugggcgccaucgugagcugcuacggcaagaccaagugcaccgccagcaacaagaacagaggcaucaucaagaccuucagcaacggcugcgacuacgugagcaacaagggcguggacaccgugagcgugggcaacacccuguacugcgugaacaagcaggagggccagagccuguacgugaagggcgagcccaucaucaacuucuacgacccccugguguuccccagcgacgaguucgacgccagcaucagccaggugaacgagaagaucaaccagagccuggccuucaucagaaagagcgacgagcugcugcacaacgugaacgccggcaagagcaccaccaacaucaugaucaccaccaucaucaucgugaucaucgugauccugcugagccugaucgccgugggccugcugcuguacugcaaggccagaagcacccccgugacccugagcaaggaccagcugagcggcaucaacaacaucgccuucagcaacugaggacuagucccuguucccagagcccacuuuuuuuucuuuuuuugaaauaaaauagccugucuuucagaucuaaaaaaaaaaaaaaaaaaaaaaaaaaaaaaaaaaaaaaaaaaaaaaaaaaaaaaaaaaaaaaaaugcaucccccccccccccccccccccccccccccccaaaggcucuuuucagagccaccagaauu

SEQ ID NO: 1658 - RNA, 1903 nt, Artificial Sequence
  mRNA product Design a-2 comprising derived and/or modified sequence from HRSV(A2)__F_DSCav1_mut1 (opt5)
gggagaguccgcucagccagguugcagaagcggcuuagcguguguccuaaucuucucucugcguguagguaggccugugccgcaaacaagcuuaccauggagcugcucauccugaaggccaacgcuauuaccacaauccuuacggccgugaccuucugcuuugcgagcggccagaauauuacagaagaguucuaccaauccaccuguucugcugucagcaaaggguaucugggagcccucagaacaggcugguacaccuccguuaucacaauugaacugucuaacaucaaggagaauaaaugcaacgggaccgacgccaaggugaaacuuaucaagcaggaacuggauaaguauaaaaaugcugugacggagcuccagcugcugaugcagagcacccccgccacaggauccggcucugcuauuuguagcggggucgccgugugcaagguucuccaccuggagggagaagugaacaaaaucaaguccgcgcuucugagcaccaauaaagccgucgugucucucuccaacggcguuagcgugcugacauuuaagguccuugaccugaagaauuacauugauaaacaacuccugccuauccugaacaagcagucuuguuccauuccgaauaucgagaccgugauugaguuccagcagaaaaacaaucggcuccuggaaaucacgcgcgaguuuagcgugaacgcuggcgucacaacccccguuucuacauauaugcuuaccaauuccgaacugcucagccugaucaacgacaugccuauuaccaacgaucaaaagaaacuuauguccaauaacgugcagaucgugagacagcagucuuacagcauuaugugcaucauuaaggaggaaguccuggccuaugugguucaacucccccuguacggggugaucgacacaccuuguuggaaacugcauacgagcccccucugcaccacaaauaccaaggagggauccaacaucugucugacacggaccgaucgcggcugguacugcgacaaugcugggucugucuccuucuuuccucaggccgaaacguguaaggugcagagcaacagaguuuucugcgauacaaugaacucucuuacccugccgagcgaggugaaucucugcaaugucgacauuuuuaaccccaaauaugauuguaagaucaugaccuccaaaacagacgugucuagcuccgucauuaccagccugggagcgaucgugucuugcuacggcaagacaaaauguacggccuccaauaagaaccgggggauuaucaagaccuucagcaauggaugcgauuauguuucuaacaaaggcguggacacagucuccgugggcaauacccuuuacuguguuaacaagcaagaggggcagagccuguaugugaaaggagaaccuaucauuaacuuuuacgacccccucgucuucccuuccgaugaguuugacgcuucuaucagccaggugaaugaaaagauuaaccagucccuggccuucauccgcaaaucugaugagcugcuccacaaugugaacgcuggcaagagcacaaccaauauuaugaucacgaccauuaucaucguuauuaucgucauucugcuuucccugaucgccguggggcuccugcuguauugcaaggccagaagcacacccgugacccuuucuaaagaccaacucuccggaauuaacaauaucgcuuucagcaacugaggacuagucccuguucccagagcccacuuuuuuuucuuuuuuugaaauaaaauagccugucuuucagaucuaaaaaaaaaaaaaaaaaaaaaaaaaaaaaaaaaaaaaaaaaaaaaaaaaaaaaaaaaaaaaaaaugcaucccccccccccccccccccccccccccccccaaaggcucuuuucagagccaccagaauu

SEQ ID NO: 1659 - RNA, 1903 nt, Artificial Sequence
  mRNA product Design a-2 comprising derived and/or modified sequence from HRSV(A2)__F_DSCav1_mut1 (opt6)
gggagaguccgcucagccagguugcagaagcggcuuagcguguguccuaaucuucucucugcguguagguaggccugugccgcaaacaagcuuaccauggaacuauuaauacuaaaagcaaacgcuauaacaacaauacuaacagcagucacauucugcuuugcaucaggccaaaacaucacagaagaauuuuaccaaucaacaugcuccgccguaucgaaaggauaccuaggcgcauuaagaaccggaugguauacaucagucauaacaauugaacuaucuaacauaaaagaaaacaaauguaacggcacagaugccaaaguaaaacucaucaaacaagaauuagauaaauacaaaaacgcagucacugaacuacaacucuuaaugcaaucaacaccugcaacaggaucaggaucagcaauaugcucaggaguagccguauguaaaguacuacaccuagaaggagaagucaacaaaauaaaaucagcccuccuaaguacaaacaaagcugucguaucacuauccaaugguguuucaguacuaacuuucaaaguucuagaccuaaaaaacuacauagacaaacaacuacuaccaauacuaaauaaacaaaguuguucuauacccaacauagaaaccgucauagaauuucaacaaaaaaauaauagacuccuagaaauaacaagagaauuuucaguuaacgcagguguaacaaccccaguauccaccuauaugcuaacaaauucagaauuacuuucccuaaucaacgacaugcccauaacaaaugaccaaaaaaaauuaaugucaaacaacguccaaauaguucgucaacaaucauauucaauaaugugcauaauaaaagaagaagucuuagccuacguaguacaacuuccccuuuauggaguuaucgacacacccugcuggaaacuccacacuucaccacuauguacuacaaacacaaaagaaggauccaacaucugccucacaagaaccgaucgaggaugguacugugauaacgccggauccgucucauucuucccacaagcagaaacaugcaaaguacaaucaaacagaguauuuugcgacacaaugaacucccucacauuaccuucugaaguaaaccuauguaauguagacauauucaaccccaaauacgauugcaaaauaaugacaucaaagacagauguaucaucaagugucaucacaucccuaggagcaauugucucauguuaugguaaaacaaaaugcaccgcaucaaauaaaaacagaggcauaauaaaaaccuucucaaacgguugugacuacguauccaauaaaggcgucgacacaguaucaguagguaacacauuauauuguguaaacaaacaagaaggacagucccuauauguaaaaggagaaccaauaaucaacuucuacgacccacuuguuuucccuucugaugaauuugacgcaaguauaucacaaguaaaugaaaaaaucaaucaaucacuagccuuuauaagaaaaucagaugaauuauuacacaacguaaacgccggaaaaucaacaaccaacauaaugauaaccacaauaauaaucgucauaauagucauccuacuaucacucauagcaguuggacuccuacuauacugcaaagcacgaucaacaccaguaacauuauccaaagaccaacuaagugguaucaauaacaucgccuuuucaaacugaggacuagucccuguucccagagcccacuuuuuuuucuuuuuuugaaauaaaauagccugucuuucagaucuaaaaaaaaaaaaaaaaaaaaaaaaaaaaaaaaaaaaaaaaaaaaaaaaaaaaaaaaaaaaaaaaugcaucccccccccccccccccccccccccccccccaaaggcucuuuucagagccaccagaauu

SEQ ID NO: 1660 - RNA, 1903 nt, Artificial Sequence
  mRNA product Design a-2 comprising derived and/or modified sequence from HRSV(A2)__F_DSCav1_mut1 (opt11)
gggagaguccgcucagccagguugcagaagcggcuuagcguguguccuaaucuucucucugcguguagguaggccugugccgcaaacaagcuuaccauggaacuccuaauccucaaagccaacgcaaucaccacaauccucacugccgucaccuucugcuucgccuccggccaaaacauaacagaagaauuuuaccaaucaaccuguucagcggucuccaaaggcuaccucggcgcccuccgcaccggcugguacaccuccgugaucaccauagaacucuccaacaucaaggaaaacaaaugcaacggcaccgacgcgaaggucaaacuuauuaaacaagaacucgacaaauacaaaaacgcagucaccgaacuacaacuccuaaugcaguccacgccagccaccggcucuggcucagccauaugcuccgguguggccguaugcaaaguccuacaccucgaaggagaagucaacaaaauaaaauccgcccuacuguccacaaacaaggccguagucucccucucaaacggcgucucaguacucaccuucaaaguccuagaccucaagaacuacaucgacaaacaacuccuacccauacuaaacaaacaauccugcucaauccccaacaucgaaaccguaauagaauuucaacaaaaaaacaacagacuccuggagaucacccgggaauuuuccguaaacgccggagucacaacacccgucucaaccuacaugcuaacgaacucagagcuccucucacuuaucaacgacaugcccauaacaaacgaccaaaaaaaacucauguccaacaacgugcaaaucguccgacaacaauccuacuccaucaugugcaucauuaaagaagaaguccucgcauacguaguccagcucccccucuacggcgucauagacacccccugcuggaaacuacacacaucaccccucugcacaacaaacaccaaagaaggcuccaacaucugccucacccgcaccgaccgaggcugguacugcgauaacgccggcagcgucuccuucuucccccaagcagaaaccugcaagguccaauccaaccgaguuuucugcgacacuaugaacucgcucacccuccccuccgaagucaaccucugcaacgucgacauuuucaaccccaaauacgacugcaaaaucaugaccuccaagaccgacguauccuccuccgucaucaccucccuaggcgccauaguaaguugcuacggcaaaaccaagugcacagcaagcaacaaaaaccgaggaauaaucaaaaccuucuccaacggcugcgacuacguauccaacaagggcgucgacaccguauccguagggaacacccuuuacugcguaaacaaacaagaaggacaaucacucuacguaaaaggcgaacccauaaucaacuucuacgacccccucguauuucccuccgacgaauuugacgcaucaaucucacaggucaacgaaaaaauaaaccaaucgcuagcauucaucagaaaaucagacgaacuccuacacaacgucaacgcaggcaagagcaccaccaacaucaugaucaccaccaucaucaucgucauaaucgucauacuacucucacucauagcagucggccuccuccuauacuguaaagcaaggucgaccccagucacccuauccaaagaccaacuaagcggcaucaacaacaucgcguucucaaacuaaggacuagucccuguucccagagcccacuuuuuuuucuuuuuuugaaauaaaauagccugucuuucagaucuaaaaaaaaaaaaaaaaaaaaaaaaaaaaaaaaaaaaaaaaaaaaaaaaaaaaaaaaaaaaaaaaugcaucccccccccccccccccccccccccccccccaaaggcucuuuucagagccaccagaauu

SEQ ID NO: 1661 - RNA, 1981 nt, Artificial Sequence
  mRNA product Design a-3 comprising derived and/or modified sequence from HRSV(A2)__F_DSCav1_mut1 (opt1)
gggagagggcgcuuggcuugcaaggacccugagcugcggcauugaagcacacccaacccaacucgacugaagucagccucacugaaccggaucugagaaucuucucucucugggcuugccagggcucuccgaaccuagcuagcauccucuucaauuccaacuagaaagcuuaccauggagcugcucauccugaaggccaacgccaucaccaccauccugacggcggugaccuucugcuucgccagcggccagaacaucaccgaggaguucuaccaguccacgugcagcgccgucuccaagggguaccucggcgcccugcggaccggcugguacaccuccgugaucaccaucgagcugagcaacaucaaggagaacaagugcaacgggaccgacgccaaggugaagcucaucaagcaggagcuggacaaguacaagaacgcggucacggagcugcagcuccugaugcaguccaccccggcaaccggcuccggcuccgccaucugcagcggcgucgccgugugcaaggugcugcaccucgagggggaggucaacaagaucaagagcgcccugcuguccaccaacaaggccguggugagccucuccaacggcgucagcgugcugaccuucaaggugcuggaccucaagaacuacaucgacaagcagcugcugcccauccugaacaagcagagcugcuccauccccaacaucgagacggugaucgaguuccagcagaagaacaaccggcuccuggagaucacccgcgaguucagcgugaacgccggggucaccacccccguguccacguacaugcugaccaacagcgagcuccugucccugaucaacgacaugccgaucaccaacgaccagaagaagcucaugagcaacaacgugcagaucguccggcagcaguccuacagcaucaugugcaucaucaaggaggaggugcuggcguacgugguccagcugccccucuacggcgugaucgacacccccugcuggaagcugcacacgagcccccugugcaccaccaacaccaaggagggguccaacaucugccucacgcgcaccgaccggggcugguacugcgacaacgccggcagcgucuccuucuucccgcaggccgagaccugcaaggugcagagcaaccgcguguucugcgacaccaugaacucccugacgcugcccagcgagguaaaccucugcaacgucgacaucuucaaccccaaguacgacugcaagaucaugaccuccaagaccgacgugagcuccagcgugaucaccucccugggggccaucgucagcugcuacggcaagacgaagugcaccgccagcaacaagaaccgggggaucaucaagaccuucuccaacggcugcgacuacgugagcaacaagggcguggacaccguguccgucgggaacacccuguacugcgugaacaagcaggagggccagagccucuacgugaagggggagcccaucaucaacuucuacgacccgcuggucuuccccuccgacgaguucgacgcgagcaucucccaggugaacgagaagaucaaccagagccuggccuucauccgcaaguccgacgagcugcuccacaacgugaacgccggcaagagcacgaccaacaucaugaucaccaccaucaucaucgucaucaucgugauccugcugucccucaucgccguggggcugcugcucuacugcaaggcccggagcacgcccgucacccuguccaaggaccagcugagcggcaucaacaacaucgcguucuccaacugaggacuagucccuguucccagagcccacuuuuuuuucuuuuuuugaaauaaaauagccugucuuucagaucuaaaaaaaaaaaaaaaaaaaaaaaaaaaaaaaaaaaaaaaaaaaaaaaaaaaaaaaaaaaaaaaaugcaucccccccccccccccccccccccccccccccaaaggcucuuuucagagccaccagaauu

SEQ ID NO: 1662 - RNA, 1981 nt, Artificial Sequence
  mRNA product Design a-3 comprising derived and/or modified sequence from HRSV(A2)__F_DSCav1_mut1 (opt1)
gggagagggcgcuuggcuugcaaggacccugagcugcggcauugaagcacacccaacccaacucgacugaagucagccucacugaaccggaucugagaaucuucucucucugggcuugccagggcucuccgaaccuagcuagcauccucuucaauuccaacuagaaagcuuaccauggagcugcucauccugaaggccaacgccaucaccaccauccugacggcggugaccuucugcuucgccagcggccagaacaucaccgaggaguucuaccaguccacgugcagcgccgucuccaagggguaccucggcgcccugcgcaccgggugguacaccagcgugaucaccaucgagcuguccaacaucaaggagaacaagugcaacggcaccgacgccaaggugaagcucaucaagcaggagcuggacaaguacaagaacgcggucacggagcugcagcuccugaugcagagcacccccgccaccggguccggcagcgccaucugcuccggcguggccgugugcaagguccugcaccucgagggggaggugaacaagaucaagagcgcgcugcuguccaccaacaaggccguggucagccucuccaacggcgugagcgugcugacguucaagguccuggaccucaagaacuacaucgacaagcagcugcugccgauccucaacaagcaguccugcagcauccccaacaucgagaccgugaucgaguuccagcagaagaacaaccggcugcuggagaucacccgcgaguucuccgugaacgccggggucaccacgcccgugagcaccuacaugcucaccaacuccgagcugcugagccucaucaacgacaugcccaucaccaacgaccagaagaagcugaugagcaacaacgugcagaucguccggcagcaguccuacagcaucaugugcaucaucaaggaggaggugcuggccuacgugguccagcucccgcuguacggcgugaucgacacgcccugcuggaagcugcacaccagcccccucugcaccaccaacacgaaggagggguccaacaucugccugacccgcaccgaccggggcugguacugcgacaacgccggcuccgugagcuucuucccccaggcggagaccugcaagguccaguccaaccgcguguucugcgacacgaugaacagccugacccucccguccgaggucaaccugugcaacguggacaucuucaaccccaaguacgacugcaagaucaugaccagcaagaccgacguguccagcuccgucaucacgagccugggggccaucguguccugcuacggcaagaccaagugcaccgccagcaacaagaaccgggggaucaucaagaccuucuccaacggcugcgacuacgugagcaacaagggcgucgacacgguguccguggggaacacccucuacugcgucaacaagcaggagggccagagccuguacgugaagggggagcccaucaucaacuucuacgacccccugguguucccgagcgacgaguucgacgccuccaucagccaggucaacgagaagaucaaccagucccucgccuucauccgcaagagcgacgagcugcugcacaacgugaacgcgggcaaguccaccaccaacaucaugaucaccacgaucaucaucgugaucaucgucauccuccugagccugaucgccguggggcuccugcuguacugcaaggcccgguccacccccgugacccugagcaaggaccagcucuccggcaucaacaacaucgccuucagcaacugaggacuagucccuguucccagagcccacuuuuuuuucuuuuuuugaaauaaaauagccugucuuucagaucuaaaaaaaaaaaaaaaaaaaaaaaaaaaaaaaaaaaaaaaaaaaaaaaaaaaaaaaaaaaaaaaaugcaucccccccccccccccccccccccccccccccaaaggcucuuuucagagccaccagaauu

SEQ ID NO: 1663 - RNA, 1981 nt, Artificial Sequence
  mRNA product Design a-3 comprising derived and/or modified sequence from HRSV(A2)__F_DSCav1_mut1 (opt2)
gggagagggcgcuuggcuugcaaggacccugagcugcggcauugaagcacacccaacccaacucgacugaagucagccucacugaaccggaucugagaaucuucucucucugggcuugccagggcucuccgaaccuagcuagcauccucuucaauuccaacuagaaagcuuaccauggagcuccucauccucaaggccaacgccaucaccaccauccucaccgccgucaccuucugcuucgccuccggccagaacaucaccgaggaguucuaccaguccaccugcuccgccgucuccaagggcuaccucggcgcccuccgcaccggcugguacaccuccgucaucaccaucgagcucuccaacaucaaggagaacaagugcaacggcaccgacgccaaggucaagcucaucaagcaggagcucgacaaguacaagaacgccgucaccgagcuccagcuccucaugcaguccacccccgccaccggcuccggcuccgccaucugcuccggcgucgccgucugcaagguccuccaccucgagggcgaggucaacaagaucaaguccgcccuccucuccaccaacaaggccgucgucucccucuccaacggcgucuccguccucaccuucaagguccucgaccucaagaacuacaucgacaagcagcuccuccccauccucaacaagcaguccugcuccauccccaacaucgagaccgucaucgaguuccagcagaagaacaaccgccuccucgagaucacccgcgaguucuccgucaacgccggcgucaccacccccgucuccaccuacaugcucaccaacuccgagcuccucucccucaucaacgacaugcccaucaccaacgaccagaagaagcucauguccaacaacguccagaucguccgccagcaguccuacuccaucaugugcaucaucaaggaggagguccucgccuacgucguccagcucccccucuacggcgucaucgacacccccugcuggaagcuccacaccuccccccucugcaccaccaacaccaaggagggcuccaacaucugccucacccgcaccgaccgcggcugguacugcgacaacgccggcuccgucuccuucuucccccaggccgagaccugcaagguccaguccaaccgcgucuucugcgacaccaugaacucccucacccuccccuccgaggucaaccucugcaacgucgacaucuucaaccccaaguacgacugcaagaucaugaccuccaagaccgacgucuccuccuccgucaucaccucccucggcgccaucgucuccugcuacggcaagaccaagugcaccgccuccaacaagaaccgcggcaucaucaagaccuucuccaacggcugcgacuacgucuccaacaagggcgucgacaccgucuccgucggcaacacccucuacugcgucaacaagcaggagggccagucccucuacgucaagggcgagcccaucaucaacuucuacgacccccucgucuuccccuccgacgaguucgacgccuccaucucccaggucaacgagaagaucaaccagucccucgccuucauccgcaaguccgacgagcuccuccacaacgucaacgccggcaaguccaccaccaacaucaugaucaccaccaucaucaucgucaucaucgucauccuccucucccucaucgccgucggccuccuccucuacugcaaggcccgcuccacccccgucacccucuccaaggaccagcucuccggcaucaacaacaucgccuucuccaacugaggacuagucccuguucccagagcccacuuuuuuuucuuuuuuugaaauaaaauagccugucuuucagaucuaaaaaaaaaaaaaaaaaaaaaaaaaaaaaaaaaaaaaaaaaaaaaaaaaaaaaaaaaaaaaaaaugcaucccccccccccccccccccccccccccccccaaaggcucuuuucagagccaccagaauu

SEQ ID NO: 1664 - RNA, 1981 nt, Artificial Sequence
  mRNA product Design a-3 comprising derived and/or modified sequence from HRSV(A2)__F_DSCav1_mut1 (opt3)
gggagagggcgcuuggcuugcaaggacccugagcugcggcauugaagcacacccaacccaacucgacugaagucagccucacugaaccggaucugagaaucuucucucucugggcuugccagggcucuccgaaccuagcuagcauccucuucaauuccaacuagaaagcuuaccauggagcugcucauccuuaaggccaacgcuauuaccacaauacugacugcagugacguucugcuuugccagcggccagaauaucaccgaagaguucuaccaauccacauguucugcggucucaaaaggguauuugggagcuuuaagaacugguugguacaccaguguuauuacaaucgaacugagcaacauuaaggagaauaaaugcaacggcaccgacgccaaggugaaacuaaucaagcaggaacucgauaaguauaaaaaugcaguaacugagcugcagcuucugaugcaguccacacccgccaccgggucuggaucggcuauauguucaggcguggcagucugcaagguguugcaccucgagggugaaguuaacaaaaucaagagcgcccugcugaguacgaauaaagcuguggucucccucucuaacggggugagcguauuaacuuuuaagguucuggaccuuaagaauuacauugauaaacaauugcugccuauccuaaacaagcaguccuguucaauuccaaauaucgagaccgugauagaguuccagcagaaaaacaauaggcuccuggaaauuacacgggaguuuagugucaacgccggagugacuaccccggugagcacauauaugcuuaccaauucugaacuguugucccucaucaacgacaugcccauuacgaacgaucaaaagaaacugaugucaaauaacguccagaucguucgccagcagagcuacaguaucaugugcauuauaaaggaggaaguguuagcguauguagugcaacugccucucuacggcgucaucgacacuccauguuggaaacuucauacaucuccccugugcaccacuaauacaaaggagggcuccaacauuuguuugacccgaacggaucgugggugguacugcgacaaugcaggaagcgugucguucuuuccucaggccgaaaccuguaagguucagucuaacagaguguucugcgauacaaugaacucccuaacucugccaucagaggucaaucucugcaauguggacaucuuuaaccccaaauaugauuguaagauaaugaccaguaaaacagacguaagcuccucuguuauuacuagccugggugcuaucgugucaugcuacggcaagaccaaauguacagccaguaauaagaacagggggaucauuaagaccuucuccaauggaugcgauuaugucagcaacaaaggcguggacacugucucuguggguaauacgcuuuacuguguuaacaagcaagaggggcagucacuguaugugaaaggagaaccuaucauuaacuuuuacgacccauugguauucccgagugaugaguuugacgcaagcauaucccaggucaaugaaaagaucaaccagucucucgcuuucauucggaaaucggaugagcuguuacacaaugugaacgccggcaagagcacaaccaauaucaugaucacuaccauuauaaucguuauuaucgugauucugcuaucccucaucgcggucggccugcuuuuguauugcaaggcccgcucaacacccgugacccugaguaaagaccaacucucugggauaaacaauaucgcauucagcaacugaggacuagucccuguucccagagcccacuuuuuuuucuuuuuuugaaauaaaauagccugucuuucagaucuaaaaaaaaaaaaaaaaaaaaaaaaaaaaaaaaaaaaaaaaaaaaaaaaaaaaaaaaaaaaaaaaugcaucccccccccccccccccccccccccccccccaaaggcucuuuucagagccaccagaauu

SEQ ID NO: 1665 - RNA, 1981 nt, Artificial Sequence
  mRNA product Design a-3 comprising derived and/or modified sequence from HRSV(A2)__F_DSCav1_mut1 (opt4)
gggagagggcgcuuggcuugcaaggacccugagcugcggcauugaagcacacccaacccaacucgacugaagucagccucacugaaccggaucugagaaucuucucucucugggcuugccagggcucuccgaaccuagcuagcauccucuucaauuccaacuagaaagcuuaccauggagcugcugauccugaaggccaacgccaucaccaccauccugaccgccgugaccuucugcuucgccagcggccagaacaucaccgaggaguucuaccagagcaccugcagcgccgugagcaagggcuaccugggcgcccugagaaccggcugguacaccagcgugaucaccaucgagcugagcaacaucaaggagaacaagugcaacggcaccgacgccaaggugaagcugaucaagcaggagcuggacaaguacaagaacgccgugaccgagcugcagcugcugaugcagagcacccccgccaccggcagcggcagcgccaucugcagcggcguggccgugugcaaggugcugcaccuggagggcgaggugaacaagaucaagagcgcccugcugagcaccaacaaggccguggugagccugagcaacggcgugagcgugcugaccuucaaggugcuggaccugaagaacuacaucgacaagcagcugcugcccauccugaacaagcagagcugcagcauccccaacaucgagaccgugaucgaguuccagcagaagaacaacagacugcuggagaucaccagagaguucagcgugaacgccggcgugaccacccccgugagcaccuacaugcugaccaacagcgagcugcugagccugaucaacgacaugcccaucaccaacgaccagaagaagcugaugagcaacaacgugcagaucgugagacagcagagcuacagcaucaugugcaucaucaaggaggaggugcuggccuacguggugcagcugccccuguacggcgugaucgacacccccugcuggaagcugcacaccagcccccugugcaccaccaacaccaaggagggcagcaacaucugccugaccagaaccgacagaggcugguacugcgacaacgccggcagcgugagcuucuucccccaggccgagaccugcaaggugcagagcaacagaguguucugcgacaccaugaacagccugacccugcccagcgaggugaaccugugcaacguggacaucuucaaccccaaguacgacugcaagaucaugaccagcaagaccgacgugagcagcagcgugaucaccagccugggcgccaucgugagcugcuacggcaagaccaagugcaccgccagcaacaagaacagaggcaucaucaagaccuucagcaacggcugcgacuacgugagcaacaagggcguggacaccgugagcgugggcaacacccuguacugcgugaacaagcaggagggccagagccuguacgugaagggcgagcccaucaucaacuucuacgacccccugguguuccccagcgacgaguucgacgccagcaucagccaggugaacgagaagaucaaccagagccuggccuucaucagaaagagcgacgagcugcugcacaacgugaacgccggcaagagcaccaccaacaucaugaucaccaccaucaucaucgugaucaucgugauccugcugagccugaucgccgugggccugcugcuguacugcaaggccagaagcacccccgugacccugagcaaggaccagcugagcggcaucaacaacaucgccuucagcaacugaggacuagucccuguucccagagcccacuuuuuuuucuuuuuuugaaauaaaauagccugucuuucagaucuaaaaaaaaaaaaaaaaaaaaaaaaaaaaaaaaaaaaaaaaaaaaaaaaaaaaaaaaaaaaaaaaugcaucccccccccccccccccccccccccccccccaaaggcucuuuucagagccaccagaauu

SEQ ID NO: 1666 - RNA, 1981 nt, Artificial Sequence
  mRNA product Design a-3 comprising derived and/or modified sequence from HRSV(A2)__F_DSCav1_mut1 (opt5)
gggagagggcgcuuggcuugcaaggacccugagcugcggcauugaagcacacccaacccaacucgacugaagucagccucacugaaccggaucugagaaucuucucucucugggcuugccagggcucuccgaaccuagcuagcauccucuucaauuccaacuagaaagcuuaccauggagcugcucauccugaaggccaacgcuauuaccacaauccuuacggccgugaccuucugcuuugcgagcggccagaauauuacagaagaguucuaccaauccaccuguucugcugucagcaaaggguaucugggagcccucagaacaggcugguacaccuccguuaucacaauugaacugucuaacaucaaggagaauaaaugcaacgggaccgacgccaaggugaaacuuaucaagcaggaacuggauaaguauaaaaaugcugugacggagcuccagcugcugaugcagagcacccccgccacaggauccggcucugcuauuuguagcggggucgccgugugcaagguucuccaccuggagggagaagugaacaaaaucaaguccgcgcuucugagcaccaauaaagccgucgugucucucuccaacggcguuagcgugcugacauuuaagguccuugaccugaagaauuacauugauaaacaacuccugccuauccugaacaagcagucuuguuccauuccgaauaucgagaccgugauugaguuccagcagaaaaacaaucggcuccuggaaaucacgcgcgaguuuagcgugaacgcuggcgucacaacccccguuucuacauauaugcuuaccaauuccgaacugcucagccugaucaacgacaugccuauuaccaacgaucaaaagaaacuuauguccaauaacgugcagaucgugagacagcagucuuacagcauuaugugcaucauuaaggaggaaguccuggccuaugugguucaacucccccuguacggggugaucgacacaccuuguuggaaacugcauacgagcccccucugcaccacaaauaccaaggagggauccaacaucugucugacacggaccgaucgcggcugguacugcgacaaugcugggucugucuccuucuuuccucaggccgaaacguguaaggugcagagcaacagaguuuucugcgauacaaugaacucucuuacccugccgagcgaggugaaucucugcaaugucgacauuuuuaaccccaaauaugauuguaagaucaugaccuccaaaacagacgugucuagcuccgucauuaccagccugggagcgaucgugucuugcuacggcaagacaaaauguacggccuccaauaagaaccgggggauuaucaagaccuucagcaauggaugcgauuauguuucuaacaaaggcguggacacagucuccgugggcaauacccuuuacuguguuaacaagcaagaggggcagagccuguaugugaaaggagaaccuaucauuaacuuuuacgacccccucgucuucccuuccgaugaguuugacgcuucuaucagccaggugaaugaaaagauuaaccagucccuggccuucauccgcaaaucugaugagcugcuccacaaugugaacgcuggcaagagcacaaccaauauuaugaucacgaccauuaucaucguuauuaucgucauucugcuuucccugaucgccguggggcuccugcuguauugcaaggccagaagcacacccgugacccuuucuaaagaccaacucuccggaauuaacaauaucgcuuucagcaacugaggacuagucccuguucccagagcccacuuuuuuuucuuuuuuugaaauaaaauagccugucuuucagaucuaaaaaaaaaaaaaaaaaaaaaaaaaaaaaaaaaaaaaaaaaaaaaaaaaaaaaaaaaaaaaaaaugcaucccccccccccccccccccccccccccccccaaaggcucuuuucagagccaccagaauu

SEQ ID NO: 1667 - RNA, 1981 nt, Artificial Sequence
  mRNA product Design a-3 comprising derived and/or modified sequence from HRSV(A2)__F_DSCav1_mut1 (opt6)
gggagagggcgcuuggcuugcaaggacccugagcugcggcauugaagcacacccaacccaacucgacugaagucagccucacugaaccggaucugagaaucuucucucucugggcuugccagggcucuccgaaccuagcuagcauccucuucaauuccaacuagaaagcuuaccauggaacuauuaauacuaaaagcaaacgcuauaacaacaauacuaacagcagucacauucugcuuugcaucaggccaaaacaucacagaagaauuuuaccaaucaacaugcuccgccguaucgaaaggauaccuaggcgcauuaagaaccggaugguauacaucagucauaacaauugaacuaucuaacauaaaagaaaacaaauguaacggcacagaugccaaaguaaaacucaucaaacaagaauuagauaaauacaaaaacgcagucacugaacuacaacucuuaaugcaaucaacaccugcaacaggaucaggaucagcaauaugcucaggaguagccguauguaaaguacuacaccuagaaggagaagucaacaaaauaaaaucagcccuccuaaguacaaacaaagcugucguaucacuauccaaugguguuucaguacuaacuuucaaaguucuagaccuaaaaaacuacauagacaaacaacuacuaccaauacuaaauaaacaaaguuguucuauacccaacauagaaaccgucauagaauuucaacaaaaaaauaauagacuccuagaaauaacaagagaauuuucaguuaacgcagguguaacaaccccaguauccaccuauaugcuaacaaauucagaauuacuuucccuaaucaacgacaugcccauaacaaaugaccaaaaaaaauuaaugucaaacaacguccaaauaguucgucaacaaucauauucaauaaugugcauaauaaaagaagaagucuuagccuacguaguacaacuuccccuuuauggaguuaucgacacacccugcuggaaacuccacacuucaccacuauguacuacaaacacaaaagaaggauccaacaucugccucacaagaaccgaucgaggaugguacugugauaacgccggauccgucucauucuucccacaagcagaaacaugcaaaguacaaucaaacagaguauuuugcgacacaaugaacucccucacauuaccuucugaaguaaaccuauguaauguagacauauucaaccccaaauacgauugcaaaauaaugacaucaaagacagauguaucaucaagugucaucacaucccuaggagcaauugucucauguuaugguaaaacaaaaugcaccgcaucaaauaaaaacagaggcauaauaaaaaccuucucaaacgguugugacuacguauccaauaaaggcgucgacacaguaucaguagguaacacauuauauuguguaaacaaacaagaaggacagucccuauauguaaaaggagaaccaauaaucaacuucuacgacccacuuguuuucccuucugaugaauuugacgcaaguauaucacaaguaaaugaaaaaaucaaucaaucacuagccuuuauaagaaaaucagaugaauuauuacacaacguaaacgccggaaaaucaacaaccaacauaaugauaaccacaauaauaaucgucauaauagucauccuacuaucacucauagcaguuggacuccuacuauacugcaaagcacgaucaacaccaguaacauuauccaaagaccaacuaagugguaucaauaacaucgccuuuucaaacugaggacuagucccuguucccagagcccacuuuuuuuucuuuuuuugaaauaaaauagccugucuuucagaucuaaaaaaaaaaaaaaaaaaaaaaaaaaaaaaaaaaaaaaaaaaaaaaaaaaaaaaaaaaaaaaaaugcaucccccccccccccccccccccccccccccccaaaggcucuuuucagagccaccagaauu

SEQ ID NO: 1668 - RNA, 1981 nt, Artificial Sequence
  mRNA product Design a-3 comprising derived and/or modified sequence from HRSV(A2)__F_DSCav1_mut1 (opt11)
gggagagggcgcuuggcuugcaaggacccugagcugcggcauugaagcacacccaacccaacucgacugaagucagccucacugaaccggaucugagaaucuucucucucugggcuugccagggcucuccgaaccuagcuagcauccucuucaauuccaacuagaaagcuuaccauggaacuccuaauccucaaagccaacgcaaucaccacaauccucacugccgucaccuucugcuucgccuccggccaaaacauaacagaagaauuuuaccaaucaaccuguucagcggucuccaaaggcuaccucggcgcccuccgcaccggcugguacaccuccgugaucaccauagaacucuccaacaucaaggaaaacaaaugcaacggcaccgacgcgaaggucaaacuuauuaaacaagaacucgacaaauacaaaaacgcagucaccgaacuacaacuccuaaugcaguccacgccagccaccggcucuggcucagccauaugcuccgguguggccguaugcaaaguccuacaccucgaaggagaagucaacaaaauaaaauccgcccuacuguccacaaacaaggccguagucucccucucaaacggcgucucaguacucaccuucaaaguccuagaccucaagaacuacaucgacaaacaacuccuacccauacuaaacaaacaauccugcucaauccccaacaucgaaaccguaauagaauuucaacaaaaaaacaacagacuccuggagaucacccgggaauuuuccguaaacgccggagucacaacacccgucucaaccuacaugcuaacgaacucagagcuccucucacuuaucaacgacaugcccauaacaaacgaccaaaaaaaacucauguccaacaacgugcaaaucguccgacaacaauccuacuccaucaugugcaucauuaaagaagaaguccucgcauacguaguccagcucccccucuacggcgucauagacacccccugcuggaaacuacacacaucaccccucugcacaacaaacaccaaagaaggcuccaacaucugccucacccgcaccgaccgaggcugguacugcgauaacgccggcagcgucuccuucuucccccaagcagaaaccugcaagguccaauccaaccgaguuuucugcgacacuaugaacucgcucacccuccccuccgaagucaaccucugcaacgucgacauuuucaaccccaaauacgacugcaaaaucaugaccuccaagaccgacguauccuccuccgucaucaccucccuaggcgccauaguaaguugcuacggcaaaaccaagugcacagcaagcaacaaaaaccgaggaauaaucaaaaccuucuccaacggcugcgacuacguauccaacaagggcgucgacaccguauccguagggaacacccuuuacugcguaaacaaacaagaaggacaaucacucuacguaaaaggcgaacccauaaucaacuucuacgacccccucguauuucccuccgacgaauuugacgcaucaaucucacaggucaacgaaaaaauaaaccaaucgcuagcauucaucagaaaaucagacgaacuccuacacaacgucaacgcaggcaagagcaccaccaacaucaugaucaccaccaucaucaucgucauaaucgucauacuacucucacucauagcagucggccuccuccuauacuguaaagcaaggucgaccccagucacccuauccaaagaccaacuaagcggcaucaacaacaucgcguucucaaacuaaggacuagucccuguucccagagcccacuuuuuuuucuuuuuuugaaauaaaauagccugucuuucagaucuaaaaaaaaaaaaaaaaaaaaaaaaaaaaaaaaaaaaaaaaaaaaaaaaaaaaaaaaaaaaaaaaugcaucccccccccccccccccccccccccccccccaaaggcucuuuucagagccaccagaauu

SEQ ID NO: 1669 - RNA, 1930 nt, Artificial Sequence
  mRNA product Design a-4 comprising derived and/or modified sequence from HRSV(A2)__F_DSCav1_mut1 (opt1)
gggagacuccugucgggcggaaguaggaggaguagaguuuaaaaacaguacucuuuuuccgguucgggacguaguugaagcaacgacaagccggauaaccgcucuugagacaggaagcuuaccauggagcugcucauccugaaggccaacgccaucaccaccauccugacggcggugaccuucugcuucgccagcggccagaacaucaccgaggaguucuaccaguccacgugcagcgccgucuccaagggguaccucggcgcccugcggaccggcugguacaccuccgugaucaccaucgagcugagcaacaucaaggagaacaagugcaacgggaccgacgccaaggugaagcucaucaagcaggagcuggacaaguacaagaacgcggucacggagcugcagcuccugaugcaguccaccccggcaaccggcuccggcuccgccaucugcagcggcgucgccgugugcaaggugcugcaccucgagggggaggucaacaagaucaagagcgcccugcuguccaccaacaaggccguggugagccucuccaacggcgucagcgugcugaccuucaaggugcuggaccucaagaacuacaucgacaagcagcugcugcccauccugaacaagcagagcugcuccauccccaacaucgagacggugaucgaguuccagcagaagaacaaccggcuccuggagaucacccgcgaguucagcgugaacgccggggucaccacccccguguccacguacaugcugaccaacagcgagcuccugucccugaucaacgacaugccgaucaccaacgaccagaagaagcucaugagcaacaacgugcagaucguccggcagcaguccuacagcaucaugugcaucaucaaggaggaggugcuggcguacgugguccagcugccccucuacggcgugaucgacacccccugcuggaagcugcacacgagcccccugugcaccaccaacaccaaggagggguccaacaucugccucacgcgcaccgaccggggcugguacugcgacaacgccggcagcgucuccuucuucccgcaggccgagaccugcaaggugcagagcaaccgcguguucugcgacaccaugaacucccugacgcugcccagcgagguaaaccucugcaacgucgacaucuucaaccccaaguacgacugcaagaucaugaccuccaagaccgacgugagcuccagcgugaucaccucccugggggccaucgucagcugcuacggcaagacgaagugcaccgccagcaacaagaaccgggggaucaucaagaccuucuccaacggcugcgacuacgugagcaacaagggcguggacaccguguccgucgggaacacccuguacugcgugaacaagcaggagggccagagccucuacgugaagggggagcccaucaucaacuucuacgacccgcuggucuuccccuccgacgaguucgacgcgagcaucucccaggugaacgagaagaucaaccagagccuggccuucauccgcaaguccgacgagcugcuccacaacgugaacgccggcaagagcacgaccaacaucaugaucaccaccaucaucaucgucaucaucgugauccugcugucccucaucgccguggggcugcugcucuacugcaaggcccggagcacgcccgucacccuguccaaggaccagcugagcggcaucaacaacaucgcguucuccaacugaggacuagucccuguucccagagcccacuuuuuuuucuuuuuuugaaauaaaauagccugucuuucagaucuaaaaaaaaaaaaaaaaaaaaaaaaaaaaaaaaaaaaaaaaaaaaaaaaaaaaaaaaaaaaaaaaugcaucccccccccccccccccccccccccccccccaaaggcucuuuucagagccaccagaauu

SEQ ID NO: 1670 - RNA, 1930 nt, Artificial Sequence
  mRNA product Design a-4 comprising derived and/or modified sequence from HRSV(A2)__F_DSCav1_mut1 (opt1)
gggagacuccugucgggcggaaguaggaggaguagaguuuaaaaacaguacucuuuuuccgguucgggacguaguugaagcaacgacaagccggauaaccgcucuugagacaggaagcuuaccauggagcugcucauccugaaggccaacgccaucaccaccauccugacggcggugaccuucugcuucgccagcggccagaacaucaccgaggaguucuaccaguccacgugcagcgccgucuccaagggguaccucggcgcccugcgcaccgggugguacaccagcgugaucaccaucgagcuguccaacaucaaggagaacaagugcaacggcaccgacgccaaggugaagcucaucaagcaggagcuggacaaguacaagaacgcggucacggagcugcagcuccugaugcagagcacccccgccaccggguccggcagcgccaucugcuccggcguggccgugugcaagguccugcaccucgagggggaggugaacaagaucaagagcgcgcugcuguccaccaacaaggccguggucagccucuccaacggcgugagcgugcugacguucaagguccuggaccucaagaacuacaucgacaagcagcugcugccgauccucaacaagcaguccugcagcauccccaacaucgagaccgugaucgaguuccagcagaagaacaaccggcugcuggagaucacccgcgaguucuccgugaacgccggggucaccacgcccgugagcaccuacaugcucaccaacuccgagcugcugagccucaucaacgacaugcccaucaccaacgaccagaagaagcugaugagcaacaacgugcagaucguccggcagcaguccuacagcaucaugugcaucaucaaggaggaggugcuggccuacgugguccagcucccgcuguacggcgugaucgacacgcccugcuggaagcugcacaccagcccccucugcaccaccaacacgaaggagggguccaacaucugccugacccgcaccgaccggggcugguacugcgacaacgccggcuccgugagcuucuucccccaggcggagaccugcaagguccaguccaaccgcguguucugcgacacgaugaacagccugacccucccguccgaggucaaccugugcaacguggacaucuucaaccccaaguacgacugcaagaucaugaccagcaagaccgacguguccagcuccgucaucacgagccugggggccaucguguccugcuacggcaagaccaagugcaccgccagcaacaagaaccgggggaucaucaagaccuucuccaacggcugcgacuacgugagcaacaagggcgucgacacgguguccguggggaacacccucuacugcgucaacaagcaggagggccagagccuguacgugaagggggagcccaucaucaacuucuacgacccccugguguucccgagcgacgaguucgacgccuccaucagccaggucaacgagaagaucaaccagucccucgccuucauccgcaagagcgacgagcugcugcacaacgugaacgcgggcaaguccaccaccaacaucaugaucaccacgaucaucaucgugaucaucgucauccuccugagccugaucgccguggggcuccugcuguacugcaaggcccgguccacccccgugacccugagcaaggaccagcucuccggcaucaacaacaucgccuucagcaacugaggacuagucccuguucccagagcccacuuuuuuuucuuuuuuugaaauaaaauagccugucuuucagaucuaaaaaaaaaaaaaaaaaaaaaaaaaaaaaaaaaaaaaaaaaaaaaaaaaaaaaaaaaaaaaaaaugcaucccccccccccccccccccccccccccccccaaaggcucuuuucagagccaccagaauu

SEQ ID NO: 1671 - RNA, 1930 nt, Artificial Sequence
  mRNA product Design a-4 comprising derived and/or modified sequence from HRSV(A2)__F_DSCav1_mut1 (opt2)
gggagacuccugucgggcggaaguaggaggaguagaguuuaaaaacaguacucuuuuuccgguucgggacguaguugaagcaacgacaagccggauaaccgcucuugagacaggaagcuuaccauggagcuccucauccucaaggccaacgccaucaccaccauccucaccgccgucaccuucugcuucgccuccggccagaacaucaccgaggaguucuaccaguccaccugcuccgccgucuccaagggcuaccucggcgcccuccgcaccggcugguacaccuccgucaucaccaucgagcucuccaacaucaaggagaacaagugcaacggcaccgacgccaaggucaagcucaucaagcaggagcucgacaaguacaagaacgccgucaccgagcuccagcuccucaugcaguccacccccgccaccggcuccggcuccgccaucugcuccggcgucgccgucugcaagguccuccaccucgagggcgaggucaacaagaucaaguccgcccuccucuccaccaacaaggccgucgucucccucuccaacggcgucuccguccucaccuucaagguccucgaccucaagaacuacaucgacaagcagcuccuccccauccucaacaagcaguccugcuccauccccaacaucgagaccgucaucgaguuccagcagaagaacaaccgccuccucgagaucacccgcgaguucuccgucaacgccggcgucaccacccccgucuccaccuacaugcucaccaacuccgagcuccucucccucaucaacgacaugcccaucaccaacgaccagaagaagcucauguccaacaacguccagaucguccgccagcaguccuacuccaucaugugcaucaucaaggaggagguccucgccuacgucguccagcucccccucuacggcgucaucgacacccccugcuggaagcuccacaccuccccccucugcaccaccaacaccaaggagggcuccaacaucugccucacccgcaccgaccgcggcugguacugcgacaacgccggcuccgucuccuucuucccccaggccgagaccugcaagguccaguccaaccgcgucuucugcgacaccaugaacucccucacccuccccuccgaggucaaccucugcaacgucgacaucuucaaccccaaguacgacugcaagaucaugaccuccaagaccgacgucuccuccuccgucaucaccucccucggcgccaucgucuccugcuacggcaagaccaagugcaccgccuccaacaagaaccgcggcaucaucaagaccuucuccaacggcugcgacuacgucuccaacaagggcgucgacaccgucuccgucggcaacacccucuacugcgucaacaagcaggagggccagucccucuacgucaagggcgagcccaucaucaacuucuacgacccccucgucuuccccuccgacgaguucgacgccuccaucucccaggucaacgagaagaucaaccagucccucgccuucauccgcaaguccgacgagcuccuccacaacgucaacgccggcaaguccaccaccaacaucaugaucaccaccaucaucaucgucaucaucgucauccuccucucccucaucgccgucggccuccuccucuacugcaaggcccgcuccacccccgucacccucuccaaggaccagcucuccggcaucaacaacaucgccuucuccaacugaggacuagucccuguucccagagcccacuuuuuuuucuuuuuuugaaauaaaauagccugucuuucagaucuaaaaaaaaaaaaaaaaaaaaaaaaaaaaaaaaaaaaaaaaaaaaaaaaaaaaaaaaaaaaaaaaugcaucccccccccccccccccccccccccccccccaaaggcucuuuucagagccaccagaauu

SEQ ID NO: 1672 - RNA, 1930 nt, Artificial Sequence
  mRNA product Design a-4 comprising derived and/or modified sequence from HRSV(A2)__F_DSCav1_mut1 (opt3)
gggagacuccugucgggcggaaguaggaggaguagaguuuaaaaacaguacucuuuuuccgguucgggacguaguugaagcaacgacaagccggauaaccgcucuugagacaggaagcuuaccauggagcugcucauccuuaaggccaacgcuauuaccacaauacugacugcagugacguucugcuuugccagcggccagaauaucaccgaagaguucuaccaauccacauguucugcggucucaaaaggguauuugggagcuuuaagaacugguugguacaccaguguuauuacaaucgaacugagcaacauuaaggagaauaaaugcaacggcaccgacgccaaggugaaacuaaucaagcaggaacucgauaaguauaaaaaugcaguaacugagcugcagcuucugaugcaguccacacccgccaccgggucuggaucggcuauauguucaggcguggcagucugcaagguguugcaccucgagggugaaguuaacaaaaucaagagcgcccugcugaguacgaauaaagcuguggucucccucucuaacggggugagcguauuaacuuuuaagguucuggaccuuaagaauuacauugauaaacaauugcugccuauccuaaacaagcaguccuguucaauuccaaauaucgagaccgugauagaguuccagcagaaaaacaauaggcuccuggaaauuacacgggaguuuagugucaacgccggagugacuaccccggugagcacauauaugcuuaccaauucugaacuguugucccucaucaacgacaugcccauuacgaacgaucaaaagaaacugaugucaaauaacguccagaucguucgccagcagagcuacaguaucaugugcauuauaaaggaggaaguguuagcguauguagugcaacugccucucuacggcgucaucgacacuccauguuggaaacuucauacaucuccccugugcaccacuaauacaaaggagggcuccaacauuuguuugacccgaacggaucgugggugguacugcgacaaugcaggaagcgugucguucuuuccucaggccgaaaccuguaagguucagucuaacagaguguucugcgauacaaugaacucccuaacucugccaucagaggucaaucucugcaauguggacaucuuuaaccccaaauaugauuguaagauaaugaccaguaaaacagacguaagcuccucuguuauuacuagccugggugcuaucgugucaugcuacggcaagaccaaauguacagccaguaauaagaacagggggaucauuaagaccuucuccaauggaugcgauuaugucagcaacaaaggcguggacacugucucuguggguaauacgcuuuacuguguuaacaagcaagaggggcagucacuguaugugaaaggagaaccuaucauuaacuuuuacgacccauugguauucccgagugaugaguuugacgcaagcauaucccaggucaaugaaaagaucaaccagucucucgcuuucauucggaaaucggaugagcuguuacacaaugugaacgccggcaagagcacaaccaauaucaugaucacuaccauuauaaucguuauuaucgugauucugcuaucccucaucgcggucggccugcuuuuguauugcaaggcccgcucaacacccgugacccugaguaaagaccaacucucugggauaaacaauaucgcauucagcaacugaggacuagucccuguucccagagcccacuuuuuuuucuuuuuuugaaauaaaauagccugucuuucagaucuaaaaaaaaaaaaaaaaaaaaaaaaaaaaaaaaaaaaaaaaaaaaaaaaaaaaaaaaaaaaaaaaugcaucccccccccccccccccccccccccccccccaaaggcucuuuucagagccaccagaauu

SEQ ID NO: 1673 - RNA, 1930 nt, Artificial Sequence
  mRNA product Design a-4 comprising derived and/or modified sequence from HRSV(A2)__F_DSCav1_mut1 (opt4)
gggagacuccugucgggcggaaguaggaggaguagaguuuaaaaacaguacucuuuuuccgguucgggacguaguugaagcaacgacaagccggauaaccgcucuugagacaggaagcuuaccauggagcugcugauccugaaggccaacgccaucaccaccauccugaccgccgugaccuucugcuucgccagcggccagaacaucaccgaggaguucuaccagagcaccugcagcgccgugagcaagggcuaccugggcgcccugagaaccggcugguacaccagcgugaucaccaucgagcugagcaacaucaaggagaacaagugcaacggcaccgacgccaaggugaagcugaucaagcaggagcuggacaaguacaagaacgccgugaccgagcugcagcugcugaugcagagcacccccgccaccggcagcggcagcgccaucugcagcggcguggccgugugcaaggugcugcaccuggagggcgaggugaacaagaucaagagcgcccugcugagcaccaacaaggccguggugagccugagcaacggcgugagcgugcugaccuucaaggugcuggaccugaagaacuacaucgacaagcagcugcugcccauccugaacaagcagagcugcagcauccccaacaucgagaccgugaucgaguuccagcagaagaacaacagacugcuggagaucaccagagaguucagcgugaacgccggcgugaccacccccgugagcaccuacaugcugaccaacagcgagcugcugagccugaucaacgacaugcccaucaccaacgaccagaagaagcugaugagcaacaacgugcagaucgugagacagcagagcuacagcaucaugugcaucaucaaggaggaggugcuggccuacguggugcagcugccccuguacggcgugaucgacacccccugcuggaagcugcacaccagcccccugugcaccaccaacaccaaggagggcagcaacaucugccugaccagaaccgacagaggcugguacugcgacaacgccggcagcgugagcuucuucccccaggccgagaccugcaaggugcagagcaacagaguguucugcgacaccaugaacagccugacccugcccagcgaggugaaccugugcaacguggacaucuucaaccccaaguacgacugcaagaucaugaccagcaagaccgacgugagcagcagcgugaucaccagccugggcgccaucgugagcugcuacggcaagaccaagugcaccgccagcaacaagaacagaggcaucaucaagaccuucagcaacggcugcgacuacgugagcaacaagggcguggacaccgugagcgugggcaacacccuguacugcgugaacaagcaggagggccagagccuguacgugaagggcgagcccaucaucaacuucuacgacccccugguguuccccagcgacgaguucgacgccagcaucagccaggugaacgagaagaucaaccagagccuggccuucaucagaaagagcgacgagcugcugcacaacgugaacgccggcaagagcaccaccaacaucaugaucaccaccaucaucaucgugaucaucgugauccugcugagccugaucgccgugggccugcugcuguacugcaaggccagaagcacccccgugacccugagcaaggaccagcugagcggcaucaacaacaucgccuucagcaacugaggacuagucccuguucccagagcccacuuuuuuuucuuuuuuugaaauaaaauagccugucuuucagaucuaaaaaaaaaaaaaaaaaaaaaaaaaaaaaaaaaaaaaaaaaaaaaaaaaaaaaaaaaaaaaaaaugcaucccccccccccccccccccccccccccccccaaaggcucuuuucagagccaccagaauu

SEQ ID NO: 1674 - RNA, 1930 nt, Artificial Sequence
  mRNA product Design a-4 comprising derived and/or modified sequence from HRSV(A2)__F_DSCav1_mut1 (opt5)
gggagacuccugucgggcggaaguaggaggaguagaguuuaaaaacaguacucuuuuuccgguucgggacguaguugaagcaacgacaagccggauaaccgcucuugagacaggaagcuuaccauggagcugcucauccugaaggccaacgcuauuaccacaauccuuacggccgugaccuucugcuuugcgagcggccagaauauuacagaagaguucuaccaauccaccuguucugcugucagcaaaggguaucugggagcccucagaacaggcugguacaccuccguuaucacaauugaacugucuaacaucaaggagaauaaaugcaacgggaccgacgccaaggugaaacuuaucaagcaggaacuggauaaguauaaaaaugcugugacggagcuccagcugcugaugcagagcacccccgccacaggauccggcucugcuauuuguagcggggucgccgugugcaagguucuccaccuggagggagaagugaacaaaaucaaguccgcgcuucugagcaccaauaaagccgucgugucucucuccaacggcguuagcgugcugacauuuaagguccuugaccugaagaauuacauugauaaacaacuccugccuauccugaacaagcagucuuguuccauuccgaauaucgagaccgugauugaguuccagcagaaaaacaaucggcuccuggaaaucacgcgcgaguuuagcgugaacgcuggcgucacaacccccguuucuacauauaugcuuaccaauuccgaacugcucagccugaucaacgacaugccuauuaccaacgaucaaaagaaacuuauguccaauaacgugcagaucgugagacagcagucuuacagcauuaugugcaucauuaaggaggaaguccuggccuaugugguucaacucccccuguacggggugaucgacacaccuuguuggaaacugcauacgagcccccucugcaccacaaauaccaaggagggauccaacaucugucugacacggaccgaucgcggcugguacugcgacaaugcugggucugucuccuucuuuccucaggccgaaacguguaaggugcagagcaacagaguuuucugcgauacaaugaacucucuuacccugccgagcgaggugaaucucugcaaugucgacauuuuuaaccccaaauaugauuguaagaucaugaccuccaaaacagacgugucuagcuccgucauuaccagccugggagcgaucgugucuugcuacggcaagacaaaauguacggccuccaauaagaaccgggggauuaucaagaccuucagcaauggaugcgauuauguuucuaacaaaggcguggacacagucuccgugggcaauacccuuuacuguguuaacaagcaagaggggcagagccuguaugugaaaggagaaccuaucauuaacuuuuacgacccccucgucuucccuuccgaugaguuugacgcuucuaucagccaggugaaugaaaagauuaaccagucccuggccuucauccgcaaaucugaugagcugcuccacaaugugaacgcuggcaagagcacaaccaauauuaugaucacgaccauuaucaucguuauuaucgucauucugcuuucccugaucgccguggggcuccugcuguauugcaaggccagaagcacacccgugacccuuucuaaagaccaacucuccggaauuaacaauaucgcuuucagcaacugaggacuagucccuguucccagagcccacuuuuuuuucuuuuuuugaaauaaaauagccugucuuucagaucuaaaaaaaaaaaaaaaaaaaaaaaaaaaaaaaaaaaaaaaaaaaaaaaaaaaaaaaaaaaaaaaaugcaucccccccccccccccccccccccccccccccaaaggcucuuuucagagccaccagaauu

SEQ ID NO: 1675 - RNA, 1930 nt, Artificial Sequence
  mRNA product Design a-4 comprising derived and/or modified sequence from HRSV(A2)__F_DSCav1_mut1 (opt6)
gggagacuccugucgggcggaaguaggaggaguagaguuuaaaaacaguacucuuuuuccgguucgggacguaguugaagcaacgacaagccggauaaccgcucuugagacaggaagcuuaccauggaacuauuaauacuaaaagcaaacgcuauaacaacaauacuaacagcagucacauucugcuuugcaucaggccaaaacaucacagaagaauuuuaccaaucaacaugcuccgccguaucgaaaggauaccuaggcgcauuaagaaccggaugguauacaucagucauaacaauugaacuaucuaacauaaaagaaaacaaauguaacggcacagaugccaaaguaaaacucaucaaacaagaauuagauaaauacaaaaacgcagucacugaacuacaacucuuaaugcaaucaacaccugcaacaggaucaggaucagcaauaugcucaggaguagccguauguaaaguacuacaccuagaaggagaagucaacaaaauaaaaucagcccuccuaaguacaaacaaagcugucguaucacuauccaaugguguuucaguacuaacuuucaaaguucuagaccuaaaaaacuacauagacaaacaacuacuaccaauacuaaauaaacaaaguuguucuauacccaacauagaaaccgucauagaauuucaacaaaaaaauaauagacuccuagaaauaacaagagaauuuucaguuaacgcagguguaacaaccccaguauccaccuauaugcuaacaaauucagaauuacuuucccuaaucaacgacaugcccauaacaaaugaccaaaaaaaauuaaugucaaacaacguccaaauaguucgucaacaaucauauucaauaaugugcauaauaaaagaagaagucuuagccuacguaguacaacuuccccuuuauggaguuaucgacacacccugcuggaaacuccacacuucaccacuauguacuacaaacacaaaagaaggauccaacaucugccucacaagaaccgaucgaggaugguacugugauaacgccggauccgucucauucuucccacaagcagaaacaugcaaaguacaaucaaacagaguauuuugcgacacaaugaacucccucacauuaccuucugaaguaaaccuauguaauguagacauauucaaccccaaauacgauugcaaaauaaugacaucaaagacagauguaucaucaagugucaucacaucccuaggagcaauugucucauguuaugguaaaacaaaaugcaccgcaucaaauaaaaacagaggcauaauaaaaaccuucucaaacgguugugacuacguauccaauaaaggcgucgacacaguaucaguagguaacacauuauauuguguaaacaaacaagaaggacagucccuauauguaaaaggagaaccaauaaucaacuucuacgacccacuuguuuucccuucugaugaauuugacgcaaguauaucacaaguaaaugaaaaaaucaaucaaucacuagccuuuauaagaaaaucagaugaauuauuacacaacguaaacgccggaaaaucaacaaccaacauaaugauaaccacaauaauaaucgucauaauagucauccuacuaucacucauagcaguuggacuccuacuauacugcaaagcacgaucaacaccaguaacauuauccaaagaccaacuaagugguaucaauaacaucgccuuuucaaacugaggacuagucccuguucccagagcccacuuuuuuuucuuuuuuugaaauaaaauagccugucuuucagaucuaaaaaaaaaaaaaaaaaaaaaaaaaaaaaaaaaaaaaaaaaaaaaaaaaaaaaaaaaaaaaaaaugcaucccccccccccccccccccccccccccccccaaaggcucuuuucagagccaccagaauu

SEQ ID NO: 1676 - RNA, 1930 nt, Artificial Sequence
  mRNA product Design a-4 comprising derived and/or modified sequence from HRSV(A2)__F_DSCav1_mut1 (opt11)
gggagacuccugucgggcggaaguaggaggaguagaguuuaaaaacaguacucuuuuuccgguucgggacguaguugaagcaacgacaagccggauaaccgcucuugagacaggaagcuuaccauggaacuccuaauccucaaagccaacgcaaucaccacaauccucacugccgucaccuucugcuucgccuccggccaaaacauaacagaagaauuuuaccaaucaaccuguucagcggucuccaaaggcuaccucggcgcccuccgcaccggcugguacaccuccgugaucaccauagaacucuccaacaucaaggaaaacaaaugcaacggcaccgacgcgaaggucaaacuuauuaaacaagaacucgacaaauacaaaaacgcagucaccgaacuacaacuccuaaugcaguccacgccagccaccggcucuggcucagccauaugcuccgguguggccguaugcaaaguccuacaccucgaaggagaagucaacaaaauaaaauccgcccuacuguccacaaacaaggccguagucucccucucaaacggcgucucaguacucaccuucaaaguccuagaccucaagaacuacaucgacaaacaacuccuacccauacuaaacaaacaauccugcucaauccccaacaucgaaaccguaauagaauuucaacaaaaaaacaacagacuccuggagaucacccgggaauuuuccguaaacgccggagucacaacacccgucucaaccuacaugcuaacgaacucagagcuccucucacuuaucaacgacaugcccauaacaaacgaccaaaaaaaacucauguccaacaacgugcaaaucguccgacaacaauccuacuccaucaugugcaucauuaaagaagaaguccucgcauacguaguccagcucccccucuacggcgucauagacacccccugcuggaaacuacacacaucaccccucugcacaacaaacaccaaagaaggcuccaacaucugccucacccgcaccgaccgaggcugguacugcgauaacgccggcagcgucuccuucuucccccaagcagaaaccugcaagguccaauccaaccgaguuuucugcgacacuaugaacucgcucacccuccccuccgaagucaaccucugcaacgucgacauuuucaaccccaaauacgacugcaaaaucaugaccuccaagaccgacguauccuccuccgucaucaccucccuaggcgccauaguaaguugcuacggcaaaaccaagugcacagcaagcaacaaaaaccgaggaauaaucaaaaccuucuccaacggcugcgacuacguauccaacaagggcgucgacaccguauccguagggaacacccuuuacugcguaaacaaacaagaaggacaaucacucuacguaaaaggcgaacccauaaucaacuucuacgacccccucguauuucccuccgacgaauuugacgcaucaaucucacaggucaacgaaaaaauaaaccaaucgcuagcauucaucagaaaaucagacgaacuccuacacaacgucaacgcaggcaagagcaccaccaacaucaugaucaccaccaucaucaucgucauaaucgucauacuacucucacucauagcagucggccuccuccuauacuguaaagcaaggucgaccccagucacccuauccaaagaccaacuaagcggcaucaacaacaucgcguucucaaacuaaggacuagucccuguucccagagcccacuuuuuuuucuuuuuuugaaauaaaauagccugucuuucagaucuaaaaaaaaaaaaaaaaaaaaaaaaaaaaaaaaaaaaaaaaaaaaaaaaaaaaaaaaaaaaaaaaugcaucccccccccccccccccccccccccccccccaaaggcucuuuucagagccaccagaauu

SEQ ID NO: 1677 - RNA, 1876 nt, Artificial Sequence
  mRNA product Design a-5 comprising derived and/or modified sequence from HRSV(A2)__F_DSCav1_mut1 (opt1)
gggagacuuucccauucuguagcagaauuugguguugccuguggucuuggucccgcggagaagcuuaccauggagcugcucauccugaaggccaacgccaucaccaccauccugacggcggugaccuucugcuucgccagcggccagaacaucaccgaggaguucuaccaguccacgugcagcgccgucuccaagggguaccucggcgcccugcggaccggcugguacaccuccgugaucaccaucgagcugagcaacaucaaggagaacaagugcaacgggaccgacgccaaggugaagcucaucaagcaggagcuggacaaguacaagaacgcggucacggagcugcagcuccugaugcaguccaccccggcaaccggcuccggcuccgccaucugcagcggcgucgccgugugcaaggugcugcaccucgagggggaggucaacaagaucaagagcgcccugcuguccaccaacaaggccguggugagccucuccaacggcgucagcgugcugaccuucaaggugcuggaccucaagaacuacaucgacaagcagcugcugcccauccugaacaagcagagcugcuccauccccaacaucgagacggugaucgaguuccagcagaagaacaaccggcuccuggagaucacccgcgaguucagcgugaacgccggggucaccacccccguguccacguacaugcugaccaacagcgagcuccugucccugaucaacgacaugccgaucaccaacgaccagaagaagcucaugagcaacaacgugcagaucguccggcagcaguccuacagcaucaugugcaucaucaaggaggaggugcuggcguacgugguccagcugccccucuacggcgugaucgacacccccugcuggaagcugcacacgagcccccugugcaccaccaacaccaaggagggguccaacaucugccucacgcgcaccgaccggggcugguacugcgacaacgccggcagcgucuccuucuucccgcaggccgagaccugcaaggugcagagcaaccgcguguucugcgacaccaugaacucccugacgcugcccagcgagguaaaccucugcaacgucgacaucuucaaccccaaguacgacugcaagaucaugaccuccaagaccgacgugagcuccagcgugaucaccucccugggggccaucgucagcugcuacggcaagacgaagugcaccgccagcaacaagaaccgggggaucaucaagaccuucuccaacggcugcgacuacgugagcaacaagggcguggacaccguguccgucgggaacacccuguacugcgugaacaagcaggagggccagagccucuacgugaagggggagcccaucaucaacuucuacgacccgcuggucuuccccuccgacgaguucgacgcgagcaucucccaggugaacgagaagaucaaccagagccuggccuucauccgcaaguccgacgagcugcuccacaacgugaacgccggcaagagcacgaccaacaucaugaucaccaccaucaucaucgucaucaucgugauccugcugucccucaucgccguggggcugcugcucuacugcaaggcccggagcacgcccgucacccuguccaaggaccagcugagcggcaucaacaacaucgcguucuccaacugaggacuagucccuguucccagagcccacuuuuuuuucuuuuuuugaaauaaaauagccugucuuucagaucuaaaaaaaaaaaaaaaaaaaaaaaaaaaaaaaaaaaaaaaaaaaaaaaaaaaaaaaaaaaaaaaaugcaucccccccccccccccccccccccccccccccaaaggcucuuuucagagccaccagaauu

SEQ ID NO: 1678 - RNA, 1876 nt, Artificial Sequence
  mRNA product Design a-5 comprising derived and/or modified sequence from HRSV(A2)__F_DSCav1_mut1 (opt1)
gggagacuuucccauucuguagcagaauuugguguugccuguggucuuggucccgcggagaagcuuaccauggagcugcucauccugaaggccaacgccaucaccaccauccugacggcggugaccuucugcuucgccagcggccagaacaucaccgaggaguucuaccaguccacgugcagcgccgucuccaagggguaccucggcgcccugcgcaccgggugguacaccagcgugaucaccaucgagcuguccaacaucaaggagaacaagugcaacggcaccgacgccaaggugaagcucaucaagcaggagcuggacaaguacaagaacgcggucacggagcugcagcuccugaugcagagcacccccgccaccggguccggcagcgccaucugcuccggcguggccgugugcaagguccugcaccucgagggggaggugaacaagaucaagagcgcgcugcuguccaccaacaaggccguggucagccucuccaacggcgugagcgugcugacguucaagguccuggaccucaagaacuacaucgacaagcagcugcugccgauccucaacaagcaguccugcagcauccccaacaucgagaccgugaucgaguuccagcagaagaacaaccggcugcuggagaucacccgcgaguucuccgugaacgccggggucaccacgcccgugagcaccuacaugcucaccaacuccgagcugcugagccucaucaacgacaugcccaucaccaacgaccagaagaagcugaugagcaacaacgugcagaucguccggcagcaguccuacagcaucaugugcaucaucaaggaggaggugcuggccuacgugguccagcucccgcuguacggcgugaucgacacgcccugcuggaagcugcacaccagcccccucugcaccaccaacacgaaggagggguccaacaucugccugacccgcaccgaccggggcugguacugcgacaacgccggcuccgugagcuucuucccccaggcggagaccugcaagguccaguccaaccgcguguucugcgacacgaugaacagccugacccucccguccgaggucaaccugugcaacguggacaucuucaaccccaaguacgacugcaagaucaugaccagcaagaccgacguguccagcuccgucaucacgagccugggggccaucguguccugcuacggcaagaccaagugcaccgccagcaacaagaaccgggggaucaucaagaccuucuccaacggcugcgacuacgugagcaacaagggcgucgacacgguguccguggggaacacccucuacugcgucaacaagcaggagggccagagccuguacgugaagggggagcccaucaucaacuucuacgacccccugguguucccgagcgacgaguucgacgccuccaucagccaggucaacgagaagaucaaccagucccucgccuucauccgcaagagcgacgagcugcugcacaacgugaacgcgggcaaguccaccaccaacaucaugaucaccacgaucaucaucgugaucaucgucauccuccugagccugaucgccguggggcuccugcuguacugcaaggcccgguccacccccgugacccugagcaaggaccagcucuccggcaucaacaacaucgccuucagcaacugaggacuagucccuguucccagagcccacuuuuuuuucuuuuuuugaaauaaaauagccugucuuucagaucuaaaaaaaaaaaaaaaaaaaaaaaaaaaaaaaaaaaaaaaaaaaaaaaaaaaaaaaaaaaaaaaaugcaucccccccccccccccccccccccccccccccaaaggcucuuuucagagccaccagaauu

SEQ ID NO: 1679 - RNA, 1876 nt, Artificial Sequence
  mRNA product Design a-5 comprising derived and/or modified sequence from HRSV(A2)__F_DSCav1_mut1 (opt2)
gggagacuuucccauucuguagcagaauuugguguugccuguggucuuggucccgcggagaagcuuaccauggagcuccucauccucaaggccaacgccaucaccaccauccucaccgccgucaccuucugcuucgccuccggccagaacaucaccgaggaguucuaccaguccaccugcuccgccgucuccaagggcuaccucggcgcccuccgcaccggcugguacaccuccgucaucaccaucgagcucuccaacaucaaggagaacaagugcaacggcaccgacgccaaggucaagcucaucaagcaggagcucgacaaguacaagaacgccgucaccgagcuccagcuccucaugcaguccacccccgccaccggcuccggcuccgccaucugcuccggcgucgccgucugcaagguccuccaccucgagggcgaggucaacaagaucaaguccgcccuccucuccaccaacaaggccgucgucucccucuccaacggcgucuccguccucaccuucaagguccucgaccucaagaacuacaucgacaagcagcuccuccccauccucaacaagcaguccugcuccauccccaacaucgagaccgucaucgaguuccagcagaagaacaaccgccuccucgagaucacccgcgaguucuccgucaacgccggcgucaccacccccgucuccaccuacaugcucaccaacuccgagcuccucucccucaucaacgacaugcccaucaccaacgaccagaagaagcucauguccaacaacguccagaucguccgccagcaguccuacuccaucaugugcaucaucaaggaggagguccucgccuacgucguccagcucccccucuacggcgucaucgacacccccugcuggaagcuccacaccuccccccucugcaccaccaacaccaaggagggcuccaacaucugccucacccgcaccgaccgcggcugguacugcgacaacgccggcuccgucuccuucuucccccaggccgagaccugcaagguccaguccaaccgcgucuucugcgacaccaugaacucccucacccuccccuccgaggucaaccucugcaacgucgacaucuucaaccccaaguacgacugcaagaucaugaccuccaagaccgacgucuccuccuccgucaucaccucccucggcgccaucgucuccugcuacggcaagaccaagugcaccgccuccaacaagaaccgcggcaucaucaagaccuucuccaacggcugcgacuacgucuccaacaagggcgucgacaccgucuccgucggcaacacccucuacugcgucaacaagcaggagggccagucccucuacgucaagggcgagcccaucaucaacuucuacgacccccucgucuuccccuccgacgaguucgacgccuccaucucccaggucaacgagaagaucaaccagucccucgccuucauccgcaaguccgacgagcuccuccacaacgucaacgccggcaaguccaccaccaacaucaugaucaccaccaucaucaucgucaucaucgucauccuccucucccucaucgccgucggccuccuccucuacugcaaggcccgcuccacccccgucacccucuccaaggaccagcucuccggcaucaacaacaucgccuucuccaacugaggacuagucccuguucccagagcccacuuuuuuuucuuuuuuugaaauaaaauagccugucuuucagaucuaaaaaaaaaaaaaaaaaaaaaaaaaaaaaaaaaaaaaaaaaaaaaaaaaaaaaaaaaaaaaaaaugcaucccccccccccccccccccccccccccccccaaaggcucuuuucagagccaccagaauu

SEQ ID NO: 1680 - RNA, 1876 nt, Artificial Sequence
  mRNA product Design a-5 comprising derived and/or modified sequence from HRSV(A2)__F_DSCav1_mut1 (opt3)
gggagacuuucccauucuguagcagaauuugguguugccuguggucuuggucccgcggagaagcuuaccauggagcugcucauccuuaaggccaacgcuauuaccacaauacugacugcagugacguucugcuuugccagcggccagaauaucaccgaagaguucuaccaauccacauguucugcggucucaaaaggguauuugggagcuuuaagaacugguugguacaccaguguuauuacaaucgaacugagcaacauuaaggagaauaaaugcaacggcaccgacgccaaggugaaacuaaucaagcaggaacucgauaaguauaaaaaugcaguaacugagcugcagcuucugaugcaguccacacccgccaccgggucuggaucggcuauauguucaggcguggcagucugcaagguguugcaccucgagggugaaguuaacaaaaucaagagcgcccugcugaguacgaauaaagcuguggucucccucucuaacggggugagcguauuaacuuuuaagguucuggaccuuaagaauuacauugauaaacaauugcugccuauccuaaacaagcaguccuguucaauuccaaauaucgagaccgugauagaguuccagcagaaaaacaauaggcuccuggaaauuacacgggaguuuagugucaacgccggagugacuaccccggugagcacauauaugcuuaccaauucugaacuguugucccucaucaacgacaugcccauuacgaacgaucaaaagaaacugaugucaaauaacguccagaucguucgccagcagagcuacaguaucaugugcauuauaaaggaggaaguguuagcguauguagugcaacugccucucuacggcgucaucgacacuccauguuggaaacuucauacaucuccccugugcaccacuaauacaaaggagggcuccaacauuuguuugacccgaacggaucgugggugguacugcgacaaugcaggaagcgugucguucuuuccucaggccgaaaccuguaagguucagucuaacagaguguucugcgauacaaugaacucccuaacucugccaucagaggucaaucucugcaauguggacaucuuuaaccccaaauaugauuguaagauaaugaccaguaaaacagacguaagcuccucuguuauuacuagccugggugcuaucgugucaugcuacggcaagaccaaauguacagccaguaauaagaacagggggaucauuaagaccuucuccaauggaugcgauuaugucagcaacaaaggcguggacacugucucuguggguaauacgcuuuacuguguuaacaagcaagaggggcagucacuguaugugaaaggagaaccuaucauuaacuuuuacgacccauugguauucccgagugaugaguuugacgcaagcauaucccaggucaaugaaaagaucaaccagucucucgcuuucauucggaaaucggaugagcuguuacacaaugugaacgccggcaagagcacaaccaauaucaugaucacuaccauuauaaucguuauuaucgugauucugcuaucccucaucgcggucggccugcuuuuguauugcaaggcccgcucaacacccgugacccugaguaaagaccaacucucugggauaaacaauaucgcauucagcaacugaggacuagucccuguucccagagcccacuuuuuuuucuuuuuuugaaauaaaauagccugucuuucagaucuaaaaaaaaaaaaaaaaaaaaaaaaaaaaaaaaaaaaaaaaaaaaaaaaaaaaaaaaaaaaaaaaugcaucccccccccccccccccccccccccccccccaaaggcucuuuucagagccaccagaauu

SEQ ID NO: 1681 - RNA, 1876 nt, Artificial Sequence
  mRNA product Design a-5 comprising derived and/or modified sequence from HRSV(A2)__F_DSCav1_mut1 (opt4)
gggagacuuucccauucuguagcagaauuugguguugccuguggucuuggucccgcggagaagcuuaccauggagcugcugauccugaaggccaacgccaucaccaccauccugaccgccgugaccuucugcuucgccagcggccagaacaucaccgaggaguucuaccagagcaccugcagcgccgugagcaagggcuaccugggcgcccugagaaccggcugguacaccagcgugaucaccaucgagcugagcaacaucaaggagaacaagugcaacggcaccgacgccaaggugaagcugaucaagcaggagcuggacaaguacaagaacgccgugaccgagcugcagcugcugaugcagagcacccccgccaccggcagcggcagcgccaucugcagcggcguggccgugugcaaggugcugcaccuggagggcgaggugaacaagaucaagagcgcccugcugagcaccaacaaggccguggugagccugagcaacggcgugagcgugcugaccuucaaggugcuggaccugaagaacuacaucgacaagcagcugcugcccauccugaacaagcagagcugcagcauccccaacaucgagaccgugaucgaguuccagcagaagaacaacagacugcuggagaucaccagagaguucagcgugaacgccggcgugaccacccccgugagcaccuacaugcugaccaacagcgagcugcugagccugaucaacgacaugcccaucaccaacgaccagaagaagcugaugagcaacaacgugcagaucgugagacagcagagcuacagcaucaugugcaucaucaaggaggaggugcuggccuacguggugcagcugccccuguacggcgugaucgacacccccugcuggaagcugcacaccagcccccugugcaccaccaacaccaaggagggcagcaacaucugccugaccagaaccgacagaggcugguacugcgacaacgccggcagcgugagcuucuucccccaggccgagaccugcaaggugcagagcaacagaguguucugcgacaccaugaacagccugacccugcccagcgaggugaaccugugcaacguggacaucuucaaccccaaguacgacugcaagaucaugaccagcaagaccgacgugagcagcagcgugaucaccagccugggcgccaucgugagcugcuacggcaagaccaagugcaccgccagcaacaagaacagaggcaucaucaagaccuucagcaacggcugcgacuacgugagcaacaagggcguggacaccgugagcgugggcaacacccuguacugcgugaacaagcaggagggccagagccuguacgugaagggcgagcccaucaucaacuucuacgacccccugguguuccccagcgacgaguucgacgccagcaucagccaggugaacgagaagaucaaccagagccuggccuucaucagaaagagcgacgagcugcugcacaacgugaacgccggcaagagcaccaccaacaucaugaucaccaccaucaucaucgugaucaucgugauccugcugagccugaucgccgugggccugcugcuguacugcaaggccagaagcacccccgugacccugagcaaggaccagcugagcggcaucaacaacaucgccuucagcaacugaggacuagucccuguucccagagcccacuuuuuuuucuuuuuuugaaauaaaauagccugucuuucagaucuaaaaaaaaaaaaaaaaaaaaaaaaaaaaaaaaaaaaaaaaaaaaaaaaaaaaaaaaaaaaaaaaugcaucccccccccccccccccccccccccccccccaaaggcucuuuucagagccaccagaauu

SEQ ID NO: 1682 - RNA, 1876 nt, Artificial Sequence
  mRNA product Design a-5 comprising derived and/or modified sequence from HRSV(A2)__F_DSCav1_mut1 (opt5)
gggagacuuucccauucuguagcagaauuugguguugccuguggucuuggucccgcggagaagcuuaccauggagcugcucauccugaaggccaacgcuauuaccacaauccuuacggccgugaccuucugcuuugcgagcggccagaauauuacagaagaguucuaccaauccaccuguucugcugucagcaaaggguaucugggagcccucagaacaggcugguacaccuccguuaucacaauugaacugucuaacaucaaggagaauaaaugcaacgggaccgacgccaaggugaaacuuaucaagcaggaacuggauaaguauaaaaaugcugugacggagcuccagcugcugaugcagagcacccccgccacaggauccggcucugcuauuuguagcggggucgccgugugcaagguucuccaccuggagggagaagugaacaaaaucaaguccgcgcuucugagcaccaauaaagccgucgugucucucuccaacggcguuagcgugcugacauuuaagguccuugaccugaagaauuacauugauaaacaacuccugccuauccugaacaagcagucuuguuccauuccgaauaucgagaccgugauugaguuccagcagaaaaacaaucggcuccuggaaaucacgcgcgaguuuagcgugaacgcuggcgucacaacccccguuucuacauauaugcuuaccaauuccgaacugcucagccugaucaacgacaugccuauuaccaacgaucaaaagaaacuuauguccaauaacgugcagaucgugagacagcagucuuacagcauuaugugcaucauuaaggaggaaguccuggccuaugugguucaacucccccuguacggggugaucgacacaccuuguuggaaacugcauacgagcccccucugcaccacaaauaccaaggagggauccaacaucugucugacacggaccgaucgcggcugguacugcgacaaugcugggucugucuccuucuuuccucaggccgaaacguguaaggugcagagcaacagaguuuucugcgauacaaugaacucucuuacccugccgagcgaggugaaucucugcaaugucgacauuuuuaaccccaaauaugauuguaagaucaugaccuccaaaacagacgugucuagcuccgucauuaccagccugggagcgaucgugucuugcuacggcaagacaaaauguacggccuccaauaagaaccgggggauuaucaagaccuucagcaauggaugcgauuauguuucuaacaaaggcguggacacagucuccgugggcaauacccuuuacuguguuaacaagcaagaggggcagagccuguaugugaaaggagaaccuaucauuaacuuuuacgacccccucgucuucccuuccgaugaguuugacgcuucuaucagccaggugaaugaaaagauuaaccagucccuggccuucauccgcaaaucugaugagcugcuccacaaugugaacgcuggcaagagcacaaccaauauuaugaucacgaccauuaucaucguuauuaucgucauucugcuuucccugaucgccguggggcuccugcuguauugcaaggccagaagcacacccgugacccuuucuaaagaccaacucuccggaauuaacaauaucgcuuucagcaacugaggacuagucccuguucccagagcccacuuuuuuuucuuuuuuugaaauaaaauagccugucuuucagaucuaaaaaaaaaaaaaaaaaaaaaaaaaaaaaaaaaaaaaaaaaaaaaaaaaaaaaaaaaaaaaaaaugcaucccccccccccccccccccccccccccccccaaaggcucuuuucagagccaccagaauu

SEQ ID NO: 1683 - RNA, 1876 nt, Artificial Sequence
  mRNA product Design a-5 comprising derived and/or modified sequence from HRSV(A2)__F_DSCav1_mut1 (opt6)
gggagacuuucccauucuguagcagaauuugguguugccuguggucuuggucccgcggagaagcuuaccauggaacuauuaauacuaaaagcaaacgcuauaacaacaauacuaacagcagucacauucugcuuugcaucaggccaaaacaucacagaagaauuuuaccaaucaacaugcuccgccguaucgaaaggauaccuaggcgcauuaagaaccggaugguauacaucagucauaacaauugaacuaucuaacauaaaagaaaacaaauguaacggcacagaugccaaaguaaaacucaucaaacaagaauuagauaaauacaaaaacgcagucacugaacuacaacucuuaaugcaaucaacaccugcaacaggaucaggaucagcaauaugcucaggaguagccguauguaaaguacuacaccuagaaggagaagucaacaaaauaaaaucagcccuccuaaguacaaacaaagcugucguaucacuauccaaugguguuucaguacuaacuuucaaaguucuagaccuaaaaaacuacauagacaaacaacuacuaccaauacuaaauaaacaaaguuguucuauacccaacauagaaaccgucauagaauuucaacaaaaaaauaauagacuccuagaaauaacaagagaauuuucaguuaacgcagguguaacaaccccaguauccaccuauaugcuaacaaauucagaauuacuuucccuaaucaacgacaugcccauaacaaaugaccaaaaaaaauuaaugucaaacaacguccaaauaguucgucaacaaucauauucaauaaugugcauaauaaaagaagaagucuuagccuacguaguacaacuuccccuuuauggaguuaucgacacacccugcuggaaacuccacacuucaccacuauguacuacaaacacaaaagaaggauccaacaucugccucacaagaaccgaucgaggaugguacugugauaacgccggauccgucucauucuucccacaagcagaaacaugcaaaguacaaucaaacagaguauuuugcgacacaaugaacucccucacauuaccuucugaaguaaaccuauguaauguagacauauucaaccccaaauacgauugcaaaauaaugacaucaaagacagauguaucaucaagugucaucacaucccuaggagcaauugucucauguuaugguaaaacaaaaugcaccgcaucaaauaaaaacagaggcauaauaaaaaccuucucaaacgguugugacuacguauccaauaaaggcgucgacacaguaucaguagguaacacauuauauuguguaaacaaacaagaaggacagucccuauauguaaaaggagaaccaauaaucaacuucuacgacccacuuguuuucccuucugaugaauuugacgcaaguauaucacaaguaaaugaaaaaaucaaucaaucacuagccuuuauaagaaaaucagaugaauuauuacacaacguaaacgccggaaaaucaacaaccaacauaaugauaaccacaauaauaaucgucauaauagucauccuacuaucacucauagcaguuggacuccuacuauacugcaaagcacgaucaacaccaguaacauuauccaaagaccaacuaagugguaucaauaacaucgccuuuucaaacugaggacuagucccuguucccagagcccacuuuuuuuucuuuuuuugaaauaaaauagccugucuuucagaucuaaaaaaaaaaaaaaaaaaaaaaaaaaaaaaaaaaaaaaaaaaaaaaaaaaaaaaaaaaaaaaaaugcaucccccccccccccccccccccccccccccccaaaggcucuuuucagagccaccagaauu

SEQ ID NO: 1684 - RNA, 1876 nt, Artificial Sequence
  mRNA product Design a-5 comprising derived and/or modified sequence from HRSV(A2)__F_DSCav1_mut1 (opt11)
gggagacuuucccauucuguagcagaauuugguguugccuguggucuuggucccgcggagaagcuuaccauggaacuccuaauccucaaagccaacgcaaucaccacaauccucacugccgucaccuucugcuucgccuccggccaaaacauaacagaagaauuuuaccaaucaaccuguucagcggucuccaaaggcuaccucggcgcccuccgcaccggcugguacaccuccgugaucaccauagaacucuccaacaucaaggaaaacaaaugcaacggcaccgacgcgaaggucaaacuuauuaaacaagaacucgacaaauacaaaaacgcagucaccgaacuacaacuccuaaugcaguccacgccagccaccggcucuggcucagccauaugcuccgguguggccguaugcaaaguccuacaccucgaaggagaagucaacaaaauaaaauccgcccuacuguccacaaacaaggccguagucucccucucaaacggcgucucaguacucaccuucaaaguccuagaccucaagaacuacaucgacaaacaacuccuacccauacuaaacaaacaauccugcucaauccccaacaucgaaaccguaauagaauuucaacaaaaaaacaacagacuccuggagaucacccgggaauuuuccguaaacgccggagucacaacacccgucucaaccuacaugcuaacgaacucagagcuccucucacuuaucaacgacaugcccauaacaaacgaccaaaaaaaacucauguccaacaacgugcaaaucguccgacaacaauccuacuccaucaugugcaucauuaaagaagaaguccucgcauacguaguccagcucccccucuacggcgucauagacacccccugcuggaaacuacacacaucaccccucugcacaacaaacaccaaagaaggcuccaacaucugccucacccgcaccgaccgaggcugguacugcgauaacgccggcagcgucuccuucuucccccaagcagaaaccugcaagguccaauccaaccgaguuuucugcgacacuaugaacucgcucacccuccccuccgaagucaaccucugcaacgucgacauuuucaaccccaaauacgacugcaaaaucaugaccuccaagaccgacguauccuccuccgucaucaccucccuaggcgccauaguaaguugcuacggcaaaaccaagugcacagcaagcaacaaaaaccgaggaauaaucaaaaccuucuccaacggcugcgacuacguauccaacaagggcgucgacaccguauccguagggaacacccuuuacugcguaaacaaacaagaaggacaaucacucuacguaaaaggcgaacccauaaucaacuucuacgacccccucguauuucccuccgacgaauuugacgcaucaaucucacaggucaacgaaaaaauaaaccaaucgcuagcauucaucagaaaaucagacgaacuccuacacaacgucaacgcaggcaagagcaccaccaacaucaugaucaccaccaucaucaucgucauaaucgucauacuacucucacucauagcagucggccuccuccuauacuguaaagcaaggucgaccccagucacccuauccaaagaccaacuaagcggcaucaacaacaucgcguucucaaacuaaggacuagucccuguucccagagcccacuuuuuuuucuuuuuuugaaauaaaauagccugucuuucagaucuaaaaaaaaaaaaaaaaaaaaaaaaaaaaaaaaaaaaaaaaaaaaaaaaaaaaaaaaaaaaaaaaugcaucccccccccccccccccccccccccccccccaaaggcucuuuucagagccaccagaauu

SEQ ID NO: 1685 - RNA, 2057 nt, Artificial Sequence
  mRNA product Design b-1 comprising derived and/or modified sequence from HRSV(A2)__F_DSCav1_mut1 (opt1)
gggagacggagacggccugcaggaccugcucucucagcccucagccgaggccuacgccgagccgagugcgcagccgacgaccgggaggagccgcagccuucaacucugagguacugugauccgcgcugcccgccgggccgccccaguccgcugcugcggcaccuccuucccucgcgcccucuucgcucgccagcgccuucccugugagccugcgucaccgcggccgccaagcuuaccauggagcugcucauccugaaggccaacgccaucaccaccauccugacggcggugaccuucugcuucgccagcggccagaacaucaccgaggaguucuaccaguccacgugcagcgccgucuccaagggguaccucggcgcccugcggaccggcugguacaccuccgugaucaccaucgagcugagcaacaucaaggagaacaagugcaacgggaccgacgccaaggugaagcucaucaagcaggagcuggacaaguacaagaacgcggucacggagcugcagcuccugaugcaguccaccccggcaaccggcuccggcuccgccaucugcagcggcgucgccgugugcaaggugcugcaccucgagggggaggucaacaagaucaagagcgcccugcuguccaccaacaaggccguggugagccucuccaacggcgucagcgugcugaccuucaaggugcuggaccucaagaacuacaucgacaagcagcugcugcccauccugaacaagcagagcugcuccauccccaacaucgagacggugaucgaguuccagcagaagaacaaccggcuccuggagaucacccgcgaguucagcgugaacgccggggucaccacccccguguccacguacaugcugaccaacagcgagcuccugucccugaucaacgacaugccgaucaccaacgaccagaagaagcucaugagcaacaacgugcagaucguccggcagcaguccuacagcaucaugugcaucaucaaggaggaggugcuggcguacgugguccagcugccccucuacggcgugaucgacacccccugcuggaagcugcacacgagcccccugugcaccaccaacaccaaggagggguccaacaucugccucacgcgcaccgaccggggcugguacugcgacaacgccggcagcgucuccuucuucccgcaggccgagaccugcaaggugcagagcaaccgcguguucugcgacaccaugaacucccugacgcugcccagcgagguaaaccucugcaacgucgacaucuucaaccccaaguacgacugcaagaucaugaccuccaagaccgacgugagcuccagcgugaucaccucccugggggccaucgucagcugcuacggcaagacgaagugcaccgccagcaacaagaaccgggggaucaucaagaccuucuccaacggcugcgacuacgugagcaacaagggcguggacaccguguccgucgggaacacccuguacugcgugaacaagcaggagggccagagccucuacgugaagggggagcccaucaucaacuucuacgacccgcuggucuuccccuccgacgaguucgacgcgagcaucucccaggugaacgagaagaucaaccagagccuggccuucauccgcaaguccgacgagcugcuccacaacgugaacgccggcaagagcacgaccaacaucaugaucaccaccaucaucaucgucaucaucgugauccugcugucccucaucgccguggggcugcugcucuacugcaaggcccggagcacgcccgucacccuguccaaggaccagcugagcggcaucaacaacaucgcguucuccaacugaggacuaguguccaccugucccuccugggcugcuggauugucucguuuuccugccaaauaaacaggaucagcgcuuuacagaucuaaaaaaaaaaaaaaaaaaaaaaaaaaaaaaaaaaaaaaaaaaaaaaaaaaaaaaaaaaaaaaaaugcaucccccccccccccccccccccccccccccccaaaggcucuuuucagagccaccagaauu

SEQ ID NO: 1686 - RNA, 2057 nt, Artificial Sequence
  mRNA product Design b-1 comprising derived and/or modified sequence from HRSV(A2)__F_DSCav1_mut1 (opt1)
gggagacggagacggccugcaggaccugcucucucagcccucagccgaggccuacgccgagccgagugcgcagccgacgaccgggaggagccgcagccuucaacucugagguacugugauccgcgcugcccgccgggccgccccaguccgcugcugcggcaccuccuucccucgcgcccucuucgcucgccagcgccuucccugugagccugcgucaccgcggccgccaagcuuaccauggagcugcucauccugaaggccaacgccaucaccaccauccugacggcggugaccuucugcuucgccagcggccagaacaucaccgaggaguucuaccaguccacgugcagcgccgucuccaagggguaccucggcgcccugcgcaccgggugguacaccagcgugaucaccaucgagcuguccaacaucaaggagaacaagugcaacggcaccgacgccaaggugaagcucaucaagcaggagcuggacaaguacaagaacgcggucacggagcugcagcuccugaugcagagcacccccgccaccggguccggcagcgccaucugcuccggcguggccgugugcaagguccugcaccucgagggggaggugaacaagaucaagagcgcgcugcuguccaccaacaaggccguggucagccucuccaacggcgugagcgugcugacguucaagguccuggaccucaagaacuacaucgacaagcagcugcugccgauccucaacaagcaguccugcagcauccccaacaucgagaccgugaucgaguuccagcagaagaacaaccggcugcuggagaucacccgcgaguucuccgugaacgccggggucaccacgcccgugagcaccuacaugcucaccaacuccgagcugcugagccucaucaacgacaugcccaucaccaacgaccagaagaagcugaugagcaacaacgugcagaucguccggcagcaguccuacagcaucaugugcaucaucaaggaggaggugcuggccuacgugguccagcucccgcuguacggcgugaucgacacgcccugcuggaagcugcacaccagcccccucugcaccaccaacacgaaggagggguccaacaucugccugacccgcaccgaccggggcugguacugcgacaacgccggcuccgugagcuucuucccccaggcggagaccugcaagguccaguccaaccgcguguucugcgacacgaugaacagccugacccucccguccgaggucaaccugugcaacguggacaucuucaaccccaaguacgacugcaagaucaugaccagcaagaccgacguguccagcuccgucaucacgagccugggggccaucguguccugcuacggcaagaccaagugcaccgccagcaacaagaaccgggggaucaucaagaccuucuccaacggcugcgacuacgugagcaacaagggcgucgacacgguguccguggggaacacccucuacugcgucaacaagcaggagggccagagccuguacgugaagggggagcccaucaucaacuucuacgacccccugguguucccgagcgacgaguucgacgccuccaucagccaggucaacgagaagaucaaccagucccucgccuucauccgcaagagcgacgagcugcugcacaacgugaacgcgggcaaguccaccaccaacaucaugaucaccacgaucaucaucgugaucaucgucauccuccugagccugaucgccguggggcuccugcuguacugcaaggcccgguccacccccgugacccugagcaaggaccagcucuccggcaucaacaacaucgccuucagcaacugaggacuaguguccaccugucccuccugggcugcuggauugucucguuuuccugccaaauaaacaggaucagcgcuuuacagaucuaaaaaaaaaaaaaaaaaaaaaaaaaaaaaaaaaaaaaaaaaaaaaaaaaaaaaaaaaaaaaaaaugcaucccccccccccccccccccccccccccccccaaaggcucuuuucagagccaccagaauu

SEQ ID NO: 1687 - RNA, 2057 nt, Artificial Sequence
  mRNA product Design b-1 comprising derived and/or modified sequence from HRSV(A2)__F_DSCav1_mut1 (opt2)
gggagacggagacggccugcaggaccugcucucucagcccucagccgaggccuacgccgagccgagugcgcagccgacgaccgggaggagccgcagccuucaacucugagguacugugauccgcgcugcccgccgggccgccccaguccgcugcugcggcaccuccuucccucgcgcccucuucgcucgccagcgccuucccugugagccugcgucaccgcggccgccaagcuuaccauggagcuccucauccucaaggccaacgccaucaccaccauccucaccgccgucaccuucugcuucgccuccggccagaacaucaccgaggaguucuaccaguccaccugcuccgccgucuccaagggcuaccucggcgcccuccgcaccggcugguacaccuccgucaucaccaucgagcucuccaacaucaaggagaacaagugcaacggcaccgacgccaaggucaagcucaucaagcaggagcucgacaaguacaagaacgccgucaccgagcuccagcuccucaugcaguccacccccgccaccggcuccggcuccgccaucugcuccggcgucgccgucugcaagguccuccaccucgagggcgaggucaacaagaucaaguccgcccuccucuccaccaacaaggccgucgucucccucuccaacggcgucuccguccucaccuucaagguccucgaccucaagaacuacaucgacaagcagcuccuccccauccucaacaagcaguccugcuccauccccaacaucgagaccgucaucgaguuccagcagaagaacaaccgccuccucgagaucacccgcgaguucuccgucaacgccggcgucaccacccccgucuccaccuacaugcucaccaacuccgagcuccucucccucaucaacgacaugcccaucaccaacgaccagaagaagcucauguccaacaacguccagaucguccgccagcaguccuacuccaucaugugcaucaucaaggaggagguccucgccuacgucguccagcucccccucuacggcgucaucgacacccccugcuggaagcuccacaccuccccccucugcaccaccaacaccaaggagggcuccaacaucugccucacccgcaccgaccgcggcugguacugcgacaacgccggcuccgucuccuucuucccccaggccgagaccugcaagguccaguccaaccgcgucuucugcgacaccaugaacucccucacccuccccuccgaggucaaccucugcaacgucgacaucuucaaccccaaguacgacugcaagaucaugaccuccaagaccgacgucuccuccuccgucaucaccucccucggcgccaucgucuccugcuacggcaagaccaagugcaccgccuccaacaagaaccgcggcaucaucaagaccuucuccaacggcugcgacuacgucuccaacaagggcgucgacaccgucuccgucggcaacacccucuacugcgucaacaagcaggagggccagucccucuacgucaagggcgagcccaucaucaacuucuacgacccccucgucuuccccuccgacgaguucgacgccuccaucucccaggucaacgagaagaucaaccagucccucgccuucauccgcaaguccgacgagcuccuccacaacgucaacgccggcaaguccaccaccaacaucaugaucaccaccaucaucaucgucaucaucgucauccuccucucccucaucgccgucggccuccuccucuacugcaaggcccgcuccacccccgucacccucuccaaggaccagcucuccggcaucaacaacaucgccuucuccaacugaggacuaguguccaccugucccuccugggcugcuggauugucucguuuuccugccaaauaaacaggaucagcgcuuuacagaucuaaaaaaaaaaaaaaaaaaaaaaaaaaaaaaaaaaaaaaaaaaaaaaaaaaaaaaaaaaaaaaaaugcaucccccccccccccccccccccccccccccccaaaggcucuuuucagagccaccagaauu

SEQ ID NO: 1688 - RNA, 2057 nt, Artificial Sequence
  mRNA product Design b-1 comprising derived and/or modified sequence from HRSV(A2)__F_DSCav1_mut1 (opt3)
gggagacggagacggccugcaggaccugcucucucagcccucagccgaggccuacgccgagccgagugcgcagccgacgaccgggaggagccgcagccuucaacucugagguacugugauccgcgcugcccgccgggccgccccaguccgcugcugcggcaccuccuucccucgcgcccucuucgcucgccagcgccuucccugugagccugcgucaccgcggccgccaagcuuaccauggagcugcucauccuuaaggccaacgcuauuaccacaauacugacugcagugacguucugcuuugccagcggccagaauaucaccgaagaguucuaccaauccacauguucugcggucucaaaaggguauuugggagcuuuaagaacugguugguacaccaguguuauuacaaucgaacugagcaacauuaaggagaauaaaugcaacggcaccgacgccaaggugaaacuaaucaagcaggaacucgauaaguauaaaaaugcaguaacugagcugcagcuucugaugcaguccacacccgccaccgggucuggaucggcuauauguucaggcguggcagucugcaagguguugcaccucgagggugaaguuaacaaaaucaagagcgcccugcugaguacgaauaaagcuguggucucccucucuaacggggugagcguauuaacuuuuaagguucuggaccuuaagaauuacauugauaaacaauugcugccuauccuaaacaagcaguccuguucaauuccaaauaucgagaccgugauagaguuccagcagaaaaacaauaggcuccuggaaauuacacgggaguuuagugucaacgccggagugacuaccccggugagcacauauaugcuuaccaauucugaacuguugucccucaucaacgacaugcccauuacgaacgaucaaaagaaacugaugucaaauaacguccagaucguucgccagcagagcuacaguaucaugugcauuauaaaggaggaaguguuagcguauguagugcaacugccucucuacggcgucaucgacacuccauguuggaaacuucauacaucuccccugugcaccacuaauacaaaggagggcuccaacauuuguuugacccgaacggaucgugggugguacugcgacaaugcaggaagcgugucguucuuuccucaggccgaaaccuguaagguucagucuaacagaguguucugcgauacaaugaacucccuaacucugccaucagaggucaaucucugcaauguggacaucuuuaaccccaaauaugauuguaagauaaugaccaguaaaacagacguaagcuccucuguuauuacuagccugggugcuaucgugucaugcuacggcaagaccaaauguacagccaguaauaagaacagggggaucauuaagaccuucuccaauggaugcgauuaugucagcaacaaaggcguggacacugucucuguggguaauacgcuuuacuguguuaacaagcaagaggggcagucacuguaugugaaaggagaaccuaucauuaacuuuuacgacccauugguauucccgagugaugaguuugacgcaagcauaucccaggucaaugaaaagaucaaccagucucucgcuuucauucggaaaucggaugagcuguuacacaaugugaacgccggcaagagcacaaccaauaucaugaucacuaccauuauaaucguuauuaucgugauucugcuaucccucaucgcggucggccugcuuuuguauugcaaggcccgcucaacacccgugacccugaguaaagaccaacucucugggauaaacaauaucgcauucagcaacugaggacuaguguccaccugucccuccugggcugcuggauugucucguuuuccugccaaauaaacaggaucagcgcuuuacagaucuaaaaaaaaaaaaaaaaaaaaaaaaaaaaaaaaaaaaaaaaaaaaaaaaaaaaaaaaaaaaaaaaugcaucccccccccccccccccccccccccccccccaaaggcucuuuucagagccaccagaauu

SEQ ID NO: 1689 - RNA, 2057 nt, Artificial Sequence
  mRNA product Design b-1 comprising derived and/or modified sequence from HRSV(A2)__F_DSCav1_mut1 (opt4)
gggagacggagacggccugcaggaccugcucucucagcccucagccgaggccuacgccgagccgagugcgcagccgacgaccgggaggagccgcagccuucaacucugagguacugugauccgcgcugcccgccgggccgccccaguccgcugcugcggcaccuccuucccucgcgcccucuucgcucgccagcgccuucccugugagccugcgucaccgcggccgccaagcuuaccauggagcugcugauccugaaggccaacgccaucaccaccauccugaccgccgugaccuucugcuucgccagcggccagaacaucaccgaggaguucuaccagagcaccugcagcgccgugagcaagggcuaccugggcgcccugagaaccggcugguacaccagcgugaucaccaucgagcugagcaacaucaaggagaacaagugcaacggcaccgacgccaaggugaagcugaucaagcaggagcuggacaaguacaagaacgccgugaccgagcugcagcugcugaugcagagcacccccgccaccggcagcggcagcgccaucugcagcggcguggccgugugcaaggugcugcaccuggagggcgaggugaacaagaucaagagcgcccugcugagcaccaacaaggccguggugagccugagcaacggcgugagcgugcugaccuucaaggugcuggaccugaagaacuacaucgacaagcagcugcugcccauccugaacaagcagagcugcagcauccccaacaucgagaccgugaucgaguuccagcagaagaacaacagacugcuggagaucaccagagaguucagcgugaacgccggcgugaccacccccgugagcaccuacaugcugaccaacagcgagcugcugagccugaucaacgacaugcccaucaccaacgaccagaagaagcugaugagcaacaacgugcagaucgugagacagcagagcuacagcaucaugugcaucaucaaggaggaggugcuggccuacguggugcagcugccccuguacggcgugaucgacacccccugcuggaagcugcacaccagcccccugugcaccaccaacaccaaggagggcagcaacaucugccugaccagaaccgacagaggcugguacugcgacaacgccggcagcgugagcuucuucccccaggccgagaccugcaaggugcagagcaacagaguguucugcgacaccaugaacagccugacccugcccagcgaggugaaccugugcaacguggacaucuucaaccccaaguacgacugcaagaucaugaccagcaagaccgacgugagcagcagcgugaucaccagccugggcgccaucgugagcugcuacggcaagaccaagugcaccgccagcaacaagaacagaggcaucaucaagaccuucagcaacggcugcgacuacgugagcaacaagggcguggacaccgugagcgugggcaacacccuguacugcgugaacaagcaggagggccagagccuguacgugaagggcgagcccaucaucaacuucuacgacccccugguguuccccagcgacgaguucgacgccagcaucagccaggugaacgagaagaucaaccagagccuggccuucaucagaaagagcgacgagcugcugcacaacgugaacgccggcaagagcaccaccaacaucaugaucaccaccaucaucaucgugaucaucgugauccugcugagccugaucgccgugggccugcugcuguacugcaaggccagaagcacccccgugacccugagcaaggaccagcugagcggcaucaacaacaucgccuucagcaacugaggacuaguguccaccugucccuccugggcugcuggauugucucguuuuccugccaaauaaacaggaucagcgcuuuacagaucuaaaaaaaaaaaaaaaaaaaaaaaaaaaaaaaaaaaaaaaaaaaaaaaaaaaaaaaaaaaaaaaaugcaucccccccccccccccccccccccccccccccaaaggcucuuuucagagccaccagaauu

SEQ ID NO: 1690 - RNA, 2057 nt, Artificial Sequence
  mRNA product Design b-1 comprising derived and/or modified sequence from HRSV(A2)__F_DSCav1_mut1 (opt5)
gggagacggagacggccugcaggaccugcucucucagcccucagccgaggccuacgccgagccgagugcgcagccgacgaccgggaggagccgcagccuucaacucugagguacugugauccgcgcugcccgccgggccgccccaguccgcugcugcggcaccuccuucccucgcgcccucuucgcucgccagcgccuucccugugagccugcgucaccgcggccgccaagcuuaccauggagcugcucauccugaaggccaacgcuauuaccacaauccuuacggccgugaccuucugcuuugcgagcggccagaauauuacagaagaguucuaccaauccaccuguucugcugucagcaaaggguaucugggagcccucagaacaggcugguacaccuccguuaucacaauugaacugucuaacaucaaggagaauaaaugcaacgggaccgacgccaaggugaaacuuaucaagcaggaacuggauaaguauaaaaaugcugugacggagcuccagcugcugaugcagagcacccccgccacaggauccggcucugcuauuuguagcggggucgccgugugcaagguucuccaccuggagggagaagugaacaaaaucaaguccgcgcuucugagcaccaauaaagccgucgugucucucuccaacggcguuagcgugcugacauuuaagguccuugaccugaagaauuacauugauaaacaacuccugccuauccugaacaagcagucuuguuccauuccgaauaucgagaccgugauugaguuccagcagaaaaacaaucggcuccuggaaaucacgcgcgaguuuagcgugaacgcuggcgucacaacccccguuucuacauauaugcuuaccaauuccgaacugcucagccugaucaacgacaugccuauuaccaacgaucaaaagaaacuuauguccaauaacgugcagaucgugagacagcagucuuacagcauuaugugcaucauuaaggaggaaguccuggccuaugugguucaacucccccuguacggggugaucgacacaccuuguuggaaacugcauacgagcccccucugcaccacaaauaccaaggagggauccaacaucugucugacacggaccgaucgcggcugguacugcgacaaugcugggucugucuccuucuuuccucaggccgaaacguguaaggugcagagcaacagaguuuucugcgauacaaugaacucucuuacccugccgagcgaggugaaucucugcaaugucgacauuuuuaaccccaaauaugauuguaagaucaugaccuccaaaacagacgugucuagcuccgucauuaccagccugggagcgaucgugucuugcuacggcaagacaaaauguacggccuccaauaagaaccgggggauuaucaagaccuucagcaauggaugcgauuauguuucuaacaaaggcguggacacagucuccgugggcaauacccuuuacuguguuaacaagcaagaggggcagagccuguaugugaaaggagaaccuaucauuaacuuuuacgacccccucgucuucccuuccgaugaguuugacgcuucuaucagccaggugaaugaaaagauuaaccagucccuggccuucauccgcaaaucugaugagcugcuccacaaugugaacgcuggcaagagcacaaccaauauuaugaucacgaccauuaucaucguuauuaucgucauucugcuuucccugaucgccguggggcuccugcuguauugcaaggccagaagcacacccgugacccuuucuaaagaccaacucuccggaauuaacaauaucgcuuucagcaacugaggacuaguguccaccugucccuccugggcugcuggauugucucguuuuccugccaaauaaacaggaucagcgcuuuacagaucuaaaaaaaaaaaaaaaaaaaaaaaaaaaaaaaaaaaaaaaaaaaaaaaaaaaaaaaaaaaaaaaaugcaucccccccccccccccccccccccccccccccaaaggcucuuuucagagccaccagaauu

SEQ ID NO: 1691 - RNA, 2057 nt, Artificial Sequence
  mRNA product Design b-1 comprising derived and/or modified sequence from HRSV(A2)__F_DSCav1_mut1 (opt6)
gggagacggagacggccugcaggaccugcucucucagcccucagccgaggccuacgccgagccgagugcgcagccgacgaccgggaggagccgcagccuucaacucugagguacugugauccgcgcugcccgccgggccgccccaguccgcugcugcggcaccuccuucccucgcgcccucuucgcucgccagcgccuucccugugagccugcgucaccgcggccgccaagcuuaccauggaacuauuaauacuaaaagcaaacgcuauaacaacaauacuaacagcagucacauucugcuuugcaucaggccaaaacaucacagaagaauuuuaccaaucaacaugcuccgccguaucgaaaggauaccuaggcgcauuaagaaccggaugguauacaucagucauaacaauugaacuaucuaacauaaaagaaaacaaauguaacggcacagaugccaaaguaaaacucaucaaacaagaauuagauaaauacaaaaacgcagucacugaacuacaacucuuaaugcaaucaacaccugcaacaggaucaggaucagcaauaugcucaggaguagccguauguaaaguacuacaccuagaaggagaagucaacaaaauaaaaucagcccuccuaaguacaaacaaagcugucguaucacuauccaaugguguuucaguacuaacuuucaaaguucuagaccuaaaaaacuacauagacaaacaacuacuaccaauacuaaauaaacaaaguuguucuauacccaacauagaaaccgucauagaauuucaacaaaaaaauaauagacuccuagaaauaacaagagaauuuucaguuaacgcagguguaacaaccccaguauccaccuauaugcuaacaaauucagaauuacuuucccuaaucaacgacaugcccauaacaaaugaccaaaaaaaauuaaugucaaacaacguccaaauaguucgucaacaaucauauucaauaaugugcauaauaaaagaagaagucuuagccuacguaguacaacuuccccuuuauggaguuaucgacacacccugcuggaaacuccacacuucaccacuauguacuacaaacacaaaagaaggauccaacaucugccucacaagaaccgaucgaggaugguacugugauaacgccggauccgucucauucuucccacaagcagaaacaugcaaaguacaaucaaacagaguauuuugcgacacaaugaacucccucacauuaccuucugaaguaaaccuauguaauguagacauauucaaccccaaauacgauugcaaaauaaugacaucaaagacagauguaucaucaagugucaucacaucccuaggagcaauugucucauguuaugguaaaacaaaaugcaccgcaucaaauaaaaacagaggcauaauaaaaaccuucucaaacgguugugacuacguauccaauaaaggcgucgacacaguaucaguagguaacacauuauauuguguaaacaaacaagaaggacagucccuauauguaaaaggagaaccaauaaucaacuucuacgacccacuuguuuucccuucugaugaauuugacgcaaguauaucacaaguaaaugaaaaaaucaaucaaucacuagccuuuauaagaaaaucagaugaauuauuacacaacguaaacgccggaaaaucaacaaccaacauaaugauaaccacaauaauaaucgucauaauagucauccuacuaucacucauagcaguuggacuccuacuauacugcaaagcacgaucaacaccaguaacauuauccaaagaccaacuaagugguaucaauaacaucgccuuuucaaacugaggacuaguguccaccugucccuccugggcugcuggauugucucguuuuccugccaaauaaacaggaucagcgcuuuacagaucuaaaaaaaaaaaaaaaaaaaaaaaaaaaaaaaaaaaaaaaaaaaaaaaaaaaaaaaaaaaaaaaaugcaucccccccccccccccccccccccccccccccaaaggcucuuuucagagccaccagaauu

SEQ ID NO: 1692 - RNA, 2057 nt, Artificial Sequence
  mRNA product Design b-1 comprising derived and/or modified sequence from HRSV(A2)__F_DSCav1_mut1 (opt11)
gggagacggagacggccugcaggaccugcucucucagcccucagccgaggccuacgccgagccgagugcgcagccgacgaccgggaggagccgcagccuucaacucugagguacugugauccgcgcugcccgccgggccgccccaguccgcugcugcggcaccuccuucccucgcgcccucuucgcucgccagcgccuucccugugagccugcgucaccgcggccgccaagcuuaccauggaacuccuaauccucaaagccaacgcaaucaccacaauccucacugccgucaccuucugcuucgccuccggccaaaacauaacagaagaauuuuaccaaucaaccuguucagcggucuccaaaggcuaccucggcgcccuccgcaccggcugguacaccuccgugaucaccauagaacucuccaacaucaaggaaaacaaaugcaacggcaccgacgcgaaggucaaacuuauuaaacaagaacucgacaaauacaaaaacgcagucaccgaacuacaacuccuaaugcaguccacgccagccaccggcucuggcucagccauaugcuccgguguggccguaugcaaaguccuacaccucgaaggagaagucaacaaaauaaaauccgcccuacuguccacaaacaaggccguagucucccucucaaacggcgucucaguacucaccuucaaaguccuagaccucaagaacuacaucgacaaacaacuccuacccauacuaaacaaacaauccugcucaauccccaacaucgaaaccguaauagaauuucaacaaaaaaacaacagacuccuggagaucacccgggaauuuuccguaaacgccggagucacaacacccgucucaaccuacaugcuaacgaacucagagcuccucucacuuaucaacgacaugcccauaacaaacgaccaaaaaaaacucauguccaacaacgugcaaaucguccgacaacaauccuacuccaucaugugcaucauuaaagaagaaguccucgcauacguaguccagcucccccucuacggcgucauagacacccccugcuggaaacuacacacaucaccccucugcacaacaaacaccaaagaaggcuccaacaucugccucacccgcaccgaccgaggcugguacugcgauaacgccggcagcgucuccuucuucccccaagcagaaaccugcaagguccaauccaaccgaguuuucugcgacacuaugaacucgcucacccuccccuccgaagucaaccucugcaacgucgacauuuucaaccccaaauacgacugcaaaaucaugaccuccaagaccgacguauccuccuccgucaucaccucccuaggcgccauaguaaguugcuacggcaaaaccaagugcacagcaagcaacaaaaaccgaggaauaaucaaaaccuucuccaacggcugcgacuacguauccaacaagggcgucgacaccguauccguagggaacacccuuuacugcguaaacaaacaagaaggacaaucacucuacguaaaaggcgaacccauaaucaacuucuacgacccccucguauuucccuccgacgaauuugacgcaucaaucucacaggucaacgaaaaaauaaaccaaucgcuagcauucaucagaaaaucagacgaacuccuacacaacgucaacgcaggcaagagcaccaccaacaucaugaucaccaccaucaucaucgucauaaucgucauacuacucucacucauagcagucggccuccuccuauacuguaaagcaaggucgaccccagucacccuauccaaagaccaacuaagcggcaucaacaacaucgcguucucaaacuaaggacuaguguccaccugucccuccugggcugcuggauugucucguuuuccugccaaauaaacaggaucagcgcuuuacagaucuaaaaaaaaaaaaaaaaaaaaaaaaaaaaaaaaaaaaaaaaaaaaaaaaaaaaaaaaaaaaaaaaugcaucccccccccccccccccccccccccccccccaaaggcucuuuucagagccaccagaauu

SEQ ID NO: 1693 - RNA, 1877 nt, Artificial Sequence
  mRNA product Design b-2 comprising derived and/or modified sequence from HRSV(A2)__F_DSCav1_mut1 (opt1)
gggagagccucugcuggaguccggggaguggcguuggcugcuagagcgaagcuuaccauggagcugcucauccugaaggccaacgccaucaccaccauccugacggcggugaccuucugcuucgccagcggccagaacaucaccgaggaguucuaccaguccacgugcagcgccgucuccaagggguaccucggcgcccugcggaccggcugguacaccuccgugaucaccaucgagcugagcaacaucaaggagaacaagugcaacgggaccgacgccaaggugaagcucaucaagcaggagcuggacaaguacaagaacgcggucacggagcugcagcuccugaugcaguccaccccggcaaccggcuccggcuccgccaucugcagcggcgucgccgugugcaaggugcugcaccucgagggggaggucaacaagaucaagagcgcccugcuguccaccaacaaggccguggugagccucuccaacggcgucagcgugcugaccuucaaggugcuggaccucaagaacuacaucgacaagcagcugcugcccauccugaacaagcagagcugcuccauccccaacaucgagacggugaucgaguuccagcagaagaacaaccggcuccuggagaucacccgcgaguucagcgugaacgccggggucaccacccccguguccacguacaugcugaccaacagcgagcuccugucccugaucaacgacaugccgaucaccaacgaccagaagaagcucaugagcaacaacgugcagaucguccggcagcaguccuacagcaucaugugcaucaucaaggaggaggugcuggcguacgugguccagcugccccucuacggcgugaucgacacccccugcuggaagcugcacacgagcccccugugcaccaccaacaccaaggagggguccaacaucugccucacgcgcaccgaccggggcugguacugcgacaacgccggcagcgucuccuucuucccgcaggccgagaccugcaaggugcagagcaaccgcguguucugcgacaccaugaacucccugacgcugcccagcgagguaaaccucugcaacgucgacaucuucaaccccaaguacgacugcaagaucaugaccuccaagaccgacgugagcuccagcgugaucaccucccugggggccaucgucagcugcuacggcaagacgaagugcaccgccagcaacaagaaccgggggaucaucaagaccuucuccaacggcugcgacuacgugagcaacaagggcguggacaccguguccgucgggaacacccuguacugcgugaacaagcaggagggccagagccucuacgugaagggggagcccaucaucaacuucuacgacccgcuggucuuccccuccgacgaguucgacgcgagcaucucccaggugaacgagaagaucaaccagagccuggccuucauccgcaaguccgacgagcugcuccacaacgugaacgccggcaagagcacgaccaacaucaugaucaccaccaucaucaucgucaucaucgugauccugcugucccucaucgccguggggcugcugcucuacugcaaggcccggagcacgcccgucacccuguccaaggaccagcugagcggcaucaacaacaucgcguucuccaacugaggacuaguguccaccugucccuccugggcugcuggauugucucguuuuccugccaaauaaacaggaucagcgcuuuacagaucuaaaaaaaaaaaaaaaaaaaaaaaaaaaaaaaaaaaaaaaaaaaaaaaaaaaaaaaaaaaaaaaaugcaucccccccccccccccccccccccccccccccaaaggcucuuuucagagccaccagaauu

SEQ ID NO: 1694 - RNA, 1877 nt, Artificial Sequence
  mRNA product Design b-2 comprising derived and/or modified sequence from HRSV(A2)__F_DSCav1_mut1 (opt1)
gggagagccucugcuggaguccggggaguggcguuggcugcuagagcgaagcuuaccauggagcugcucauccugaaggccaacgccaucaccaccauccugacggcggugaccuucugcuucgccagcggccagaacaucaccgaggaguucuaccaguccacgugcagcgccgucuccaagggguaccucggcgcccugcgcaccgggugguacaccagcgugaucaccaucgagcuguccaacaucaaggagaacaagugcaacggcaccgacgccaaggugaagcucaucaagcaggagcuggacaaguacaagaacgcggucacggagcugcagcuccugaugcagagcacccccgccaccggguccggcagcgccaucugcuccggcguggccgugugcaagguccugcaccucgagggggaggugaacaagaucaagagcgcgcugcuguccaccaacaaggccguggucagccucuccaacggcgugagcgugcugacguucaagguccuggaccucaagaacuacaucgacaagcagcugcugccgauccucaacaagcaguccugcagcauccccaacaucgagaccgugaucgaguuccagcagaagaacaaccggcugcuggagaucacccgcgaguucuccgugaacgccggggucaccacgcccgugagcaccuacaugcucaccaacuccgagcugcugagccucaucaacgacaugcccaucaccaacgaccagaagaagcugaugagcaacaacgugcagaucguccggcagcaguccuacagcaucaugugcaucaucaaggaggaggugcuggccuacgugguccagcucccgcuguacggcgugaucgacacgcccugcuggaagcugcacaccagcccccucugcaccaccaacacgaaggagggguccaacaucugccugacccgcaccgaccggggcugguacugcgacaacgccggcuccgugagcuucuucccccaggcggagaccugcaagguccaguccaaccgcguguucugcgacacgaugaacagccugacccucccguccgaggucaaccugugcaacguggacaucuucaaccccaaguacgacugcaagaucaugaccagcaagaccgacguguccagcuccgucaucacgagccugggggccaucguguccugcuacggcaagaccaagugcaccgccagcaacaagaaccgggggaucaucaagaccuucuccaacggcugcgacuacgugagcaacaagggcgucgacacgguguccguggggaacacccucuacugcgucaacaagcaggagggccagagccuguacgugaagggggagcccaucaucaacuucuacgacccccugguguucccgagcgacgaguucgacgccuccaucagccaggucaacgagaagaucaaccagucccucgccuucauccgcaagagcgacgagcugcugcacaacgugaacgcgggcaaguccaccaccaacaucaugaucaccacgaucaucaucgugaucaucgucauccuccugagccugaucgccguggggcuccugcuguacugcaaggcccgguccacccccgugacccugagcaaggaccagcucuccggcaucaacaacaucgccuucagcaacugaggacuaguguccaccugucccuccugggcugcuggauugucucguuuuccugccaaauaaacaggaucagcgcuuuacagaucuaaaaaaaaaaaaaaaaaaaaaaaaaaaaaaaaaaaaaaaaaaaaaaaaaaaaaaaaaaaaaaaaugcaucccccccccccccccccccccccccccccccaaaggcucuuuucagagccaccagaauu

SEQ ID NO: 1695 - RNA, 1877 nt, Artificial Sequence
  mRNA product Design b-2 comprising derived and/or modified sequence from HRSV(A2)__F_DSCav1_mut1 (opt2)
gggagagccucugcuggaguccggggaguggcguuggcugcuagagcgaagcuuaccauggagcuccucauccucaaggccaacgccaucaccaccauccucaccgccgucaccuucugcuucgccuccggccagaacaucaccgaggaguucuaccaguccaccugcuccgccgucuccaagggcuaccucggcgcccuccgcaccggcugguacaccuccgucaucaccaucgagcucuccaacaucaaggagaacaagugcaacggcaccgacgccaaggucaagcucaucaagcaggagcucgacaaguacaagaacgccgucaccgagcuccagcuccucaugcaguccacccccgccaccggcuccggcuccgccaucugcuccggcgucgccgucugcaagguccuccaccucgagggcgaggucaacaagaucaaguccgcccuccucuccaccaacaaggccgucgucucccucuccaacggcgucuccguccucaccuucaagguccucgaccucaagaacuacaucgacaagcagcuccuccccauccucaacaagcaguccugcuccauccccaacaucgagaccgucaucgaguuccagcagaagaacaaccgccuccucgagaucacccgcgaguucuccgucaacgccggcgucaccacccccgucuccaccuacaugcucaccaacuccgagcuccucucccucaucaacgacaugcccaucaccaacgaccagaagaagcucauguccaacaacguccagaucguccgccagcaguccuacuccaucaugugcaucaucaaggaggagguccucgccuacgucguccagcucccccucuacggcgucaucgacacccccugcuggaagcuccacaccuccccccucugcaccaccaacaccaaggagggcuccaacaucugccucacccgcaccgaccgcggcugguacugcgacaacgccggcuccgucuccuucuucccccaggccgagaccugcaagguccaguccaaccgcgucuucugcgacaccaugaacucccucacccuccccuccgaggucaaccucugcaacgucgacaucuucaaccccaaguacgacugcaagaucaugaccuccaagaccgacgucuccuccuccgucaucaccucccucggcgccaucgucuccugcuacggcaagaccaagugcaccgccuccaacaagaaccgcggcaucaucaagaccuucuccaacggcugcgacuacgucuccaacaagggcgucgacaccgucuccgucggcaacacccucuacugcgucaacaagcaggagggccagucccucuacgucaagggcgagcccaucaucaacuucuacgacccccucgucuuccccuccgacgaguucgacgccuccaucucccaggucaacgagaagaucaaccagucccucgccuucauccgcaaguccgacgagcuccuccacaacgucaacgccggcaaguccaccaccaacaucaugaucaccaccaucaucaucgucaucaucgucauccuccucucccucaucgccgucggccuccuccucuacugcaaggcccgcuccacccccgucacccucuccaaggaccagcucuccggcaucaacaacaucgccuucuccaacugaggacuaguguccaccugucccuccugggcugcuggauugucucguuuuccugccaaauaaacaggaucagcgcuuuacagaucuaaaaaaaaaaaaaaaaaaaaaaaaaaaaaaaaaaaaaaaaaaaaaaaaaaaaaaaaaaaaaaaaugcaucccccccccccccccccccccccccccccccaaaggcucuuuucagagccaccagaauu

SEQ ID NO: 1696 - RNA, 1877 nt, Artificial Sequence
  mRNA product Design b-2 comprising derived and/or modified sequence from HRSV(A2)__F_DSCav1_mut1 (opt3)
gggagagccucugcuggaguccggggaguggcguuggcugcuagagcgaagcuuaccauggagcugcucauccuuaaggccaacgcuauuaccacaauacugacugcagugacguucugcuuugccagcggccagaauaucaccgaagaguucuaccaauccacauguucugcggucucaaaaggguauuugggagcuuuaagaacugguugguacaccaguguuauuacaaucgaacugagcaacauuaaggagaauaaaugcaacggcaccgacgccaaggugaaacuaaucaagcaggaacucgauaaguauaaaaaugcaguaacugagcugcagcuucugaugcaguccacacccgccaccgggucuggaucggcuauauguucaggcguggcagucugcaagguguugcaccucgagggugaaguuaacaaaaucaagagcgcccugcugaguacgaauaaagcuguggucucccucucuaacggggugagcguauuaacuuuuaagguucuggaccuuaagaauuacauugauaaacaauugcugccuauccuaaacaagcaguccuguucaauuccaaauaucgagaccgugauagaguuccagcagaaaaacaauaggcuccuggaaauuacacgggaguuuagugucaacgccggagugacuaccccggugagcacauauaugcuuaccaauucugaacuguugucccucaucaacgacaugcccauuacgaacgaucaaaagaaacugaugucaaauaacguccagaucguucgccagcagagcuacaguaucaugugcauuauaaaggaggaaguguuagcguauguagugcaacugccucucuacggcgucaucgacacuccauguuggaaacuucauacaucuccccugugcaccacuaauacaaaggagggcuccaacauuuguuugacccgaacggaucgugggugguacugcgacaaugcaggaagcgugucguucuuuccucaggccgaaaccuguaagguucagucuaacagaguguucugcgauacaaugaacucccuaacucugccaucagaggucaaucucugcaauguggacaucuuuaaccccaaauaugauuguaagauaaugaccaguaaaacagacguaagcuccucuguuauuacuagccugggugcuaucgugucaugcuacggcaagaccaaauguacagccaguaauaagaacagggggaucauuaagaccuucuccaauggaugcgauuaugucagcaacaaaggcguggacacugucucuguggguaauacgcuuuacuguguuaacaagcaagaggggcagucacuguaugugaaaggagaaccuaucauuaacuuuuacgacccauugguauucccgagugaugaguuugacgcaagcauaucccaggucaaugaaaagaucaaccagucucucgcuuucauucggaaaucggaugagcuguuacacaaugugaacgccggcaagagcacaaccaauaucaugaucacuaccauuauaaucguuauuaucgugauucugcuaucccucaucgcggucggccugcuuuuguauugcaaggcccgcucaacacccgugacccugaguaaagaccaacucucugggauaaacaauaucgcauucagcaacugaggacuaguguccaccugucccuccugggcugcuggauugucucguuuuccugccaaauaaacaggaucagcgcuuuacagaucuaaaaaaaaaaaaaaaaaaaaaaaaaaaaaaaaaaaaaaaaaaaaaaaaaaaaaaaaaaaaaaaaugcaucccccccccccccccccccccccccccccccaaaggcucuuuucagagccaccagaauu

SEQ ID NO: 1697 - RNA, 1877 nt, Artificial Sequence
  mRNA product Design b-2 comprising derived and/or modified sequence from HRSV(A2)__F_DSCav1_mut1 (opt4)
gggagagccucugcuggaguccggggaguggcguuggcugcuagagcgaagcuuaccauggagcugcugauccugaaggccaacgccaucaccaccauccugaccgccgugaccuucugcuucgccagcggccagaacaucaccgaggaguucuaccagagcaccugcagcgccgugagcaagggcuaccugggcgcccugagaaccggcugguacaccagcgugaucaccaucgagcugagcaacaucaaggagaacaagugcaacggcaccgacgccaaggugaagcugaucaagcaggagcuggacaaguacaagaacgccgugaccgagcugcagcugcugaugcagagcacccccgccaccggcagcggcagcgccaucugcagcggcguggccgugugcaaggugcugcaccuggagggcgaggugaacaagaucaagagcgcccugcugagcaccaacaaggccguggugagccugagcaacggcgugagcgugcugaccuucaaggugcuggaccugaagaacuacaucgacaagcagcugcugcccauccugaacaagcagagcugcagcauccccaacaucgagaccgugaucgaguuccagcagaagaacaacagacugcuggagaucaccagagaguucagcgugaacgccggcgugaccacccccgugagcaccuacaugcugaccaacagcgagcugcugagccugaucaacgacaugcccaucaccaacgaccagaagaagcugaugagcaacaacgugcagaucgugagacagcagagcuacagcaucaugugcaucaucaaggaggaggugcuggccuacguggugcagcugccccuguacggcgugaucgacacccccugcuggaagcugcacaccagcccccugugcaccaccaacaccaaggagggcagcaacaucugccugaccagaaccgacagaggcugguacugcgacaacgccggcagcgugagcuucuucccccaggccgagaccugcaaggugcagagcaacagaguguucugcgacaccaugaacagccugacccugcccagcgaggugaaccugugcaacguggacaucuucaaccccaaguacgacugcaagaucaugaccagcaagaccgacgugagcagcagcgugaucaccagccugggcgccaucgugagcugcuacggcaagaccaagugcaccgccagcaacaagaacagaggcaucaucaagaccuucagcaacggcugcgacuacgugagcaacaagggcguggacaccgugagcgugggcaacacccuguacugcgugaacaagcaggagggccagagccuguacgugaagggcgagcccaucaucaacuucuacgacccccugguguuccccagcgacgaguucgacgccagcaucagccaggugaacgagaagaucaaccagagccuggccuucaucagaaagagcgacgagcugcugcacaacgugaacgccggcaagagcaccaccaacaucaugaucaccaccaucaucaucgugaucaucgugauccugcugagccugaucgccgugggccugcugcuguacugcaaggccagaagcacccccgugacccugagcaaggaccagcugagcggcaucaacaacaucgccuucagcaacugaggacuaguguccaccugucccuccugggcugcuggauugucucguuuuccugccaaauaaacaggaucagcgcuuuacagaucuaaaaaaaaaaaaaaaaaaaaaaaaaaaaaaaaaaaaaaaaaaaaaaaaaaaaaaaaaaaaaaaaugcaucccccccccccccccccccccccccccccccaaaggcucuuuucagagccaccagaauu

SEQ ID NO: 1698 - RNA, 1877 nt, Artificial Sequence
  mRNA product Design b-2 comprising derived and/or modified sequence from HRSV(A2)__F_DSCav1_mut1 (opt5)
gggagagccucugcuggaguccggggaguggcguuggcugcuagagcgaagcuuaccauggagcugcucauccugaaggccaacgcuauuaccacaauccuuacggccgugaccuucugcuuugcgagcggccagaauauuacagaagaguucuaccaauccaccuguucugcugucagcaaaggguaucugggagcccucagaacaggcugguacaccuccguuaucacaauugaacugucuaacaucaaggagaauaaaugcaacgggaccgacgccaaggugaaacuuaucaagcaggaacuggauaaguauaaaaaugcugugacggagcuccagcugcugaugcagagcacccccgccacaggauccggcucugcuauuuguagcggggucgccgugugcaagguucuccaccuggagggagaagugaacaaaaucaaguccgcgcuucugagcaccaauaaagccgucgugucucucuccaacggcguuagcgugcugacauuuaagguccuugaccugaagaauuacauugauaaacaacuccugccuauccugaacaagcagucuuguuccauuccgaauaucgagaccgugauugaguuccagcagaaaaacaaucggcuccuggaaaucacgcgcgaguuuagcgugaacgcuggcgucacaacccccguuucuacauauaugcuuaccaauuccgaacugcucagccugaucaacgacaugccuauuaccaacgaucaaaagaaacuuauguccaauaacgugcagaucgugagacagcagucuuacagcauuaugugcaucauuaaggaggaaguccuggccuaugugguucaacucccccuguacggggugaucgacacaccuuguuggaaacugcauacgagcccccucugcaccacaaauaccaaggagggauccaacaucugucugacacggaccgaucgcggcugguacugcgacaaugcugggucugucuccuucuuuccucaggccgaaacguguaaggugcagagcaacagaguuuucugcgauacaaugaacucucuuacccugccgagcgaggugaaucucugcaaugucgacauuuuuaaccccaaauaugauuguaagaucaugaccuccaaaacagacgugucuagcuccgucauuaccagccugggagcgaucgugucuugcuacggcaagacaaaauguacggccuccaauaagaaccgggggauuaucaagaccuucagcaauggaugcgauuauguuucuaacaaaggcguggacacagucuccgugggcaauacccuuuacuguguuaacaagcaagaggggcagagccuguaugugaaaggagaaccuaucauuaacuuuuacgacccccucgucuucccuuccgaugaguuugacgcuucuaucagccaggugaaugaaaagauuaaccagucccuggccuucauccgcaaaucugaugagcugcuccacaaugugaacgcuggcaagagcacaaccaauauuaugaucacgaccauuaucaucguuauuaucgucauucugcuuucccugaucgccguggggcuccugcuguauugcaaggccagaagcacacccgugacccuuucuaaagaccaacucuccggaauuaacaauaucgcuuucagcaacugaggacuaguguccaccugucccuccugggcugcuggauugucucguuuuccugccaaauaaacaggaucagcgcuuuacagaucuaaaaaaaaaaaaaaaaaaaaaaaaaaaaaaaaaaaaaaaaaaaaaaaaaaaaaaaaaaaaaaaaugcaucccccccccccccccccccccccccccccccaaaggcucuuuucagagccaccagaauu

SEQ ID NO: 1699 - RNA, 1877 nt, Artificial Sequence
  mRNA product Design b-2 comprising derived and/or modified sequence from HRSV(A2)__F_DSCav1_mut1 (opt6)
gggagagccucugcuggaguccggggaguggcguuggcugcuagagcgaagcuuaccauggaacuauuaauacuaaaagcaaacgcuauaacaacaauacuaacagcagucacauucugcuuugcaucaggccaaaacaucacagaagaauuuuaccaaucaacaugcuccgccguaucgaaaggauaccuaggcgcauuaagaaccggaugguauacaucagucauaacaauugaacuaucuaacauaaaagaaaacaaauguaacggcacagaugccaaaguaaaacucaucaaacaagaauuagauaaauacaaaaacgcagucacugaacuacaacucuuaaugcaaucaacaccugcaacaggaucaggaucagcaauaugcucaggaguagccguauguaaaguacuacaccuagaaggagaagucaacaaaauaaaaucagcccuccuaaguacaaacaaagcugucguaucacuauccaaugguguuucaguacuaacuuucaaaguucuagaccuaaaaaacuacauagacaaacaacuacuaccaauacuaaauaaacaaaguuguucuauacccaacauagaaaccgucauagaauuucaacaaaaaaauaauagacuccuagaaauaacaagagaauuuucaguuaacgcagguguaacaaccccaguauccaccuauaugcuaacaaauucagaauuacuuucccuaaucaacgacaugcccauaacaaaugaccaaaaaaaauuaaugucaaacaacguccaaauaguucgucaacaaucauauucaauaaugugcauaauaaaagaagaagucuuagccuacguaguacaacuuccccuuuauggaguuaucgacacacccugcuggaaacuccacacuucaccacuauguacuacaaacacaaaagaaggauccaacaucugccucacaagaaccgaucgaggaugguacugugauaacgccggauccgucucauucuucccacaagcagaaacaugcaaaguacaaucaaacagaguauuuugcgacacaaugaacucccucacauuaccuucugaaguaaaccuauguaauguagacauauucaaccccaaauacgauugcaaaauaaugacaucaaagacagauguaucaucaagugucaucacaucccuaggagcaauugucucauguuaugguaaaacaaaaugcaccgcaucaaauaaaaacagaggcauaauaaaaaccuucucaaacgguugugacuacguauccaauaaaggcgucgacacaguaucaguagguaacacauuauauuguguaaacaaacaagaaggacagucccuauauguaaaaggagaaccaauaaucaacuucuacgacccacuuguuuucccuucugaugaauuugacgcaaguauaucacaaguaaaugaaaaaaucaaucaaucacuagccuuuauaagaaaaucagaugaauuauuacacaacguaaacgccggaaaaucaacaaccaacauaaugauaaccacaauaauaaucgucauaauagucauccuacuaucacucauagcaguuggacuccuacuauacugcaaagcacgaucaacaccaguaacauuauccaaagaccaacuaagugguaucaauaacaucgccuuuucaaacugaggacuaguguccaccugucccuccugggcugcuggauugucucguuuuccugccaaauaaacaggaucagcgcuuuacagaucuaaaaaaaaaaaaaaaaaaaaaaaaaaaaaaaaaaaaaaaaaaaaaaaaaaaaaaaaaaaaaaaaugcaucccccccccccccccccccccccccccccccaaaggcucuuuucagagccaccagaauu

SEQ ID NO: 1700 - RNA, 1877 nt, Artificial Sequence
  mRNA product Design b-2 comprising derived and/or modified sequence from HRSV(A2)__F_DSCav1_mut1 (opt11)
gggagagccucugcuggaguccggggaguggcguuggcugcuagagcgaagcuuaccauggaacuccuaauccucaaagccaacgcaaucaccacaauccucacugccgucaccuucugcuucgccuccggccaaaacauaacagaagaauuuuaccaaucaaccuguucagcggucuccaaaggcuaccucggcgcccuccgcaccggcugguacaccuccgugaucaccauagaacucuccaacaucaaggaaaacaaaugcaacggcaccgacgcgaaggucaaacuuauuaaacaagaacucgacaaauacaaaaacgcagucaccgaacuacaacuccuaaugcaguccacgccagccaccggcucuggcucagccauaugcuccgguguggccguaugcaaaguccuacaccucgaaggagaagucaacaaaauaaaauccgcccuacuguccacaaacaaggccguagucucccucucaaacggcgucucaguacucaccuucaaaguccuagaccucaagaacuacaucgacaaacaacuccuacccauacuaaacaaacaauccugcucaauccccaacaucgaaaccguaauagaauuucaacaaaaaaacaacagacuccuggagaucacccgggaauuuuccguaaacgccggagucacaacacccgucucaaccuacaugcuaacgaacucagagcuccucucacuuaucaacgacaugcccauaacaaacgaccaaaaaaaacucauguccaacaacgugcaaaucguccgacaacaauccuacuccaucaugugcaucauuaaagaagaaguccucgcauacguaguccagcucccccucuacggcgucauagacacccccugcuggaaacuacacacaucaccccucugcacaacaaacaccaaagaaggcuccaacaucugccucacccgcaccgaccgaggcugguacugcgauaacgccggcagcgucuccuucuucccccaagcagaaaccugcaagguccaauccaaccgaguuuucugcgacacuaugaacucgcucacccuccccuccgaagucaaccucugcaacgucgacauuuucaaccccaaauacgacugcaaaaucaugaccuccaagaccgacguauccuccuccgucaucaccucccuaggcgccauaguaaguugcuacggcaaaaccaagugcacagcaagcaacaaaaaccgaggaauaaucaaaaccuucuccaacggcugcgacuacguauccaacaagggcgucgacaccguauccguagggaacacccuuuacugcguaaacaaacaagaaggacaaucacucuacguaaaaggcgaacccauaaucaacuucuacgacccccucguauuucccuccgacgaauuugacgcaucaaucucacaggucaacgaaaaaauaaaccaaucgcuagcauucaucagaaaaucagacgaacuccuacacaacgucaacgcaggcaagagcaccaccaacaucaugaucaccaccaucaucaucgucauaaucgucauacuacucucacucauagcagucggccuccuccuauacuguaaagcaaggucgaccccagucacccuauccaaagaccaacuaagcggcaucaacaacaucgcguucucaaacuaaggacuaguguccaccugucccuccugggcugcuggauugucucguuuuccugccaaauaaacaggaucagcgcuuuacagaucuaaaaaaaaaaaaaaaaaaaaaaaaaaaaaaaaaaaaaaaaaaaaaaaaaaaaaaaaaaaaaaaaugcaucccccccccccccccccccccccccccccccaaaggcucuuuucagagccaccagaauu

SEQ ID NO: 1701 - RNA, 1897 nt, Artificial Sequence
  mRNA product Design b-3 comprising derived and/or modified sequence from HRSV(A2)__F_DSCav1_mut1 (opt1)
gggagagucccgcagucggcguccagcggcucugcuuguucgugugugugucguugcaggccuuauucaagcuuaccauggagcugcucauccugaaggccaacgccaucaccaccauccugacggcggugaccuucugcuucgccagcggccagaacaucaccgaggaguucuaccaguccacgugcagcgccgucuccaagggguaccucggcgcccugcggaccggcugguacaccuccgugaucaccaucgagcugagcaacaucaaggagaacaagugcaacgggaccgacgccaaggugaagcucaucaagcaggagcuggacaaguacaagaacgcggucacggagcugcagcuccugaugcaguccaccccggcaaccggcuccggcuccgccaucugcagcggcgucgccgugugcaaggugcugcaccucgagggggaggucaacaagaucaagagcgcccugcuguccaccaacaaggccguggugagccucuccaacggcgucagcgugcugaccuucaaggugcuggaccucaagaacuacaucgacaagcagcugcugcccauccugaacaagcagagcugcuccauccccaacaucgagacggugaucgaguuccagcagaagaacaaccggcuccuggagaucacccgcgaguucagcgugaacgccggggucaccacccccguguccacguacaugcugaccaacagcgagcuccugucccugaucaacgacaugccgaucaccaacgaccagaagaagcucaugagcaacaacgugcagaucguccggcagcaguccuacagcaucaugugcaucaucaaggaggaggugcuggcguacgugguccagcugccccucuacggcgugaucgacacccccugcuggaagcugcacacgagcccccugugcaccaccaacaccaaggagggguccaacaucugccucacgcgcaccgaccggggcugguacugcgacaacgccggcagcgucuccuucuucccgcaggccgagaccugcaaggugcagagcaaccgcguguucugcgacaccaugaacucccugacgcugcccagcgagguaaaccucugcaacgucgacaucuucaaccccaaguacgacugcaagaucaugaccuccaagaccgacgugagcuccagcgugaucaccucccugggggccaucgucagcugcuacggcaagacgaagugcaccgccagcaacaagaaccgggggaucaucaagaccuucuccaacggcugcgacuacgugagcaacaagggcguggacaccguguccgucgggaacacccuguacugcgugaacaagcaggagggccagagccucuacgugaagggggagcccaucaucaacuucuacgacccgcuggucuuccccuccgacgaguucgacgcgagcaucucccaggugaacgagaagaucaaccagagccuggccuucauccgcaaguccgacgagcugcuccacaacgugaacgccggcaagagcacgaccaacaucaugaucaccaccaucaucaucgucaucaucgugauccugcugucccucaucgccguggggcugcugcucuacugcaaggcccggagcacgcccgucacccuguccaaggaccagcugagcggcaucaacaacaucgcguucuccaacugaggacuaguguccaccugucccuccugggcugcuggauugucucguuuuccugccaaauaaacaggaucagcgcuuuacagaucuaaaaaaaaaaaaaaaaaaaaaaaaaaaaaaaaaaaaaaaaaaaaaaaaaaaaaaaaaaaaaaaaugcaucccccccccccccccccccccccccccccccaaaggcucuuuucagagccaccagaauu

SEQ ID NO: 1702 - RNA, 1897 nt, Artificial Sequence
  mRNA product Design b-3 comprising derived and/or modified sequence from HRSV(A2)__F_DSCav1_mut1 (opt1)
gggagagucccgcagucggcguccagcggcucugcuuguucgugugugugucguugcaggccuuauucaagcuuaccauggagcugcucauccugaaggccaacgccaucaccaccauccugacggcggugaccuucugcuucgccagcggccagaacaucaccgaggaguucuaccaguccacgugcagcgccgucuccaagggguaccucggcgcccugcgcaccgggugguacaccagcgugaucaccaucgagcuguccaacaucaaggagaacaagugcaacggcaccgacgccaaggugaagcucaucaagcaggagcuggacaaguacaagaacgcggucacggagcugcagcuccugaugcagagcacccccgccaccggguccggcagcgccaucugcuccggcguggccgugugcaagguccugcaccucgagggggaggugaacaagaucaagagcgcgcugcuguccaccaacaaggccguggucagccucuccaacggcgugagcgugcugacguucaagguccuggaccucaagaacuacaucgacaagcagcugcugccgauccucaacaagcaguccugcagcauccccaacaucgagaccgugaucgaguuccagcagaagaacaaccggcugcuggagaucacccgcgaguucuccgugaacgccggggucaccacgcccgugagcaccuacaugcucaccaacuccgagcugcugagccucaucaacgacaugcccaucaccaacgaccagaagaagcugaugagcaacaacgugcagaucguccggcagcaguccuacagcaucaugugcaucaucaaggaggaggugcuggccuacgugguccagcucccgcuguacggcgugaucgacacgcccugcuggaagcugcacaccagcccccucugcaccaccaacacgaaggagggguccaacaucugccugacccgcaccgaccggggcugguacugcgacaacgccggcuccgugagcuucuucccccaggcggagaccugcaagguccaguccaaccgcguguucugcgacacgaugaacagccugacccucccguccgaggucaaccugugcaacguggacaucuucaaccccaaguacgacugcaagaucaugaccagcaagaccgacguguccagcuccgucaucacgagccugggggccaucguguccugcuacggcaagaccaagugcaccgccagcaacaagaaccgggggaucaucaagaccuucuccaacggcugcgacuacgugagcaacaagggcgucgacacgguguccguggggaacacccucuacugcgucaacaagcaggagggccagagccuguacgugaagggggagcccaucaucaacuucuacgacccccugguguucccgagcgacgaguucgacgccuccaucagccaggucaacgagaagaucaaccagucccucgccuucauccgcaagagcgacgagcugcugcacaacgugaacgcgggcaaguccaccaccaacaucaugaucaccacgaucaucaucgugaucaucgucauccuccugagccugaucgccguggggcuccugcuguacugcaaggcccgguccacccccgugacccugagcaaggaccagcucuccggcaucaacaacaucgccuucagcaacugaggacuaguguccaccugucccuccugggcugcuggauugucucguuuuccugccaaauaaacaggaucagcgcuuuacagaucuaaaaaaaaaaaaaaaaaaaaaaaaaaaaaaaaaaaaaaaaaaaaaaaaaaaaaaaaaaaaaaaaugcaucccccccccccccccccccccccccccccccaaaggcucuuuucagagccaccagaauu

SEQ ID NO: 1703 - RNA, 1897 nt, Artificial Sequence
  mRNA product Design b-3 comprising derived and/or modified sequence from HRSV(A2)__F_DSCav1_mut1 (opt2)
gggagagucccgcagucggcguccagcggcucugcuuguucgugugugugucguugcaggccuuauucaagcuuaccauggagcuccucauccucaaggccaacgccaucaccaccauccucaccgccgucaccuucugcuucgccuccggccagaacaucaccgaggaguucuaccaguccaccugcuccgccgucuccaagggcuaccucggcgcccuccgcaccggcugguacaccuccgucaucaccaucgagcucuccaacaucaaggagaacaagugcaacggcaccgacgccaaggucaagcucaucaagcaggagcucgacaaguacaagaacgccgucaccgagcuccagcuccucaugcaguccacccccgccaccggcuccggcuccgccaucugcuccggcgucgccgucugcaagguccuccaccucgagggcgaggucaacaagaucaaguccgcccuccucuccaccaacaaggccgucgucucccucuccaacggcgucuccguccucaccuucaagguccucgaccucaagaacuacaucgacaagcagcuccuccccauccucaacaagcaguccugcuccauccccaacaucgagaccgucaucgaguuccagcagaagaacaaccgccuccucgagaucacccgcgaguucuccgucaacgccggcgucaccacccccgucuccaccuacaugcucaccaacuccgagcuccucucccucaucaacgacaugcccaucaccaacgaccagaagaagcucauguccaacaacguccagaucguccgccagcaguccuacuccaucaugugcaucaucaaggaggagguccucgccuacgucguccagcucccccucuacggcgucaucgacacccccugcuggaagcuccacaccuccccccucugcaccaccaacaccaaggagggcuccaacaucugccucacccgcaccgaccgcggcugguacugcgacaacgccggcuccgucuccuucuucccccaggccgagaccugcaagguccaguccaaccgcgucuucugcgacaccaugaacucccucacccuccccuccgaggucaaccucugcaacgucgacaucuucaaccccaaguacgacugcaagaucaugaccuccaagaccgacgucuccuccuccgucaucaccucccucggcgccaucgucuccugcuacggcaagaccaagugcaccgccuccaacaagaaccgcggcaucaucaagaccuucuccaacggcugcgacuacgucuccaacaagggcgucgacaccgucuccgucggcaacacccucuacugcgucaacaagcaggagggccagucccucuacgucaagggcgagcccaucaucaacuucuacgacccccucgucuuccccuccgacgaguucgacgccuccaucucccaggucaacgagaagaucaaccagucccucgccuucauccgcaaguccgacgagcuccuccacaacgucaacgccggcaaguccaccaccaacaucaugaucaccaccaucaucaucgucaucaucgucauccuccucucccucaucgccgucggccuccuccucuacugcaaggcccgcuccacccccgucacccucuccaaggaccagcucuccggcaucaacaacaucgccuucuccaacugaggacuaguguccaccugucccuccugggcugcuggauugucucguuuuccugccaaauaaacaggaucagcgcuuuacagaucuaaaaaaaaaaaaaaaaaaaaaaaaaaaaaaaaaaaaaaaaaaaaaaaaaaaaaaaaaaaaaaaaugcaucccccccccccccccccccccccccccccccaaaggcucuuuucagagccaccagaauu

SEQ ID NO: 1704 - RNA, 1897 nt, Artificial Sequence
  mRNA product Design b-3 comprising derived and/or modified sequence from HRSV(A2)__F_DSCav1_mut1 (opt3)
gggagagucccgcagucggcguccagcggcucugcuuguucgugugugugucguugcaggccuuauucaagcuuaccauggagcugcucauccuuaaggccaacgcuauuaccacaauacugacugcagugacguucugcuuugccagcggccagaauaucaccgaagaguucuaccaauccacauguucugcggucucaaaaggguauuugggagcuuuaagaacugguugguacaccaguguuauuacaaucgaacugagcaacauuaaggagaauaaaugcaacggcaccgacgccaaggugaaacuaaucaagcaggaacucgauaaguauaaaaaugcaguaacugagcugcagcuucugaugcaguccacacccgccaccgggucuggaucggcuauauguucaggcguggcagucugcaagguguugcaccucgagggugaaguuaacaaaaucaagagcgcccugcugaguacgaauaaagcuguggucucccucucuaacggggugagcguauuaacuuuuaagguucuggaccuuaagaauuacauugauaaacaauugcugccuauccuaaacaagcaguccuguucaauuccaaauaucgagaccgugauagaguuccagcagaaaaacaauaggcuccuggaaauuacacgggaguuuagugucaacgccggagugacuaccccggugagcacauauaugcuuaccaauucugaacuguugucccucaucaacgacaugcccauuacgaacgaucaaaagaaacugaugucaaauaacguccagaucguucgccagcagagcuacaguaucaugugcauuauaaaggaggaaguguuagcguauguagugcaacugccucucuacggcgucaucgacacuccauguuggaaacuucauacaucuccccugugcaccacuaauacaaaggagggcuccaacauuuguuugacccgaacggaucgugggugguacugcgacaaugcaggaagcgugucguucuuuccucaggccgaaaccuguaagguucagucuaacagaguguucugcgauacaaugaacucccuaacucugccaucagaggucaaucucugcaauguggacaucuuuaaccccaaauaugauuguaagauaaugaccaguaaaacagacguaagcuccucuguuauuacuagccugggugcuaucgugucaugcuacggcaagaccaaauguacagccaguaauaagaacagggggaucauuaagaccuucuccaauggaugcgauuaugucagcaacaaaggcguggacacugucucuguggguaauacgcuuuacuguguuaacaagcaagaggggcagucacuguaugugaaaggagaaccuaucauuaacuuuuacgacccauugguauucccgagugaugaguuugacgcaagcauaucccaggucaaugaaaagaucaaccagucucucgcuuucauucggaaaucggaugagcuguuacacaaugugaacgccggcaagagcacaaccaauaucaugaucacuaccauuauaaucguuauuaucgugauucugcuaucccucaucgcggucggccugcuuuuguauugcaaggcccgcucaacacccgugacccugaguaaagaccaacucucugggauaaacaauaucgcauucagcaacugaggacuaguguccaccugucccuccugggcugcuggauugucucguuuuccugccaaauaaacaggaucagcgcuuuacagaucuaaaaaaaaaaaaaaaaaaaaaaaaaaaaaaaaaaaaaaaaaaaaaaaaaaaaaaaaaaaaaaaaugcaucccccccccccccccccccccccccccccccaaaggcucuuuucagagccaccagaauu

SEQ ID NO: 1705 - RNA, 1897 nt, Artificial Sequence
  mRNA product Design b-3 comprising derived and/or modified sequence from HRSV(A2)__F_DSCav1_mut1 (opt4)
gggagagucccgcagucggcguccagcggcucugcuuguucgugugugugucguugcaggccuuauucaagcuuaccauggagcugcugauccugaaggccaacgccaucaccaccauccugaccgccgugaccuucugcuucgccagcggccagaacaucaccgaggaguucuaccagagcaccugcagcgccgugagcaagggcuaccugggcgcccugagaaccggcugguacaccagcgugaucaccaucgagcugagcaacaucaaggagaacaagugcaacggcaccgacgccaaggugaagcugaucaagcaggagcuggacaaguacaagaacgccgugaccgagcugcagcugcugaugcagagcacccccgccaccggcagcggcagcgccaucugcagcggcguggccgugugcaaggugcugcaccuggagggcgaggugaacaagaucaagagcgcccugcugagcaccaacaaggccguggugagccugagcaacggcgugagcgugcugaccuucaaggugcuggaccugaagaacuacaucgacaagcagcugcugcccauccugaacaagcagagcugcagcauccccaacaucgagaccgugaucgaguuccagcagaagaacaacagacugcuggagaucaccagagaguucagcgugaacgccggcgugaccacccccgugagcaccuacaugcugaccaacagcgagcugcugagccugaucaacgacaugcccaucaccaacgaccagaagaagcugaugagcaacaacgugcagaucgugagacagcagagcuacagcaucaugugcaucaucaaggaggaggugcuggccuacguggugcagcugccccuguacggcgugaucgacacccccugcuggaagcugcacaccagcccccugugcaccaccaacaccaaggagggcagcaacaucugccugaccagaaccgacagaggcugguacugcgacaacgccggcagcgugagcuucuucccccaggccgagaccugcaaggugcagagcaacagaguguucugcgacaccaugaacagccugacccugcccagcgaggugaaccugugcaacguggacaucuucaaccccaaguacgacugcaagaucaugaccagcaagaccgacgugagcagcagcgugaucaccagccugggcgccaucgugagcugcuacggcaagaccaagugcaccgccagcaacaagaacagaggcaucaucaagaccuucagcaacggcugcgacuacgugagcaacaagggcguggacaccgugagcgugggcaacacccuguacugcgugaacaagcaggagggccagagccuguacgugaagggcgagcccaucaucaacuucuacgacccccugguguuccccagcgacgaguucgacgccagcaucagccaggugaacgagaagaucaaccagagccuggccuucaucagaaagagcgacgagcugcugcacaacgugaacgccggcaagagcaccaccaacaucaugaucaccaccaucaucaucgugaucaucgugauccugcugagccugaucgccgugggccugcugcuguacugcaaggccagaagcacccccgugacccugagcaaggaccagcugagcggcaucaacaacaucgccuucagcaacugaggacuaguguccaccugucccuccugggcugcuggauugucucguuuuccugccaaauaaacaggaucagcgcuuuacagaucuaaaaaaaaaaaaaaaaaaaaaaaaaaaaaaaaaaaaaaaaaaaaaaaaaaaaaaaaaaaaaaaaugcaucccccccccccccccccccccccccccccccaaaggcucuuuucagagccaccagaauu

SEQ ID NO: 1706 - RNA, 1897 nt, Artificial Sequence
  mRNA product Design b-3 comprising derived and/or modified sequence from HRSV(A2)__F_DSCav1_mut1 (opt5)
gggagagucccgcagucggcguccagcggcucugcuuguucgugugugugucguugcaggccuuauucaagcuuaccauggagcugcucauccugaaggccaacgcuauuaccacaauccuuacggccgugaccuucugcuuugcgagcggccagaauauuacagaagaguucuaccaauccaccuguucugcugucagcaaaggguaucugggagcccucagaacaggcugguacaccuccguuaucacaauugaacugucuaacaucaaggagaauaaaugcaacgggaccgacgccaaggugaaacuuaucaagcaggaacuggauaaguauaaaaaugcugugacggagcuccagcugcugaugcagagcacccccgccacaggauccggcucugcuauuuguagcggggucgccgugugcaagguucuccaccuggagggagaagugaacaaaaucaaguccgcgcuucugagcaccaauaaagccgucgugucucucuccaacggcguuagcgugcugacauuuaagguccuugaccugaagaauuacauugauaaacaacuccugccuauccugaacaagcagucuuguuccauuccgaauaucgagaccgugauugaguuccagcagaaaaacaaucggcuccuggaaaucacgcgcgaguuuagcgugaacgcuggcgucacaacccccguuucuacauauaugcuuaccaauuccgaacugcucagccugaucaacgacaugccuauuaccaacgaucaaaagaaacuuauguccaauaacgugcagaucgugagacagcagucuuacagcauuaugugcaucauuaaggaggaaguccuggccuaugugguucaacucccccuguacggggugaucgacacaccuuguuggaaacugcauacgagcccccucugcaccacaaauaccaaggagggauccaacaucugucugacacggaccgaucgcggcugguacugcgacaaugcugggucugucuccuucuuuccucaggccgaaacguguaaggugcagagcaacagaguuuucugcgauacaaugaacucucuuacccugccgagcgaggugaaucucugcaaugucgacauuuuuaaccccaaauaugauuguaagaucaugaccuccaaaacagacgugucuagcuccgucauuaccagccugggagcgaucgugucuugcuacggcaagacaaaauguacggccuccaauaagaaccgggggauuaucaagaccuucagcaauggaugcgauuauguuucuaacaaaggcguggacacagucuccgugggcaauacccuuuacuguguuaacaagcaagaggggcagagccuguaugugaaaggagaaccuaucauuaacuuuuacgacccccucgucuucccuuccgaugaguuugacgcuucuaucagccaggugaaugaaaagauuaaccagucccuggccuucauccgcaaaucugaugagcugcuccacaaugugaacgcuggcaagagcacaaccaauauuaugaucacgaccauuaucaucguuauuaucgucauucugcuuucccugaucgccguggggcuccugcuguauugcaaggccagaagcacacccgugacccuuucuaaagaccaacucuccggaauuaacaauaucgcuuucagcaacugaggacuaguguccaccugucccuccugggcugcuggauugucucguuuuccugccaaauaaacaggaucagcgcuuuacagaucuaaaaaaaaaaaaaaaaaaaaaaaaaaaaaaaaaaaaaaaaaaaaaaaaaaaaaaaaaaaaaaaaugcaucccccccccccccccccccccccccccccccaaaggcucuuuucagagccaccagaauu

SEQ ID NO: 1707 - RNA, 1897 nt, Artificial Sequence
  mRNA product Design b-3 comprising derived and/or modified sequence from HRSV(A2)__F_DSCav1_mut1 (opt6)
gggagagucccgcagucggcguccagcggcucugcuuguucgugugugugucguugcaggccuuauucaagcuuaccauggaacuauuaauacuaaaagcaaacgcuauaacaacaauacuaacagcagucacauucugcuuugcaucaggccaaaacaucacagaagaauuuuaccaaucaacaugcuccgccguaucgaaaggauaccuaggcgcauuaagaaccggaugguauacaucagucauaacaauugaacuaucuaacauaaaagaaaacaaauguaacggcacagaugccaaaguaaaacucaucaaacaagaauuagauaaauacaaaaacgcagucacugaacuacaacucuuaaugcaaucaacaccugcaacaggaucaggaucagcaauaugcucaggaguagccguauguaaaguacuacaccuagaaggagaagucaacaaaauaaaaucagcccuccuaaguacaaacaaagcugucguaucacuauccaaugguguuucaguacuaacuuucaaaguucuagaccuaaaaaacuacauagacaaacaacuacuaccaauacuaaauaaacaaaguuguucuauacccaacauagaaaccgucauagaauuucaacaaaaaaauaauagacuccuagaaauaacaagagaauuuucaguuaacgcagguguaacaaccccaguauccaccuauaugcuaacaaauucagaauuacuuucccuaaucaacgacaugcccauaacaaaugaccaaaaaaaauuaaugucaaacaacguccaaauaguucgucaacaaucauauucaauaaugugcauaauaaaagaagaagucuuagccuacguaguacaacuuccccuuuauggaguuaucgacacacccugcuggaaacuccacacuucaccacuauguacuacaaacacaaaagaaggauccaacaucugccucacaagaaccgaucgaggaugguacugugauaacgccggauccgucucauucuucccacaagcagaaacaugcaaaguacaaucaaacagaguauuuugcgacacaaugaacucccucacauuaccuucugaaguaaaccuauguaauguagacauauucaaccccaaauacgauugcaaaauaaugacaucaaagacagauguaucaucaagugucaucacaucccuaggagcaauugucucauguuaugguaaaacaaaaugcaccgcaucaaauaaaaacagaggcauaauaaaaaccuucucaaacgguugugacuacguauccaauaaaggcgucgacacaguaucaguagguaacacauuauauuguguaaacaaacaagaaggacagucccuauauguaaaaggagaaccaauaaucaacuucuacgacccacuuguuuucccuucugaugaauuugacgcaaguauaucacaaguaaaugaaaaaaucaaucaaucacuagccuuuauaagaaaaucagaugaauuauuacacaacguaaacgccggaaaaucaacaaccaacauaaugauaaccacaauaauaaucgucauaauagucauccuacuaucacucauagcaguuggacuccuacuauacugcaaagcacgaucaacaccaguaacauuauccaaagaccaacuaagugguaucaauaacaucgccuuuucaaacugaggacuaguguccaccugucccuccugggcugcuggauugucucguuuuccugccaaauaaacaggaucagcgcuuuacagaucuaaaaaaaaaaaaaaaaaaaaaaaaaaaaaaaaaaaaaaaaaaaaaaaaaaaaaaaaaaaaaaaaugcaucccccccccccccccccccccccccccccccaaaggcucuuuucagagccaccagaauu

SEQ ID NO: 1708 - RNA, 1897 nt, Artificial Sequence
  mRNA product Design b-3 comprising derived and/or modified sequence from HRSV(A2)__F_DSCav1_mut1 (opt11)
gggagagucccgcagucggcguccagcggcucugcuuguucgugugugugucguugcaggccuuauucaagcuuaccauggaacuccuaauccucaaagccaacgcaaucaccacaauccucacugccgucaccuucugcuucgccuccggccaaaacauaacagaagaauuuuaccaaucaaccuguucagcggucuccaaaggcuaccucggcgcccuccgcaccggcugguacaccuccgugaucaccauagaacucuccaacaucaaggaaaacaaaugcaacggcaccgacgcgaaggucaaacuuauuaaacaagaacucgacaaauacaaaaacgcagucaccgaacuacaacuccuaaugcaguccacgccagccaccggcucuggcucagccauaugcuccgguguggccguaugcaaaguccuacaccucgaaggagaagucaacaaaauaaaauccgcccuacuguccacaaacaaggccguagucucccucucaaacggcgucucaguacucaccuucaaaguccuagaccucaagaacuacaucgacaaacaacuccuacccauacuaaacaaacaauccugcucaauccccaacaucgaaaccguaauagaauuucaacaaaaaaacaacagacuccuggagaucacccgggaauuuuccguaaacgccggagucacaacacccgucucaaccuacaugcuaacgaacucagagcuccucucacuuaucaacgacaugcccauaacaaacgaccaaaaaaaacucauguccaacaacgugcaaaucguccgacaacaauccuacuccaucaugugcaucauuaaagaagaaguccucgcauacguaguccagcucccccucuacggcgucauagacacccccugcuggaaacuacacacaucaccccucugcacaacaaacaccaaagaaggcuccaacaucugccucacccgcaccgaccgaggcugguacugcgauaacgccggcagcgucuccuucuucccccaagcagaaaccugcaagguccaauccaaccgaguuuucugcgacacuaugaacucgcucacccuccccuccgaagucaaccucugcaacgucgacauuuucaaccccaaauacgacugcaaaaucaugaccuccaagaccgacguauccuccuccgucaucaccucccuaggcgccauaguaaguugcuacggcaaaaccaagugcacagcaagcaacaaaaaccgaggaauaaucaaaaccuucuccaacggcugcgacuacguauccaacaagggcgucgacaccguauccguagggaacacccuuuacugcguaaacaaacaagaaggacaaucacucuacguaaaaggcgaacccauaaucaacuucuacgacccccucguauuucccuccgacgaauuugacgcaucaaucucacaggucaacgaaaaaauaaaccaaucgcuagcauucaucagaaaaucagacgaacuccuacacaacgucaacgcaggcaagagcaccaccaacaucaugaucaccaccaucaucaucgucauaaucgucauacuacucucacucauagcagucggccuccuccuauacuguaaagcaaggucgaccccagucacccuauccaaagaccaacuaagcggcaucaacaacaucgcguucucaaacuaaggacuaguguccaccugucccuccugggcugcuggauugucucguuuuccugccaaauaaacaggaucagcgcuuuacagaucuaaaaaaaaaaaaaaaaaaaaaaaaaaaaaaaaaaaaaaaaaaaaaaaaaaaaaaaaaaaaaaaaugcaucccccccccccccccccccccccccccccccaaaggcucuuuucagagccaccagaauu

SEQ ID NO: 1709 - RNA, 1948 nt, Artificial Sequence
  mRNA product Design b-4 comprising derived and/or modified sequence from HRSV(A2)__F_DSCav1_mut1 (opt1)
gggagagucccgcagucggcguccagcggcucugcuuguucgugugugugucguugcaggccuuauucaagcuuaccauggagcugcucauccugaaggccaacgccaucaccaccauccugacggcggugaccuucugcuucgccagcggccagaacaucaccgaggaguucuaccaguccacgugcagcgccgucuccaagggguaccucggcgcccugcggaccggcugguacaccuccgugaucaccaucgagcugagcaacaucaaggagaacaagugcaacgggaccgacgccaaggugaagcucaucaagcaggagcuggacaaguacaagaacgcggucacggagcugcagcuccugaugcaguccaccccggcaaccggcuccggcuccgccaucugcagcggcgucgccgugugcaaggugcugcaccucgagggggaggucaacaagaucaagagcgcccugcuguccaccaacaaggccguggugagccucuccaacggcgucagcgugcugaccuucaaggugcuggaccucaagaacuacaucgacaagcagcugcugcccauccugaacaagcagagcugcuccauccccaacaucgagacggugaucgaguuccagcagaagaacaaccggcuccuggagaucacccgcgaguucagcgugaacgccggggucaccacccccguguccacguacaugcugaccaacagcgagcuccugucccugaucaacgacaugccgaucaccaacgaccagaagaagcucaugagcaacaacgugcagaucguccggcagcaguccuacagcaucaugugcaucaucaaggaggaggugcuggcguacgugguccagcugccccucuacggcgugaucgacacccccugcuggaagcugcacacgagcccccugugcaccaccaacaccaaggagggguccaacaucugccucacgcgcaccgaccggggcugguacugcgacaacgccggcagcgucuccuucuucccgcaggccgagaccugcaaggugcagagcaaccgcguguucugcgacaccaugaacucccugacgcugcccagcgagguaaaccucugcaacgucgacaucuucaaccccaaguacgacugcaagaucaugaccuccaagaccgacgugagcuccagcgugaucaccucccugggggccaucgucagcugcuacggcaagacgaagugcaccgccagcaacaagaaccgggggaucaucaagaccuucuccaacggcugcgacuacgugagcaacaagggcguggacaccguguccgucgggaacacccuguacugcgugaacaagcaggagggccagagccucuacgugaagggggagcccaucaucaacuucuacgacccgcuggucuuccccuccgacgaguucgacgcgagcaucucccaggugaacgagaagaucaaccagagccuggccuucauccgcaaguccgacgagcugcuccacaacgugaacgccggcaagagcacgaccaacaucaugaucaccaccaucaucaucgucaucaucgugauccugcugucccucaucgccguggggcugcugcucuacugcaaggcccggagcacgcccgucacccuguccaaggaccagcugagcggcaucaacaacaucgcguucuccaacugaggacuaguaauaaggaaacuguaugaaugucugugggcaggaagugaagagauccuucuguaaagguuuuuggaauuaugucugcugaauaauaaacuuuuuugaaauaauaaaucugguagaaaaaugagaucuaaaaaaaaaaaaaaaaaaaaaaaaaaaaaaaaaaaaaaaaaaaaaaaaaaaaaaaaaaaaaaaaugcaucccccccccccccccccccccccccccccccaaaggcucuuuucagagccaccagaauu

SEQ ID NO: 1710 - RNA, 1948 nt, Artificial Sequence
  mRNA product Design b-4 comprising derived and/or modified sequence from HRSV(A2)__F_DSCav1_mut1 (opt1)
gggagagucccgcagucggcguccagcggcucugcuuguucgugugugugucguugcaggccuuauucaagcuuaccauggagcugcucauccugaaggccaacgccaucaccaccauccugacggcggugaccuucugcuucgccagcggccagaacaucaccgaggaguucuaccaguccacgugcagcgccgucuccaagggguaccucggcgcccugcgcaccgggugguacaccagcgugaucaccaucgagcuguccaacaucaaggagaacaagugcaacggcaccgacgccaaggugaagcucaucaagcaggagcuggacaaguacaagaacgcggucacggagcugcagcuccugaugcagagcacccccgccaccggguccggcagcgccaucugcuccggcguggccgugugcaagguccugcaccucgagggggaggugaacaagaucaagagcgcgcugcuguccaccaacaaggccguggucagccucuccaacggcgugagcgugcugacguucaagguccuggaccucaagaacuacaucgacaagcagcugcugccgauccucaacaagcaguccugcagcauccccaacaucgagaccgugaucgaguuccagcagaagaacaaccggcugcuggagaucacccgcgaguucuccgugaacgccggggucaccacgcccgugagcaccuacaugcucaccaacuccgagcugcugagccucaucaacgacaugcccaucaccaacgaccagaagaagcugaugagcaacaacgugcagaucguccggcagcaguccuacagcaucaugugcaucaucaaggaggaggugcuggccuacgugguccagcucccgcuguacggcgugaucgacacgcccugcuggaagcugcacaccagcccccucugcaccaccaacacgaaggagggguccaacaucugccugacccgcaccgaccggggcugguacugcgacaacgccggcuccgugagcuucuucccccaggcggagaccugcaagguccaguccaaccgcguguucugcgacacgaugaacagccugacccucccguccgaggucaaccugugcaacguggacaucuucaaccccaaguacgacugcaagaucaugaccagcaagaccgacguguccagcuccgucaucacgagccugggggccaucguguccugcuacggcaagaccaagugcaccgccagcaacaagaaccgggggaucaucaagaccuucuccaacggcugcgacuacgugagcaacaagggcgucgacacgguguccguggggaacacccucuacugcgucaacaagcaggagggccagagccuguacgugaagggggagcccaucaucaacuucuacgacccccugguguucccgagcgacgaguucgacgccuccaucagccaggucaacgagaagaucaaccagucccucgccuucauccgcaagagcgacgagcugcugcacaacgugaacgcgggcaaguccaccaccaacaucaugaucaccacgaucaucaucgugaucaucgucauccuccugagccugaucgccguggggcuccugcuguacugcaaggcccgguccacccccgugacccugagcaaggaccagcucuccggcaucaacaacaucgccuucagcaacugaggacuaguaauaaggaaacuguaugaaugucugugggcaggaagugaagagauccuucuguaaagguuuuuggaauuaugucugcugaauaauaaacuuuuuugaaauaauaaaucugguagaaaaaugagaucuaaaaaaaaaaaaaaaaaaaaaaaaaaaaaaaaaaaaaaaaaaaaaaaaaaaaaaaaaaaaaaaaugcaucccccccccccccccccccccccccccccccaaaggcucuuuucagagccaccagaauu

SEQ ID NO: 1711 - RNA, 1948 nt, Artificial Sequence
  mRNA product Design b-4 comprising derived and/or modified sequence from HRSV(A2)__F_DSCav1_mut1 (opt2)
gggagagucccgcagucggcguccagcggcucugcuuguucgugugugugucguugcaggccuuauucaagcuuaccauggagcuccucauccucaaggccaacgccaucaccaccauccucaccgccgucaccuucugcuucgccuccggccagaacaucaccgaggaguucuaccaguccaccugcuccgccgucuccaagggcuaccucggcgcccuccgcaccggcugguacaccuccgucaucaccaucgagcucuccaacaucaaggagaacaagugcaacggcaccgacgccaaggucaagcucaucaagcaggagcucgacaaguacaagaacgccgucaccgagcuccagcuccucaugcaguccacccccgccaccggcuccggcuccgccaucugcuccggcgucgccgucugcaagguccuccaccucgagggcgaggucaacaagaucaaguccgcccuccucuccaccaacaaggccgucgucucccucuccaacggcgucuccguccucaccuucaagguccucgaccucaagaacuacaucgacaagcagcuccuccccauccucaacaagcaguccugcuccauccccaacaucgagaccgucaucgaguuccagcagaagaacaaccgccuccucgagaucacccgcgaguucuccgucaacgccggcgucaccacccccgucuccaccuacaugcucaccaacuccgagcuccucucccucaucaacgacaugcccaucaccaacgaccagaagaagcucauguccaacaacguccagaucguccgccagcaguccuacuccaucaugugcaucaucaaggaggagguccucgccuacgucguccagcucccccucuacggcgucaucgacacccccugcuggaagcuccacaccuccccccucugcaccaccaacaccaaggagggcuccaacaucugccucacccgcaccgaccgcggcugguacugcgacaacgccggcuccgucuccuucuucccccaggccgagaccugcaagguccaguccaaccgcgucuucugcgacaccaugaacucccucacccuccccuccgaggucaaccucugcaacgucgacaucuucaaccccaaguacgacugcaagaucaugaccuccaagaccgacgucuccuccuccgucaucaccucccucggcgccaucgucuccugcuacggcaagaccaagugcaccgccuccaacaagaaccgcggcaucaucaagaccuucuccaacggcugcgacuacgucuccaacaagggcgucgacaccgucuccgucggcaacacccucuacugcgucaacaagcaggagggccagucccucuacgucaagggcgagcccaucaucaacuucuacgacccccucgucuuccccuccgacgaguucgacgccuccaucucccaggucaacgagaagaucaaccagucccucgccuucauccgcaaguccgacgagcuccuccacaacgucaacgccggcaaguccaccaccaacaucaugaucaccaccaucaucaucgucaucaucgucauccuccucucccucaucgccgucggccuccuccucuacugcaaggcccgcuccacccccgucacccucuccaaggaccagcucuccggcaucaacaacaucgccuucuccaacugaggacuaguaauaaggaaacuguaugaaugucugugggcaggaagugaagagauccuucuguaaagguuuuuggaauuaugucugcugaauaauaaacuuuuuugaaauaauaaaucugguagaaaaaugagaucuaaaaaaaaaaaaaaaaaaaaaaaaaaaaaaaaaaaaaaaaaaaaaaaaaaaaaaaaaaaaaaaaugcaucccccccccccccccccccccccccccccccaaaggcucuuuucagagccaccagaauu

SEQ ID NO: 1712 - RNA, 1948 nt, Artificial Sequence
  mRNA product Design b-4 comprising derived and/or modified sequence from HRSV(A2)__F_DSCav1_mut1 (opt3)
gggagagucccgcagucggcguccagcggcucugcuuguucgugugugugucguugcaggccuuauucaagcuuaccauggagcugcucauccuuaaggccaacgcuauuaccacaauacugacugcagugacguucugcuuugccagcggccagaauaucaccgaagaguucuaccaauccacauguucugcggucucaaaaggguauuugggagcuuuaagaacugguugguacaccaguguuauuacaaucgaacugagcaacauuaaggagaauaaaugcaacggcaccgacgccaaggugaaacuaaucaagcaggaacucgauaaguauaaaaaugcaguaacugagcugcagcuucugaugcaguccacacccgccaccgggucuggaucggcuauauguucaggcguggcagucugcaagguguugcaccucgagggugaaguuaacaaaaucaagagcgcccugcugaguacgaauaaagcuguggucucccucucuaacggggugagcguauuaacuuuuaagguucuggaccuuaagaauuacauugauaaacaauugcugccuauccuaaacaagcaguccuguucaauuccaaauaucgagaccgugauagaguuccagcagaaaaacaauaggcuccuggaaauuacacgggaguuuagugucaacgccggagugacuaccccggugagcacauauaugcuuaccaauucugaacuguugucccucaucaacgacaugcccauuacgaacgaucaaaagaaacugaugucaaauaacguccagaucguucgccagcagagcuacaguaucaugugcauuauaaaggaggaaguguuagcguauguagugcaacugccucucuacggcgucaucgacacuccauguuggaaacuucauacaucuccccugugcaccacuaauacaaaggagggcuccaacauuuguuugacccgaacggaucgugggugguacugcgacaaugcaggaagcgugucguucuuuccucaggccgaaaccuguaagguucagucuaacagaguguucugcgauacaaugaacucccuaacucugccaucagaggucaaucucugcaauguggacaucuuuaaccccaaauaugauuguaagauaaugaccaguaaaacagacguaagcuccucuguuauuacuagccugggugcuaucgugucaugcuacggcaagaccaaauguacagccaguaauaagaacagggggaucauuaagaccuucuccaauggaugcgauuaugucagcaacaaaggcguggacacugucucuguggguaauacgcuuuacuguguuaacaagcaagaggggcagucacuguaugugaaaggagaaccuaucauuaacuuuuacgacccauugguauucccgagugaugaguuugacgcaagcauaucccaggucaaugaaaagaucaaccagucucucgcuuucauucggaaaucggaugagcuguuacacaaugugaacgccggcaagagcacaaccaauaucaugaucacuaccauuauaaucguuauuaucgugauucugcuaucccucaucgcggucggccugcuuuuguauugcaaggcccgcucaacacccgugacccugaguaaagaccaacucucugggauaaacaauaucgcauucagcaacugaggacuaguaauaaggaaacuguaugaaugucugugggcaggaagugaagagauccuucuguaaagguuuuuggaauuaugucugcugaauaauaaacuuuuuugaaauaauaaaucugguagaaaaaugagaucuaaaaaaaaaaaaaaaaaaaaaaaaaaaaaaaaaaaaaaaaaaaaaaaaaaaaaaaaaaaaaaaaugcaucccccccccccccccccccccccccccccccaaaggcucuuuucagagccaccagaauu

SEQ ID NO: 1713 - RNA, 1948 nt, Artificial Sequence
  mRNA product Design b-4 comprising derived and/or modified sequence from HRSV(A2)__F_DSCav1_mut1 (opt4)
gggagagucccgcagucggcguccagcggcucugcuuguucgugugugugucguugcaggccuuauucaagcuuaccauggagcugcugauccugaaggccaacgccaucaccaccauccugaccgccgugaccuucugcuucgccagcggccagaacaucaccgaggaguucuaccagagcaccugcagcgccgugagcaagggcuaccugggcgcccugagaaccggcugguacaccagcgugaucaccaucgagcugagcaacaucaaggagaacaagugcaacggcaccgacgccaaggugaagcugaucaagcaggagcuggacaaguacaagaacgccgugaccgagcugcagcugcugaugcagagcacccccgccaccggcagcggcagcgccaucugcagcggcguggccgugugcaaggugcugcaccuggagggcgaggugaacaagaucaagagcgcccugcugagcaccaacaaggccguggugagccugagcaacggcgugagcgugcugaccuucaaggugcuggaccugaagaacuacaucgacaagcagcugcugcccauccugaacaagcagagcugcagcauccccaacaucgagaccgugaucgaguuccagcagaagaacaacagacugcuggagaucaccagagaguucagcgugaacgccggcgugaccacccccgugagcaccuacaugcugaccaacagcgagcugcugagccugaucaacgacaugcccaucaccaacgaccagaagaagcugaugagcaacaacgugcagaucgugagacagcagagcuacagcaucaugugcaucaucaaggaggaggugcuggccuacguggugcagcugccccuguacggcgugaucgacacccccugcuggaagcugcacaccagcccccugugcaccaccaacaccaaggagggcagcaacaucugccugaccagaaccgacagaggcugguacugcgacaacgccggcagcgugagcuucuucccccaggccgagaccugcaaggugcagagcaacagaguguucugcgacaccaugaacagccugacccugcccagcgaggugaaccugugcaacguggacaucuucaaccccaaguacgacugcaagaucaugaccagcaagaccgacgugagcagcagcgugaucaccagccugggcgccaucgugagcugcuacggcaagaccaagugcaccgccagcaacaagaacagaggcaucaucaagaccuucagcaacggcugcgacuacgugagcaacaagggcguggacaccgugagcgugggcaacacccuguacugcgugaacaagcaggagggccagagccuguacgugaagggcgagcccaucaucaacuucuacgacccccugguguuccccagcgacgaguucgacgccagcaucagccaggugaacgagaagaucaaccagagccuggccuucaucagaaagagcgacgagcugcugcacaacgugaacgccggcaagagcaccaccaacaucaugaucaccaccaucaucaucgugaucaucgugauccugcugagccugaucgccgugggccugcugcuguacugcaaggccagaagcacccccgugacccugagcaaggaccagcugagcggcaucaacaacaucgccuucagcaacugaggacuaguaauaaggaaacuguaugaaugucugugggcaggaagugaagagauccuucuguaaagguuuuuggaauuaugucugcugaauaauaaacuuuuuugaaauaauaaaucugguagaaaaaugagaucuaaaaaaaaaaaaaaaaaaaaaaaaaaaaaaaaaaaaaaaaaaaaaaaaaaaaaaaaaaaaaaaaugcaucccccccccccccccccccccccccccccccaaaggcucuuuucagagccaccagaauu

SEQ ID NO: 1714 - RNA, 1948 nt, Artificial Sequence
  mRNA product Design b-4 comprising derived and/or modified sequence from HRSV(A2)__F_DSCav1_mut1 (opt5)
gggagagucccgcagucggcguccagcggcucugcuuguucgugugugugucguugcaggccuuauucaagcuuaccauggagcugcucauccugaaggccaacgcuauuaccacaauccuuacggccgugaccuucugcuuugcgagcggccagaauauuacagaagaguucuaccaauccaccuguucugcugucagcaaaggguaucugggagcccucagaacaggcugguacaccuccguuaucacaauugaacugucuaacaucaaggagaauaaaugcaacgggaccgacgccaaggugaaacuuaucaagcaggaacuggauaaguauaaaaaugcugugacggagcuccagcugcugaugcagagcacccccgccacaggauccggcucugcuauuuguagcggggucgccgugugcaagguucuccaccuggagggagaagugaacaaaaucaaguccgcgcuucugagcaccaauaaagccgucgugucucucuccaacggcguuagcgugcugacauuuaagguccuugaccugaagaauuacauugauaaacaacuccugccuauccugaacaagcagucuuguuccauuccgaauaucgagaccgugauugaguuccagcagaaaaacaaucggcuccuggaaaucacgcgcgaguuuagcgugaacgcuggcgucacaacccccguuucuacauauaugcuuaccaauuccgaacugcucagccugaucaacgacaugccuauuaccaacgaucaaaagaaacuuauguccaauaacgugcagaucgugagacagcagucuuacagcauuaugugcaucauuaaggaggaaguccuggccuaugugguucaacucccccuguacggggugaucgacacaccuuguuggaaacugcauacgagcccccucugcaccacaaauaccaaggagggauccaacaucugucugacacggaccgaucgcggcugguacugcgacaaugcugggucugucuccuucuuuccucaggccgaaacguguaaggugcagagcaacagaguuuucugcgauacaaugaacucucuuacccugccgagcgaggugaaucucugcaaugucgacauuuuuaaccccaaauaugauuguaagaucaugaccuccaaaacagacgugucuagcuccgucauuaccagccugggagcgaucgugucuugcuacggcaagacaaaauguacggccuccaauaagaaccgggggauuaucaagaccuucagcaauggaugcgauuauguuucuaacaaaggcguggacacagucuccgugggcaauacccuuuacuguguuaacaagcaagaggggcagagccuguaugugaaaggagaaccuaucauuaacuuuuacgacccccucgucuucccuuccgaugaguuugacgcuucuaucagccaggugaaugaaaagauuaaccagucccuggccuucauccgcaaaucugaugagcugcuccacaaugugaacgcuggcaagagcacaaccaauauuaugaucacgaccauuaucaucguuauuaucgucauucugcuuucccugaucgccguggggcuccugcuguauugcaaggccagaagcacacccgugacccuuucuaaagaccaacucuccggaauuaacaauaucgcuuucagcaacugaggacuaguaauaaggaaacuguaugaaugucugugggcaggaagugaagagauccuucuguaaagguuuuuggaauuaugucugcugaauaauaaacuuuuuugaaauaauaaaucugguagaaaaaugagaucuaaaaaaaaaaaaaaaaaaaaaaaaaaaaaaaaaaaaaaaaaaaaaaaaaaaaaaaaaaaaaaaaugcaucccccccccccccccccccccccccccccccaaaggcucuuuucagagccaccagaauu

SEQ ID NO: 1715 - RNA, 1948 nt, Artificial Sequence
  mRNA product Design b-4 comprising derived and/or modified sequence from HRSV(A2)__F_DSCav1_mut1 (opt6)
gggagagucccgcagucggcguccagcggcucugcuuguucgugugugugucguugcaggccuuauucaagcuuaccauggaacuauuaauacuaaaagcaaacgcuauaacaacaauacuaacagcagucacauucugcuuugcaucaggccaaaacaucacagaagaauuuuaccaaucaacaugcuccgccguaucgaaaggauaccuaggcgcauuaagaaccggaugguauacaucagucauaacaauugaacuaucuaacauaaaagaaaacaaauguaacggcacagaugccaaaguaaaacucaucaaacaagaauuagauaaauacaaaaacgcagucacugaacuacaacucuuaaugcaaucaacaccugcaacaggaucaggaucagcaauaugcucaggaguagccguauguaaaguacuacaccuagaaggagaagucaacaaaauaaaaucagcccuccuaaguacaaacaaagcugucguaucacuauccaaugguguuucaguacuaacuuucaaaguucuagaccuaaaaaacuacauagacaaacaacuacuaccaauacuaaauaaacaaaguuguucuauacccaacauagaaaccgucauagaauuucaacaaaaaaauaauagacuccuagaaauaacaagagaauuuucaguuaacgcagguguaacaaccccaguauccaccuauaugcuaacaaauucagaauuacuuucccuaaucaacgacaugcccauaacaaaugaccaaaaaaaauuaaugucaaacaacguccaaauaguucgucaacaaucauauucaauaaugugcauaauaaaagaagaagucuuagccuacguaguacaacuuccccuuuauggaguuaucgacacacccugcuggaaacuccacacuucaccacuauguacuacaaacacaaaagaaggauccaacaucugccucacaagaaccgaucgaggaugguacugugauaacgccggauccgucucauucuucccacaagcagaaacaugcaaaguacaaucaaacagaguauuuugcgacacaaugaacucccucacauuaccuucugaaguaaaccuauguaauguagacauauucaaccccaaauacgauugcaaaauaaugacaucaaagacagauguaucaucaagugucaucacaucccuaggagcaauugucucauguuaugguaaaacaaaaugcaccgcaucaaauaaaaacagaggcauaauaaaaaccuucucaaacgguugugacuacguauccaauaaaggcgucgacacaguaucaguagguaacacauuauauuguguaaacaaacaagaaggacagucccuauauguaaaaggagaaccaauaaucaacuucuacgacccacuuguuuucccuucugaugaauuugacgcaaguauaucacaaguaaaugaaaaaaucaaucaaucacuagccuuuauaagaaaaucagaugaauuauuacacaacguaaacgccggaaaaucaacaaccaacauaaugauaaccacaauaauaaucgucauaauagucauccuacuaucacucauagcaguuggacuccuacuauacugcaaagcacgaucaacaccaguaacauuauccaaagaccaacuaagugguaucaauaacaucgccuuuucaaacugaggacuaguaauaaggaaacuguaugaaugucugugggcaggaagugaagagauccuucuguaaagguuuuuggaauuaugucugcugaauaauaaacuuuuuugaaauaauaaaucugguagaaaaaugagaucuaaaaaaaaaaaaaaaaaaaaaaaaaaaaaaaaaaaaaaaaaaaaaaaaaaaaaaaaaaaaaaaaugcaucccccccccccccccccccccccccccccccaaaggcucuuuucagagccaccagaauu

SEQ ID NO: 1716 - RNA, 1948 nt, Artificial Sequence
  mRNA product Design b-4 comprising derived and/or modified sequence from HRSV(A2)__F_DSCav1_mut1 (opt11)
gggagagucccgcagucggcguccagcggcucugcuuguucgugugugugucguugcaggccuuauucaagcuuaccauggaacuccuaauccucaaagccaacgcaaucaccacaauccucacugccgucaccuucugcuucgccuccggccaaaacauaacagaagaauuuuaccaaucaaccuguucagcggucuccaaaggcuaccucggcgcccuccgcaccggcugguacaccuccgugaucaccauagaacucuccaacaucaaggaaaacaaaugcaacggcaccgacgcgaaggucaaacuuauuaaacaagaacucgacaaauacaaaaacgcagucaccgaacuacaacuccuaaugcaguccacgccagccaccggcucuggcucagccauaugcuccgguguggccguaugcaaaguccuacaccucgaaggagaagucaacaaaauaaaauccgcccuacuguccacaaacaaggccguagucucccucucaaacggcgucucaguacucaccuucaaaguccuagaccucaagaacuacaucgacaaacaacuccuacccauacuaaacaaacaauccugcucaauccccaacaucgaaaccguaauagaauuucaacaaaaaaacaacagacuccuggagaucacccgggaauuuuccguaaacgccggagucacaacacccgucucaaccuacaugcuaacgaacucagagcuccucucacuuaucaacgacaugcccauaacaaacgaccaaaaaaaacucauguccaacaacgugcaaaucguccgacaacaauccuacuccaucaugugcaucauuaaagaagaaguccucgcauacguaguccagcucccccucuacggcgucauagacacccccugcuggaaacuacacacaucaccccucugcacaacaaacaccaaagaaggcuccaacaucugccucacccgcaccgaccgaggcugguacugcgauaacgccggcagcgucuccuucuucccccaagcagaaaccugcaagguccaauccaaccgaguuuucugcgacacuaugaacucgcucacccuccccuccgaagucaaccucugcaacgucgacauuuucaaccccaaauacgacugcaaaaucaugaccuccaagaccgacguauccuccuccgucaucaccucccuaggcgccauaguaaguugcuacggcaaaaccaagugcacagcaagcaacaaaaaccgaggaauaaucaaaaccuucuccaacggcugcgacuacguauccaacaagggcgucgacaccguauccguagggaacacccuuuacugcguaaacaaacaagaaggacaaucacucuacguaaaaggcgaacccauaaucaacuucuacgacccccucguauuucccuccgacgaauuugacgcaucaaucucacaggucaacgaaaaaauaaaccaaucgcuagcauucaucagaaaaucagacgaacuccuacacaacgucaacgcaggcaagagcaccaccaacaucaugaucaccaccaucaucaucgucauaaucgucauacuacucucacucauagcagucggccuccuccuauacuguaaagcaaggucgaccccagucacccuauccaaagaccaacuaagcggcaucaacaacaucgcguucucaaacuaaggacuaguaauaaggaaacuguaugaaugucugugggcaggaagugaagagauccuucuguaaagguuuuuggaauuaugucugcugaauaauaaacuuuuuugaaauaauaaaucugguagaaaaaugagaucuaaaaaaaaaaaaaaaaaaaaaaaaaaaaaaaaaaaaaaaaaaaaaaaaaaaaaaaaaaaaaaaaugcaucccccccccccccccccccccccccccccccaaaggcucuuuucagagccaccagaauu

SEQ ID NO: 1717 - RNA, 2010 nt, Artificial Sequence
  mRNA product Design b-5 comprising derived and/or modified sequence from HRSV(A2)__F_DSCav1_mut1 (opt1)
gggagacuccugucgggcggaaguaggaggaguagaguuuaaaaacaguacucuuuuuccgguucgggacguaguugaagcaacgacaagccggauaaccgcucuugagacaggaagcuuaccauggagcugcucauccugaaggccaacgccaucaccaccauccugacggcggugaccuucugcuucgccagcggccagaacaucaccgaggaguucuaccaguccacgugcagcgccgucuccaagggguaccucggcgcccugcggaccggcugguacaccuccgugaucaccaucgagcugagcaacaucaaggagaacaagugcaacgggaccgacgccaaggugaagcucaucaagcaggagcuggacaaguacaagaacgcggucacggagcugcagcuccugaugcaguccaccccggcaaccggcuccggcuccgccaucugcagcggcgucgccgugugcaaggugcugcaccucgagggggaggucaacaagaucaagagcgcccugcuguccaccaacaaggccguggugagccucuccaacggcgucagcgugcugaccuucaaggugcuggaccucaagaacuacaucgacaagcagcugcugcccauccugaacaagcagagcugcuccauccccaacaucgagacggugaucgaguuccagcagaagaacaaccggcuccuggagaucacccgcgaguucagcgugaacgccggggucaccacccccguguccacguacaugcugaccaacagcgagcuccugucccugaucaacgacaugccgaucaccaacgaccagaagaagcucaugagcaacaacgugcagaucguccggcagcaguccuacagcaucaugugcaucaucaaggaggaggugcuggcguacgugguccagcugccccucuacggcgugaucgacacccccugcuggaagcugcacacgagcccccugugcaccaccaacaccaaggagggguccaacaucugccucacgcgcaccgaccggggcugguacugcgacaacgccggcagcgucuccuucuucccgcaggccgagaccugcaaggugcagagcaaccgcguguucugcgacaccaugaacucccugacgcugcccagcgagguaaaccucugcaacgucgacaucuucaaccccaaguacgacugcaagaucaugaccuccaagaccgacgugagcuccagcgugaucaccucccugggggccaucgucagcugcuacggcaagacgaagugcaccgccagcaacaagaaccgggggaucaucaagaccuucuccaacggcugcgacuacgugagcaacaagggcguggacaccguguccgucgggaacacccuguacugcgugaacaagcaggagggccagagccucuacgugaagggggagcccaucaucaacuucuacgacccgcuggucuuccccuccgacgaguucgacgcgagcaucucccaggugaacgagaagaucaaccagagccuggccuucauccgcaaguccgacgagcugcuccacaacgugaacgccggcaagagcacgaccaacaucaugaucaccaccaucaucaucgucaucaucgugauccugcugucccucaucgccguggggcugcugcucuacugcaaggcccggagcacgcccgucacccuguccaaggaccagcugagcggcaucaacaacaucgcguucuccaacugaggacuaguacuggcugcaucucccuuuccucuguccuccauccuucucccaggauggugaagggggaccugguacccagugauccccaccccaggauccuaaaucaugacuuaccugcuaauaaaaacucauuggaaaagugagaagaucuaaaaaaaaaaaaaaaaaaaaaaaaaaaaaaaaaaaaaaaaaaaaaaaaaaaaaaaaaaaaaaaaugcaucccccccccccccccccccccccccccccccaaaggcucuuuucagagccaccagaauu

SEQ ID NO: 1718 - RNA, 2010 nt, Artificial Sequence
  mRNA product Design b-5 comprising derived and/or modified sequence from HRSV(A2)__F_DSCav1_mut1 (opt1)
gggagacuccugucgggcggaaguaggaggaguagaguuuaaaaacaguacucuuuuuccgguucgggacguaguugaagcaacgacaagccggauaaccgcucuugagacaggaagcuuaccauggagcugcucauccugaaggccaacgccaucaccaccauccugacggcggugaccuucugcuucgccagcggccagaacaucaccgaggaguucuaccaguccacgugcagcgccgucuccaagggguaccucggcgcccugcgcaccgggugguacaccagcgugaucaccaucgagcuguccaacaucaaggagaacaagugcaacggcaccgacgccaaggugaagcucaucaagcaggagcuggacaaguacaagaacgcggucacggagcugcagcuccugaugcagagcacccccgccaccggguccggcagcgccaucugcuccggcguggccgugugcaagguccugcaccucgagggggaggugaacaagaucaagagcgcgcugcuguccaccaacaaggccguggucagccucuccaacggcgugagcgugcugacguucaagguccuggaccucaagaacuacaucgacaagcagcugcugccgauccucaacaagcaguccugcagcauccccaacaucgagaccgugaucgaguuccagcagaagaacaaccggcugcuggagaucacccgcgaguucuccgugaacgccggggucaccacgcccgugagcaccuacaugcucaccaacuccgagcugcugagccucaucaacgacaugcccaucaccaacgaccagaagaagcugaugagcaacaacgugcagaucguccggcagcaguccuacagcaucaugugcaucaucaaggaggaggugcuggccuacgugguccagcucccgcuguacggcgugaucgacacgcccugcuggaagcugcacaccagcccccucugcaccaccaacacgaaggagggguccaacaucugccugacccgcaccgaccggggcugguacugcgacaacgccggcuccgugagcuucuucccccaggcggagaccugcaagguccaguccaaccgcguguucugcgacacgaugaacagccugacccucccguccgaggucaaccugugcaacguggacaucuucaaccccaaguacgacugcaagaucaugaccagcaagaccgacguguccagcuccgucaucacgagccugggggccaucguguccugcuacggcaagaccaagugcaccgccagcaacaagaaccgggggaucaucaagaccuucuccaacggcugcgacuacgugagcaacaagggcgucgacacgguguccguggggaacacccucuacugcgucaacaagcaggagggccagagccuguacgugaagggggagcccaucaucaacuucuacgacccccugguguucccgagcgacgaguucgacgccuccaucagccaggucaacgagaagaucaaccagucccucgccuucauccgcaagagcgacgagcugcugcacaacgugaacgcgggcaaguccaccaccaacaucaugaucaccacgaucaucaucgugaucaucgucauccuccugagccugaucgccguggggcuccugcuguacugcaaggcccgguccacccccgugacccugagcaaggaccagcucuccggcaucaacaacaucgccuucagcaacugaggacuaguacuggcugcaucucccuuuccucuguccuccauccuucucccaggauggugaagggggaccugguacccagugauccccaccccaggauccuaaaucaugacuuaccugcuaauaaaaacucauuggaaaagugagaagaucuaaaaaaaaaaaaaaaaaaaaaaaaaaaaaaaaaaaaaaaaaaaaaaaaaaaaaaaaaaaaaaaaugcaucccccccccccccccccccccccccccccccaaaggcucuuuucagagccaccagaauu

SEQ ID NO: 1719 - RNA, 2010 nt, Artificial Sequence
  mRNA product Design b-5 comprising derived and/or modified sequence from HRSV(A2)__F_DSCav1_mut1 (opt2)
gggagacuccugucgggcggaaguaggaggaguagaguuuaaaaacaguacucuuuuuccgguucgggacguaguugaagcaacgacaagccggauaaccgcucuugagacaggaagcuuaccauggagcuccucauccucaaggccaacgccaucaccaccauccucaccgccgucaccuucugcuucgccuccggccagaacaucaccgaggaguucuaccaguccaccugcuccgccgucuccaagggcuaccucggcgcccuccgcaccggcugguacaccuccgucaucaccaucgagcucuccaacaucaaggagaacaagugcaacggcaccgacgccaaggucaagcucaucaagcaggagcucgacaaguacaagaacgccgucaccgagcuccagcuccucaugcaguccacccccgccaccggcuccggcuccgccaucugcuccggcgucgccgucugcaagguccuccaccucgagggcgaggucaacaagaucaaguccgcccuccucuccaccaacaaggccgucgucucccucuccaacggcgucuccguccucaccuucaagguccucgaccucaagaacuacaucgacaagcagcuccuccccauccucaacaagcaguccugcuccauccccaacaucgagaccgucaucgaguuccagcagaagaacaaccgccuccucgagaucacccgcgaguucuccgucaacgccggcgucaccacccccgucuccaccuacaugcucaccaacuccgagcuccucucccucaucaacgacaugcccaucaccaacgaccagaagaagcucauguccaacaacguccagaucguccgccagcaguccuacuccaucaugugcaucaucaaggaggagguccucgccuacgucguccagcucccccucuacggcgucaucgacacccccugcuggaagcuccacaccuccccccucugcaccaccaacaccaaggagggcuccaacaucugccucacccgcaccgaccgcggcugguacugcgacaacgccggcuccgucuccuucuucccccaggccgagaccugcaagguccaguccaaccgcgucuucugcgacaccaugaacucccucacccuccccuccgaggucaaccucugcaacgucgacaucuucaaccccaaguacgacugcaagaucaugaccuccaagaccgacgucuccuccuccgucaucaccucccucggcgccaucgucuccugcuacggcaagaccaagugcaccgccuccaacaagaaccgcggcaucaucaagaccuucuccaacggcugcgacuacgucuccaacaagggcgucgacaccgucuccgucggcaacacccucuacugcgucaacaagcaggagggccagucccucuacgucaagggcgagcccaucaucaacuucuacgacccccucgucuuccccuccgacgaguucgacgccuccaucucccaggucaacgagaagaucaaccagucccucgccuucauccgcaaguccgacgagcuccuccacaacgucaacgccggcaaguccaccaccaacaucaugaucaccaccaucaucaucgucaucaucgucauccuccucucccucaucgccgucggccuccuccucuacugcaaggcccgcuccacccccgucacccucuccaaggaccagcucuccggcaucaacaacaucgccuucuccaacugaggacuaguacuggcugcaucucccuuuccucuguccuccauccuucucccaggauggugaagggggaccugguacccagugauccccaccccaggauccuaaaucaugacuuaccugcuaauaaaaacucauuggaaaagugagaagaucuaaaaaaaaaaaaaaaaaaaaaaaaaaaaaaaaaaaaaaaaaaaaaaaaaaaaaaaaaaaaaaaaugcaucccccccccccccccccccccccccccccccaaaggcucuuuucagagccaccagaauu

SEQ ID NO: 1720 - RNA, 2010 nt, Artificial Sequence
  mRNA product Design b-5 comprising derived and/or modified sequence from HRSV(A2)__F_DSCav1_mut1 (opt3)
gggagacuccugucgggcggaaguaggaggaguagaguuuaaaaacaguacucuuuuuccgguucgggacguaguugaagcaacgacaagccggauaaccgcucuugagacaggaagcuuaccauggagcugcucauccuuaaggccaacgcuauuaccacaauacugacugcagugacguucugcuuugccagcggccagaauaucaccgaagaguucuaccaauccacauguucugcggucucaaaaggguauuugggagcuuuaagaacugguugguacaccaguguuauuacaaucgaacugagcaacauuaaggagaauaaaugcaacggcaccgacgccaaggugaaacuaaucaagcaggaacucgauaaguauaaaaaugcaguaacugagcugcagcuucugaugcaguccacacccgccaccgggucuggaucggcuauauguucaggcguggcagucugcaagguguugcaccucgagggugaaguuaacaaaaucaagagcgcccugcugaguacgaauaaagcuguggucucccucucuaacggggugagcguauuaacuuuuaagguucuggaccuuaagaauuacauugauaaacaauugcugccuauccuaaacaagcaguccuguucaauuccaaauaucgagaccgugauagaguuccagcagaaaaacaauaggcuccuggaaauuacacgggaguuuagugucaacgccggagugacuaccccggugagcacauauaugcuuaccaauucugaacuguugucccucaucaacgacaugcccauuacgaacgaucaaaagaaacugaugucaaauaacguccagaucguucgccagcagagcuacaguaucaugugcauuauaaaggaggaaguguuagcguauguagugcaacugccucucuacggcgucaucgacacuccauguuggaaacuucauacaucuccccugugcaccacuaauacaaaggagggcuccaacauuuguuugacccgaacggaucgugggugguacugcgacaaugcaggaagcgugucguucuuuccucaggccgaaaccuguaagguucagucuaacagaguguucugcgauacaaugaacucccuaacucugccaucagaggucaaucucugcaauguggacaucuuuaaccccaaauaugauuguaagauaaugaccaguaaaacagacguaagcuccucuguuauuacuagccugggugcuaucgugucaugcuacggcaagaccaaauguacagccaguaauaagaacagggggaucauuaagaccuucuccaauggaugcgauuaugucagcaacaaaggcguggacacugucucuguggguaauacgcuuuacuguguuaacaagcaagaggggcagucacuguaugugaaaggagaaccuaucauuaacuuuuacgacccauugguauucccgagugaugaguuugacgcaagcauaucccaggucaaugaaaagaucaaccagucucucgcuuucauucggaaaucggaugagcuguuacacaaugugaacgccggcaagagcacaaccaauaucaugaucacuaccauuauaaucguuauuaucgugauucugcuaucccucaucgcggucggccugcuuuuguauugcaaggcccgcucaacacccgugacccugaguaaagaccaacucucugggauaaacaauaucgcauucagcaacugaggacuaguacuggcugcaucucccuuuccucuguccuccauccuucucccaggauggugaagggggaccugguacccagugauccccaccccaggauccuaaaucaugacuuaccugcuaauaaaaacucauuggaaaagugagaagaucuaaaaaaaaaaaaaaaaaaaaaaaaaaaaaaaaaaaaaaaaaaaaaaaaaaaaaaaaaaaaaaaaugcaucccccccccccccccccccccccccccccccaaaggcucuuuucagagccaccagaauu

SEQ ID NO: 1721 - RNA, 2010 nt, Artificial Sequence
  mRNA product Design b-5 comprising derived and/or modified sequence from HRSV(A2)__F_DSCav1_mut1 (opt4)
gggagacuccugucgggcggaaguaggaggaguagaguuuaaaaacaguacucuuuuuccgguucgggacguaguugaagcaacgacaagccggauaaccgcucuugagacaggaagcuuaccauggagcugcugauccugaaggccaacgccaucaccaccauccugaccgccgugaccuucugcuucgccagcggccagaacaucaccgaggaguucuaccagagcaccugcagcgccgugagcaagggcuaccugggcgcccugagaaccggcugguacaccagcgugaucaccaucgagcugagcaacaucaaggagaacaagugcaacggcaccgacgccaaggugaagcugaucaagcaggagcuggacaaguacaagaacgccgugaccgagcugcagcugcugaugcagagcacccccgccaccggcagcggcagcgccaucugcagcggcguggccgugugcaaggugcugcaccuggagggcgaggugaacaagaucaagagcgcccugcugagcaccaacaaggccguggugagccugagcaacggcgugagcgugcugaccuucaaggugcuggaccugaagaacuacaucgacaagcagcugcugcccauccugaacaagcagagcugcagcauccccaacaucgagaccgugaucgaguuccagcagaagaacaacagacugcuggagaucaccagagaguucagcgugaacgccggcgugaccacccccgugagcaccuacaugcugaccaacagcgagcugcugagccugaucaacgacaugcccaucaccaacgaccagaagaagcugaugagcaacaacgugcagaucgugagacagcagagcuacagcaucaugugcaucaucaaggaggaggugcuggccuacguggugcagcugccccuguacggcgugaucgacacccccugcuggaagcugcacaccagcccccugugcaccaccaacaccaaggagggcagcaacaucugccugaccagaaccgacagaggcugguacugcgacaacgccggcagcgugagcuucuucccccaggccgagaccugcaaggugcagagcaacagaguguucugcgacaccaugaacagccugacccugcccagcgaggugaaccugugcaacguggacaucuucaaccccaaguacgacugcaagaucaugaccagcaagaccgacgugagcagcagcgugaucaccagccugggcgccaucgugagcugcuacggcaagaccaagugcaccgccagcaacaagaacagaggcaucaucaagaccuucagcaacggcugcgacuacgugagcaacaagggcguggacaccgugagcgugggcaacacccuguacugcgugaacaagcaggagggccagagccuguacgugaagggcgagcccaucaucaacuucuacgacccccugguguuccccagcgacgaguucgacgccagcaucagccaggugaacgagaagaucaaccagagccuggccuucaucagaaagagcgacgagcugcugcacaacgugaacgccggcaagagcaccaccaacaucaugaucaccaccaucaucaucgugaucaucgugauccugcugagccugaucgccgugggccugcugcuguacugcaaggccagaagcacccccgugacccugagcaaggaccagcugagcggcaucaacaacaucgccuucagcaacugaggacuaguacuggcugcaucucccuuuccucuguccuccauccuucucccaggauggugaagggggaccugguacccagugauccccaccccaggauccuaaaucaugacuuaccugcuaauaaaaacucauuggaaaagugagaagaucuaaaaaaaaaaaaaaaaaaaaaaaaaaaaaaaaaaaaaaaaaaaaaaaaaaaaaaaaaaaaaaaaugcaucccccccccccccccccccccccccccccccaaaggcucuuuucagagccaccagaauu

SEQ ID NO: 1722 - RNA, 2010 nt, Artificial Sequence
  mRNA product Design b-5 comprising derived and/or modified sequence from HRSV(A2)__F_DSCav1_mut1 (opt5)
gggagacuccugucgggcggaaguaggaggaguagaguuuaaaaacaguacucuuuuuccgguucgggacguaguugaagcaacgacaagccggauaaccgcucuugagacaggaagcuuaccauggagcugcucauccugaaggccaacgcuauuaccacaauccuuacggccgugaccuucugcuuugcgagcggccagaauauuacagaagaguucuaccaauccaccuguucugcugucagcaaaggguaucugggagcccucagaacaggcugguacaccuccguuaucacaauugaacugucuaacaucaaggagaauaaaugcaacgggaccgacgccaaggugaaacuuaucaagcaggaacuggauaaguauaaaaaugcugugacggagcuccagcugcugaugcagagcacccccgccacaggauccggcucugcuauuuguagcggggucgccgugugcaagguucuccaccuggagggagaagugaacaaaaucaaguccgcgcuucugagcaccaauaaagccgucgugucucucuccaacggcguuagcgugcugacauuuaagguccuugaccugaagaauuacauugauaaacaacuccugccuauccugaacaagcagucuuguuccauuccgaauaucgagaccgugauugaguuccagcagaaaaacaaucggcuccuggaaaucacgcgcgaguuuagcgugaacgcuggcgucacaacccccguuucuacauauaugcuuaccaauuccgaacugcucagccugaucaacgacaugccuauuaccaacgaucaaaagaaacuuauguccaauaacgugcagaucgugagacagcagucuuacagcauuaugugcaucauuaaggaggaaguccuggccuaugugguucaacucccccuguacggggugaucgacacaccuuguuggaaacugcauacgagcccccucugcaccacaaauaccaaggagggauccaacaucugucugacacggaccgaucgcggcugguacugcgacaaugcugggucugucuccuucuuuccucaggccgaaacguguaaggugcagagcaacagaguuuucugcgauacaaugaacucucuuacccugccgagcgaggugaaucucugcaaugucgacauuuuuaaccccaaauaugauuguaagaucaugaccuccaaaacagacgugucuagcuccgucauuaccagccugggagcgaucgugucuugcuacggcaagacaaaauguacggccuccaauaagaaccgggggauuaucaagaccuucagcaauggaugcgauuauguuucuaacaaaggcguggacacagucuccgugggcaauacccuuuacuguguuaacaagcaagaggggcagagccuguaugugaaaggagaaccuaucauuaacuuuuacgacccccucgucuucccuuccgaugaguuugacgcuucuaucagccaggugaaugaaaagauuaaccagucccuggccuucauccgcaaaucugaugagcugcuccacaaugugaacgcuggcaagagcacaaccaauauuaugaucacgaccauuaucaucguuauuaucgucauucugcuuucccugaucgccguggggcuccugcuguauugcaaggccagaagcacacccgugacccuuucuaaagaccaacucuccggaauuaacaauaucgcuuucagcaacugaggacuaguacuggcugcaucucccuuuccucuguccuccauccuucucccaggauggugaagggggaccugguacccagugauccccaccccaggauccuaaaucaugacuuaccugcuaauaaaaacucauuggaaaagugagaagaucuaaaaaaaaaaaaaaaaaaaaaaaaaaaaaaaaaaaaaaaaaaaaaaaaaaaaaaaaaaaaaaaaugcaucccccccccccccccccccccccccccccccaaaggcucuuuucagagccaccagaauu

SEQ ID NO: 1723 - RNA, 2010 nt, Artificial Sequence
  mRNA product Design b-5 comprising derived and/or modified sequence from HRSV(A2)__F_DSCav1_mut1 (opt6)
gggagacuccugucgggcggaaguaggaggaguagaguuuaaaaacaguacucuuuuuccgguucgggacguaguugaagcaacgacaagccggauaaccgcucuugagacaggaagcuuaccauggaacuauuaauacuaaaagcaaacgcuauaacaacaauacuaacagcagucacauucugcuuugcaucaggccaaaacaucacagaagaauuuuaccaaucaacaugcuccgccguaucgaaaggauaccuaggcgcauuaagaaccggaugguauacaucagucauaacaauugaacuaucuaacauaaaagaaaacaaauguaacggcacagaugccaaaguaaaacucaucaaacaagaauuagauaaauacaaaaacgcagucacugaacuacaacucuuaaugcaaucaacaccugcaacaggaucaggaucagcaauaugcucaggaguagccguauguaaaguacuacaccuagaaggagaagucaacaaaauaaaaucagcccuccuaaguacaaacaaagcugucguaucacuauccaaugguguuucaguacuaacuuucaaaguucuagaccuaaaaaacuacauagacaaacaacuacuaccaauacuaaauaaacaaaguuguucuauacccaacauagaaaccgucauagaauuucaacaaaaaaauaauagacuccuagaaauaacaagagaauuuucaguuaacgcagguguaacaaccccaguauccaccuauaugcuaacaaauucagaauuacuuucccuaaucaacgacaugcccauaacaaaugaccaaaaaaaauuaaugucaaacaacguccaaauaguucgucaacaaucauauucaauaaugugcauaauaaaagaagaagucuuagccuacguaguacaacuuccccuuuauggaguuaucgacacacccugcuggaaacuccacacuucaccacuauguacuacaaacacaaaagaaggauccaacaucugccucacaagaaccgaucgaggaugguacugugauaacgccggauccgucucauucuucccacaagcagaaacaugcaaaguacaaucaaacagaguauuuugcgacacaaugaacucccucacauuaccuucugaaguaaaccuauguaauguagacauauucaaccccaaauacgauugcaaaauaaugacaucaaagacagauguaucaucaagugucaucacaucccuaggagcaauugucucauguuaugguaaaacaaaaugcaccgcaucaaauaaaaacagaggcauaauaaaaaccuucucaaacgguugugacuacguauccaauaaaggcgucgacacaguaucaguagguaacacauuauauuguguaaacaaacaagaaggacagucccuauauguaaaaggagaaccaauaaucaacuucuacgacccacuuguuuucccuucugaugaauuugacgcaaguauaucacaaguaaaugaaaaaaucaaucaaucacuagccuuuauaagaaaaucagaugaauuauuacacaacguaaacgccggaaaaucaacaaccaacauaaugauaaccacaauaauaaucgucauaauagucauccuacuaucacucauagcaguuggacuccuacuauacugcaaagcacgaucaacaccaguaacauuauccaaagaccaacuaagugguaucaauaacaucgccuuuucaaacugaggacuaguacuggcugcaucucccuuuccucuguccuccauccuucucccaggauggugaagggggaccugguacccagugauccccaccccaggauccuaaaucaugacuuaccugcuaauaaaaacucauuggaaaagugagaagaucuaaaaaaaaaaaaaaaaaaaaaaaaaaaaaaaaaaaaaaaaaaaaaaaaaaaaaaaaaaaaaaaaugcaucccccccccccccccccccccccccccccccaaaggcucuuuucagagccaccagaauu

SEQ ID NO: 1724 - RNA, 2010 nt, Artificial Sequence
  mRNA product Design b-5 comprising derived and/or modified sequence from HRSV(A2)__F_DSCav1_mut1 (opt11)
gggagacuccugucgggcggaaguaggaggaguagaguuuaaaaacaguacucuuuuuccgguucgggacguaguugaagcaacgacaagccggauaaccgcucuugagacaggaagcuuaccauggaacuccuaauccucaaagccaacgcaaucaccacaauccucacugccgucaccuucugcuucgccuccggccaaaacauaacagaagaauuuuaccaaucaaccuguucagcggucuccaaaggcuaccucggcgcccuccgcaccggcugguacaccuccgugaucaccauagaacucuccaacaucaaggaaaacaaaugcaacggcaccgacgcgaaggucaaacuuauuaaacaagaacucgacaaauacaaaaacgcagucaccgaacuacaacuccuaaugcaguccacgccagccaccggcucuggcucagccauaugcuccgguguggccguaugcaaaguccuacaccucgaaggagaagucaacaaaauaaaauccgcccuacuguccacaaacaaggccguagucucccucucaaacggcgucucaguacucaccuucaaaguccuagaccucaagaacuacaucgacaaacaacuccuacccauacuaaacaaacaauccugcucaauccccaacaucgaaaccguaauagaauuucaacaaaaaaacaacagacuccuggagaucacccgggaauuuuccguaaacgccggagucacaacacccgucucaaccuacaugcuaacgaacucagagcuccucucacuuaucaacgacaugcccauaacaaacgaccaaaaaaaacucauguccaacaacgugcaaaucguccgacaacaauccuacuccaucaugugcaucauuaaagaagaaguccucgcauacguaguccagcucccccucuacggcgucauagacacccccugcuggaaacuacacacaucaccccucugcacaacaaacaccaaagaaggcuccaacaucugccucacccgcaccgaccgaggcugguacugcgauaacgccggcagcgucuccuucuucccccaagcagaaaccugcaagguccaauccaaccgaguuuucugcgacacuaugaacucgcucacccuccccuccgaagucaaccucugcaacgucgacauuuucaaccccaaauacgacugcaaaaucaugaccuccaagaccgacguauccuccuccgucaucaccucccuaggcgccauaguaaguugcuacggcaaaaccaagugcacagcaagcaacaaaaaccgaggaauaaucaaaaccuucuccaacggcugcgacuacguauccaacaagggcgucgacaccguauccguagggaacacccuuuacugcguaaacaaacaagaaggacaaucacucuacguaaaaggcgaacccauaaucaacuucuacgacccccucguauuucccuccgacgaauuugacgcaucaaucucacaggucaacgaaaaaauaaaccaaucgcuagcauucaucagaaaaucagacgaacuccuacacaacgucaacgcaggcaagagcaccaccaacaucaugaucaccaccaucaucaucgucauaaucgucauacuacucucacucauagcagucggccuccuccuauacuguaaagcaaggucgaccccagucacccuauccaaagaccaacuaagcggcaucaacaacaucgcguucucaaacuaaggacuaguacuggcugcaucucccuuuccucuguccuccauccuucucccaggauggugaagggggaccugguacccagugauccccaccccaggauccuaaaucaugacuuaccugcuaauaaaaacucauuggaaaagugagaagaucuaaaaaaaaaaaaaaaaaaaaaaaaaaaaaaaaaaaaaaaaaaaaaaaaaaaaaaaaaaaaaaaaugcaucccccccccccccccccccccccccccccccaaaggcucuuuucagagccaccagaauu

SEQ ID NO: 1725 - RNA, 1916 nt, Artificial Sequence
  mRNA product Design c-1 comprising derived and/or modified sequence from HRSV(A2)__F_DSCav1_mut1 (opt1)
gggagaguccgcucagccagguugcagaagcggcuuagcguguguccuaaucuucucucugcguguagguaggccugugccgcaaacaagcuuaccauggagcugcucauccugaaggccaacgccaucaccaccauccugacggcggugaccuucugcuucgccagcggccagaacaucaccgaggaguucuaccaguccacgugcagcgccgucuccaagggguaccucggcgcccugcggaccggcugguacaccuccgugaucaccaucgagcugagcaacaucaaggagaacaagugcaacgggaccgacgccaaggugaagcucaucaagcaggagcuggacaaguacaagaacgcggucacggagcugcagcuccugaugcaguccaccccggcaaccggcuccggcuccgccaucugcagcggcgucgccgugugcaaggugcugcaccucgagggggaggucaacaagaucaagagcgcccugcuguccaccaacaaggccguggugagccucuccaacggcgucagcgugcugaccuucaaggugcuggaccucaagaacuacaucgacaagcagcugcugcccauccugaacaagcagagcugcuccauccccaacaucgagacggugaucgaguuccagcagaagaacaaccggcuccuggagaucacccgcgaguucagcgugaacgccggggucaccacccccguguccacguacaugcugaccaacagcgagcuccugucccugaucaacgacaugccgaucaccaacgaccagaagaagcucaugagcaacaacgugcagaucguccggcagcaguccuacagcaucaugugcaucaucaaggaggaggugcuggcguacgugguccagcugccccucuacggcgugaucgacacccccugcuggaagcugcacacgagcccccugugcaccaccaacaccaaggagggguccaacaucugccucacgcgcaccgaccggggcugguacugcgacaacgccggcagcgucuccuucuucccgcaggccgagaccugcaaggugcagagcaaccgcguguucugcgacaccaugaacucccugacgcugcccagcgagguaaaccucugcaacgucgacaucuucaaccccaaguacgacugcaagaucaugaccuccaagaccgacgugagcuccagcgugaucaccucccugggggccaucgucagcugcuacggcaagacgaagugcaccgccagcaacaagaaccgggggaucaucaagaccuucuccaacggcugcgacuacgugagcaacaagggcguggacaccguguccgucgggaacacccuguacugcgugaacaagcaggagggccagagccucuacgugaagggggagcccaucaucaacuucuacgacccgcuggucuuccccuccgacgaguucgacgcgagcaucucccaggugaacgagaagaucaaccagagccuggccuucauccgcaaguccgacgagcugcuccacaacgugaacgccggcaagagcacgaccaacaucaugaucaccaccaucaucaucgucaucaucgugauccugcugucccucaucgccguggggcugcugcucuacugcaaggcccggagcacgcccgucacccuguccaaggaccagcugagcggcaucaacaacaucgcguucuccaacugaggacuaguguccaccugucccuccugggcugcuggauugucucguuuuccugccaaauaaacaggaucagcgcuuuacagaucuaaaaaaaaaaaaaaaaaaaaaaaaaaaaaaaaaaaaaaaaaaaaaaaaaaaaaaaaaaaaaaaaugcaucccccccccccccccccccccccccccccccaaaggcucuuuucagagccaccagaauu

SEQ ID NO: 1726 - RNA, 1916 nt, Artificial Sequence
  mRNA product Design c-1 comprising derived and/or modified sequence from HRSV(A2)__F_DSCav1_mut1 (opt1)
gggagaguccgcucagccagguugcagaagcggcuuagcguguguccuaaucuucucucugcguguagguaggccugugccgcaaacaagcuuaccauggagcugcucauccugaaggccaacgccaucaccaccauccugacggcggugaccuucugcuucgccagcggccagaacaucaccgaggaguucuaccaguccacgugcagcgccgucuccaagggguaccucggcgcccugcgcaccgggugguacaccagcgugaucaccaucgagcuguccaacaucaaggagaacaagugcaacggcaccgacgccaaggugaagcucaucaagcaggagcuggacaaguacaagaacgcggucacggagcugcagcuccugaugcagagcacccccgccaccggguccggcagcgccaucugcuccggcguggccgugugcaagguccugcaccucgagggggaggugaacaagaucaagagcgcgcugcuguccaccaacaaggccguggucagccucuccaacggcgugagcgugcugacguucaagguccuggaccucaagaacuacaucgacaagcagcugcugccgauccucaacaagcaguccugcagcauccccaacaucgagaccgugaucgaguuccagcagaagaacaaccggcugcuggagaucacccgcgaguucuccgugaacgccggggucaccacgcccgugagcaccuacaugcucaccaacuccgagcugcugagccucaucaacgacaugcccaucaccaacgaccagaagaagcugaugagcaacaacgugcagaucguccggcagcaguccuacagcaucaugugcaucaucaaggaggaggugcuggccuacgugguccagcucccgcuguacggcgugaucgacacgcccugcuggaagcugcacaccagcccccucugcaccaccaacacgaaggagggguccaacaucugccugacccgcaccgaccggggcugguacugcgacaacgccggcuccgugagcuucuucccccaggcggagaccugcaagguccaguccaaccgcguguucugcgacacgaugaacagccugacccucccguccgaggucaaccugugcaacguggacaucuucaaccccaaguacgacugcaagaucaugaccagcaagaccgacguguccagcuccgucaucacgagccugggggccaucguguccugcuacggcaagaccaagugcaccgccagcaacaagaaccgggggaucaucaagaccuucuccaacggcugcgacuacgugagcaacaagggcgucgacacgguguccguggggaacacccucuacugcgucaacaagcaggagggccagagccuguacgugaagggggagcccaucaucaacuucuacgacccccugguguucccgagcgacgaguucgacgccuccaucagccaggucaacgagaagaucaaccagucccucgccuucauccgcaagagcgacgagcugcugcacaacgugaacgcgggcaaguccaccaccaacaucaugaucaccacgaucaucaucgugaucaucgucauccuccugagccugaucgccguggggcuccugcuguacugcaaggcccgguccacccccgugacccugagcaaggaccagcucuccggcaucaacaacaucgccuucagcaacugaggacuaguguccaccugucccuccugggcugcuggauugucucguuuuccugccaaauaaacaggaucagcgcuuuacagaucuaaaaaaaaaaaaaaaaaaaaaaaaaaaaaaaaaaaaaaaaaaaaaaaaaaaaaaaaaaaaaaaaugcaucccccccccccccccccccccccccccccccaaaggcucuuuucagagccaccagaauu

SEQ ID NO: 1727 - RNA, 1916 nt, Artificial Sequence
  mRNA product Design c-1 comprising derived and/or modified sequence from HRSV(A2)__F_DSCav1_mut1 (opt2)
gggagaguccgcucagccagguugcagaagcggcuuagcguguguccuaaucuucucucugcguguagguaggccugugccgcaaacaagcuuaccauggagcuccucauccucaaggccaacgccaucaccaccauccucaccgccgucaccuucugcuucgccuccggccagaacaucaccgaggaguucuaccaguccaccugcuccgccgucuccaagggcuaccucggcgcccuccgcaccggcugguacaccuccgucaucaccaucgagcucuccaacaucaaggagaacaagugcaacggcaccgacgccaaggucaagcucaucaagcaggagcucgacaaguacaagaacgccgucaccgagcuccagcuccucaugcaguccacccccgccaccggcuccggcuccgccaucugcuccggcgucgccgucugcaagguccuccaccucgagggcgaggucaacaagaucaaguccgcccuccucuccaccaacaaggccgucgucucccucuccaacggcgucuccguccucaccuucaagguccucgaccucaagaacuacaucgacaagcagcuccuccccauccucaacaagcaguccugcuccauccccaacaucgagaccgucaucgaguuccagcagaagaacaaccgccuccucgagaucacccgcgaguucuccgucaacgccggcgucaccacccccgucuccaccuacaugcucaccaacuccgagcuccucucccucaucaacgacaugcccaucaccaacgaccagaagaagcucauguccaacaacguccagaucguccgccagcaguccuacuccaucaugugcaucaucaaggaggagguccucgccuacgucguccagcucccccucuacggcgucaucgacacccccugcuggaagcuccacaccuccccccucugcaccaccaacaccaaggagggcuccaacaucugccucacccgcaccgaccgcggcugguacugcgacaacgccggcuccgucuccuucuucccccaggccgagaccugcaagguccaguccaaccgcgucuucugcgacaccaugaacucccucacccuccccuccgaggucaaccucugcaacgucgacaucuucaaccccaaguacgacugcaagaucaugaccuccaagaccgacgucuccuccuccgucaucaccucccucggcgccaucgucuccugcuacggcaagaccaagugcaccgccuccaacaagaaccgcggcaucaucaagaccuucuccaacggcugcgacuacgucuccaacaagggcgucgacaccgucuccgucggcaacacccucuacugcgucaacaagcaggagggccagucccucuacgucaagggcgagcccaucaucaacuucuacgacccccucgucuuccccuccgacgaguucgacgccuccaucucccaggucaacgagaagaucaaccagucccucgccuucauccgcaaguccgacgagcuccuccacaacgucaacgccggcaaguccaccaccaacaucaugaucaccaccaucaucaucgucaucaucgucauccuccucucccucaucgccgucggccuccuccucuacugcaaggcccgcuccacccccgucacccucuccaaggaccagcucuccggcaucaacaacaucgccuucuccaacugaggacuaguguccaccugucccuccugggcugcuggauugucucguuuuccugccaaauaaacaggaucagcgcuuuacagaucuaaaaaaaaaaaaaaaaaaaaaaaaaaaaaaaaaaaaaaaaaaaaaaaaaaaaaaaaaaaaaaaaugcaucccccccccccccccccccccccccccccccaaaggcucuuuucagagccaccagaauu

SEQ ID NO: 1728 - RNA, 1916 nt, Artificial Sequence
  mRNA product Design c-1 comprising derived and/or modified sequence from HRSV(A2)__F_DSCav1_mut1 (opt3)
gggagaguccgcucagccagguugcagaagcggcuuagcguguguccuaaucuucucucugcguguagguaggccugugccgcaaacaagcuuaccauggagcugcucauccuuaaggccaacgcuauuaccacaauacugacugcagugacguucugcuuugccagcggccagaauaucaccgaagaguucuaccaauccacauguucugcggucucaaaaggguauuugggagcuuuaagaacugguugguacaccaguguuauuacaaucgaacugagcaacauuaaggagaauaaaugcaacggcaccgacgccaaggugaaacuaaucaagcaggaacucgauaaguauaaaaaugcaguaacugagcugcagcuucugaugcaguccacacccgccaccgggucuggaucggcuauauguucaggcguggcagucugcaagguguugcaccucgagggugaaguuaacaaaaucaagagcgcccugcugaguacgaauaaagcuguggucucccucucuaacggggugagcguauuaacuuuuaagguucuggaccuuaagaauuacauugauaaacaauugcugccuauccuaaacaagcaguccuguucaauuccaaauaucgagaccgugauagaguuccagcagaaaaacaauaggcuccuggaaauuacacgggaguuuagugucaacgccggagugacuaccccggugagcacauauaugcuuaccaauucugaacuguugucccucaucaacgacaugcccauuacgaacgaucaaaagaaacugaugucaaauaacguccagaucguucgccagcagagcuacaguaucaugugcauuauaaaggaggaaguguuagcguauguagugcaacugccucucuacggcgucaucgacacuccauguuggaaacuucauacaucuccccugugcaccacuaauacaaaggagggcuccaacauuuguuugacccgaacggaucgugggugguacugcgacaaugcaggaagcgugucguucuuuccucaggccgaaaccuguaagguucagucuaacagaguguucugcgauacaaugaacucccuaacucugccaucagaggucaaucucugcaauguggacaucuuuaaccccaaauaugauuguaagauaaugaccaguaaaacagacguaagcuccucuguuauuacuagccugggugcuaucgugucaugcuacggcaagaccaaauguacagccaguaauaagaacagggggaucauuaagaccuucuccaauggaugcgauuaugucagcaacaaaggcguggacacugucucuguggguaauacgcuuuacuguguuaacaagcaagaggggcagucacuguaugugaaaggagaaccuaucauuaacuuuuacgacccauugguauucccgagugaugaguuugacgcaagcauaucccaggucaaugaaaagaucaaccagucucucgcuuucauucggaaaucggaugagcuguuacacaaugugaacgccggcaagagcacaaccaauaucaugaucacuaccauuauaaucguuauuaucgugauucugcuaucccucaucgcggucggccugcuuuuguauugcaaggcccgcucaacacccgugacccugaguaaagaccaacucucugggauaaacaauaucgcauucagcaacugaggacuaguguccaccugucccuccugggcugcuggauugucucguuuuccugccaaauaaacaggaucagcgcuuuacagaucuaaaaaaaaaaaaaaaaaaaaaaaaaaaaaaaaaaaaaaaaaaaaaaaaaaaaaaaaaaaaaaaaugcaucccccccccccccccccccccccccccccccaaaggcucuuuucagagccaccagaauu

SEQ ID NO: 1729 - RNA, 1916 nt, Artificial Sequence
  mRNA product Design c-1 comprising derived and/or modified sequence from HRSV(A2)__F_DSCav1_mut1 (opt4)
gggagaguccgcucagccagguugcagaagcggcuuagcguguguccuaaucuucucucugcguguagguaggccugugccgcaaacaagcuuaccauggagcugcugauccugaaggccaacgccaucaccaccauccugaccgccgugaccuucugcuucgccagcggccagaacaucaccgaggaguucuaccagagcaccugcagcgccgugagcaagggcuaccugggcgcccugagaaccggcugguacaccagcgugaucaccaucgagcugagcaacaucaaggagaacaagugcaacggcaccgacgccaaggugaagcugaucaagcaggagcuggacaaguacaagaacgccgugaccgagcugcagcugcugaugcagagcacccccgccaccggcagcggcagcgccaucugcagcggcguggccgugugcaaggugcugcaccuggagggcgaggugaacaagaucaagagcgcccugcugagcaccaacaaggccguggugagccugagcaacggcgugagcgugcugaccuucaaggugcuggaccugaagaacuacaucgacaagcagcugcugcccauccugaacaagcagagcugcagcauccccaacaucgagaccgugaucgaguuccagcagaagaacaacagacugcuggagaucaccagagaguucagcgugaacgccggcgugaccacccccgugagcaccuacaugcugaccaacagcgagcugcugagccugaucaacgacaugcccaucaccaacgaccagaagaagcugaugagcaacaacgugcagaucgugagacagcagagcuacagcaucaugugcaucaucaaggaggaggugcuggccuacguggugcagcugccccuguacggcgugaucgacacccccugcuggaagcugcacaccagcccccugugcaccaccaacaccaaggagggcagcaacaucugccugaccagaaccgacagaggcugguacugcgacaacgccggcagcgugagcuucuucccccaggccgagaccugcaaggugcagagcaacagaguguucugcgacaccaugaacagccugacccugcccagcgaggugaaccugugcaacguggacaucuucaaccccaaguacgacugcaagaucaugaccagcaagaccgacgugagcagcagcgugaucaccagccugggcgccaucgugagcugcuacggcaagaccaagugcaccgccagcaacaagaacagaggcaucaucaagaccuucagcaacggcugcgacuacgugagcaacaagggcguggacaccgugagcgugggcaacacccuguacugcgugaacaagcaggagggccagagccuguacgugaagggcgagcccaucaucaacuucuacgacccccugguguuccccagcgacgaguucgacgccagcaucagccaggugaacgagaagaucaaccagagccuggccuucaucagaaagagcgacgagcugcugcacaacgugaacgccggcaagagcaccaccaacaucaugaucaccaccaucaucaucgugaucaucgugauccugcugagccugaucgccgugggccugcugcuguacugcaaggccagaagcacccccgugacccugagcaaggaccagcugagcggcaucaacaacaucgccuucagcaacugaggacuaguguccaccugucccuccugggcugcuggauugucucguuuuccugccaaauaaacaggaucagcgcuuuacagaucuaaaaaaaaaaaaaaaaaaaaaaaaaaaaaaaaaaaaaaaaaaaaaaaaaaaaaaaaaaaaaaaaugcaucccccccccccccccccccccccccccccccaaaggcucuuuucagagccaccagaauu

SEQ ID NO: 1730 - RNA, 1916 nt, Artificial Sequence
  mRNA product Design c-1 comprising derived and/or modified sequence from HRSV(A2)__F_DSCav1_mut1 (opt5)
gggagaguccgcucagccagguugcagaagcggcuuagcguguguccuaaucuucucucugcguguagguaggccugugccgcaaacaagcuuaccauggagcugcucauccugaaggccaacgcuauuaccacaauccuuacggccgugaccuucugcuuugcgagcggccagaauauuacagaagaguucuaccaauccaccuguucugcugucagcaaaggguaucugggagcccucagaacaggcugguacaccuccguuaucacaauugaacugucuaacaucaaggagaauaaaugcaacgggaccgacgccaaggugaaacuuaucaagcaggaacuggauaaguauaaaaaugcugugacggagcuccagcugcugaugcagagcacccccgccacaggauccggcucugcuauuuguagcggggucgccgugugcaagguucuccaccuggagggagaagugaacaaaaucaaguccgcgcuucugagcaccaauaaagccgucgugucucucuccaacggcguuagcgugcugacauuuaagguccuugaccugaagaauuacauugauaaacaacuccugccuauccugaacaagcagucuuguuccauuccgaauaucgagaccgugauugaguuccagcagaaaaacaaucggcuccuggaaaucacgcgcgaguuuagcgugaacgcuggcgucacaacccccguuucuacauauaugcuuaccaauuccgaacugcucagccugaucaacgacaugccuauuaccaacgaucaaaagaaacuuauguccaauaacgugcagaucgugagacagcagucuuacagcauuaugugcaucauuaaggaggaaguccuggccuaugugguucaacucccccuguacggggugaucgacacaccuuguuggaaacugcauacgagcccccucugcaccacaaauaccaaggagggauccaacaucugucugacacggaccgaucgcggcugguacugcgacaaugcugggucugucuccuucuuuccucaggccgaaacguguaaggugcagagcaacagaguuuucugcgauacaaugaacucucuuacccugccgagcgaggugaaucucugcaaugucgacauuuuuaaccccaaauaugauuguaagaucaugaccuccaaaacagacgugucuagcuccgucauuaccagccugggagcgaucgugucuugcuacggcaagacaaaauguacggccuccaauaagaaccgggggauuaucaagaccuucagcaauggaugcgauuauguuucuaacaaaggcguggacacagucuccgugggcaauacccuuuacuguguuaacaagcaagaggggcagagccuguaugugaaaggagaaccuaucauuaacuuuuacgacccccucgucuucccuuccgaugaguuugacgcuucuaucagccaggugaaugaaaagauuaaccagucccuggccuucauccgcaaaucugaugagcugcuccacaaugugaacgcuggcaagagcacaaccaauauuaugaucacgaccauuaucaucguuauuaucgucauucugcuuucccugaucgccguggggcuccugcuguauugcaaggccagaagcacacccgugacccuuucuaaagaccaacucuccggaauuaacaauaucgcuuucagcaacugaggacuaguguccaccugucccuccugggcugcuggauugucucguuuuccugccaaauaaacaggaucagcgcuuuacagaucuaaaaaaaaaaaaaaaaaaaaaaaaaaaaaaaaaaaaaaaaaaaaaaaaaaaaaaaaaaaaaaaaugcaucccccccccccccccccccccccccccccccaaaggcucuuuucagagccaccagaauu

SEQ ID NO: 1731 - RNA, 1916 nt, Artificial Sequence
  mRNA product Design c-1 comprising derived and/or modified sequence from HRSV(A2)__F_DSCav1_mut1 (opt6)
gggagaguccgcucagccagguugcagaagcggcuuagcguguguccuaaucuucucucugcguguagguaggccugugccgcaaacaagcuuaccauggaacuauuaauacuaaaagcaaacgcuauaacaacaauacuaacagcagucacauucugcuuugcaucaggccaaaacaucacagaagaauuuuaccaaucaacaugcuccgccguaucgaaaggauaccuaggcgcauuaagaaccggaugguauacaucagucauaacaauugaacuaucuaacauaaaagaaaacaaauguaacggcacagaugccaaaguaaaacucaucaaacaagaauuagauaaauacaaaaacgcagucacugaacuacaacucuuaaugcaaucaacaccugcaacaggaucaggaucagcaauaugcucaggaguagccguauguaaaguacuacaccuagaaggagaagucaacaaaauaaaaucagcccuccuaaguacaaacaaagcugucguaucacuauccaaugguguuucaguacuaacuuucaaaguucuagaccuaaaaaacuacauagacaaacaacuacuaccaauacuaaauaaacaaaguuguucuauacccaacauagaaaccgucauagaauuucaacaaaaaaauaauagacuccuagaaauaacaagagaauuuucaguuaacgcagguguaacaaccccaguauccaccuauaugcuaacaaauucagaauuacuuucccuaaucaacgacaugcccauaacaaaugaccaaaaaaaauuaaugucaaacaacguccaaauaguucgucaacaaucauauucaauaaugugcauaauaaaagaagaagucuuagccuacguaguacaacuuccccuuuauggaguuaucgacacacccugcuggaaacuccacacuucaccacuauguacuacaaacacaaaagaaggauccaacaucugccucacaagaaccgaucgaggaugguacugugauaacgccggauccgucucauucuucccacaagcagaaacaugcaaaguacaaucaaacagaguauuuugcgacacaaugaacucccucacauuaccuucugaaguaaaccuauguaauguagacauauucaaccccaaauacgauugcaaaauaaugacaucaaagacagauguaucaucaagugucaucacaucccuaggagcaauugucucauguuaugguaaaacaaaaugcaccgcaucaaauaaaaacagaggcauaauaaaaaccuucucaaacgguugugacuacguauccaauaaaggcgucgacacaguaucaguagguaacacauuauauuguguaaacaaacaagaaggacagucccuauauguaaaaggagaaccaauaaucaacuucuacgacccacuuguuuucccuucugaugaauuugacgcaaguauaucacaaguaaaugaaaaaaucaaucaaucacuagccuuuauaagaaaaucagaugaauuauuacacaacguaaacgccggaaaaucaacaaccaacauaaugauaaccacaauaauaaucgucauaauagucauccuacuaucacucauagcaguuggacuccuacuauacugcaaagcacgaucaacaccaguaacauuauccaaagaccaacuaagugguaucaauaacaucgccuuuucaaacugaggacuaguguccaccugucccuccugggcugcuggauugucucguuuuccugccaaauaaacaggaucagcgcuuuacagaucuaaaaaaaaaaaaaaaaaaaaaaaaaaaaaaaaaaaaaaaaaaaaaaaaaaaaaaaaaaaaaaaaugcaucccccccccccccccccccccccccccccccaaaggcucuuuucagagccaccagaauu

SEQ ID NO: 1732 - RNA, 1916 nt, Artificial Sequence
  mRNA product Design c-1 comprising derived and/or modified sequence from HRSV(A2)__F_DSCav1_mut1 (opt11)
gggagaguccgcucagccagguugcagaagcggcuuagcguguguccuaaucuucucucugcguguagguaggccugugccgcaaacaagcuuaccauggaacuccuaauccucaaagccaacgcaaucaccacaauccucacugccgucaccuucugcuucgccuccggccaaaacauaacagaagaauuuuaccaaucaaccuguucagcggucuccaaaggcuaccucggcgcccuccgcaccggcugguacaccuccgugaucaccauagaacucuccaacaucaaggaaaacaaaugcaacggcaccgacgcgaaggucaaacuuauuaaacaagaacucgacaaauacaaaaacgcagucaccgaacuacaacuccuaaugcaguccacgccagccaccggcucuggcucagccauaugcuccgguguggccguaugcaaaguccuacaccucgaaggagaagucaacaaaauaaaauccgcccuacuguccacaaacaaggccguagucucccucucaaacggcgucucaguacucaccuucaaaguccuagaccucaagaacuacaucgacaaacaacuccuacccauacuaaacaaacaauccugcucaauccccaacaucgaaaccguaauagaauuucaacaaaaaaacaacagacuccuggagaucacccgggaauuuuccguaaacgccggagucacaacacccgucucaaccuacaugcuaacgaacucagagcuccucucacuuaucaacgacaugcccauaacaaacgaccaaaaaaaacucauguccaacaacgugcaaaucguccgacaacaauccuacuccaucaugugcaucauuaaagaagaaguccucgcauacguaguccagcucccccucuacggcgucauagacacccccugcuggaaacuacacacaucaccccucugcacaacaaacaccaaagaaggcuccaacaucugccucacccgcaccgaccgaggcugguacugcgauaacgccggcagcgucuccuucuucccccaagcagaaaccugcaagguccaauccaaccgaguuuucugcgacacuaugaacucgcucacccuccccuccgaagucaaccucugcaacgucgacauuuucaaccccaaauacgacugcaaaaucaugaccuccaagaccgacguauccuccuccgucaucaccucccuaggcgccauaguaaguugcuacggcaaaaccaagugcacagcaagcaacaaaaaccgaggaauaaucaaaaccuucuccaacggcugcgacuacguauccaacaagggcgucgacaccguauccguagggaacacccuuuacugcguaaacaaacaagaaggacaaucacucuacguaaaaggcgaacccauaaucaacuucuacgacccccucguauuucccuccgacgaauuugacgcaucaaucucacaggucaacgaaaaaauaaaccaaucgcuagcauucaucagaaaaucagacgaacuccuacacaacgucaacgcaggcaagagcaccaccaacaucaugaucaccaccaucaucaucgucauaaucgucauacuacucucacucauagcagucggccuccuccuauacuguaaagcaaggucgaccccagucacccuauccaaagaccaacuaagcggcaucaacaacaucgcguucucaaacuaaggacuaguguccaccugucccuccugggcugcuggauugucucguuuuccugccaaauaaacaggaucagcgcuuuacagaucuaaaaaaaaaaaaaaaaaaaaaaaaaaaaaaaaaaaaaaaaaaaaaaaaaaaaaaaaaaaaaaaaugcaucccccccccccccccccccccccccccccccaaaggcucuuuucagagccaccagaauu

SEQ ID NO: 1733 - RNA, 2006 nt, Artificial Sequence
  mRNA product Design c-2 comprising derived and/or modified sequence from HRSV(A2)__F_DSCav1_mut1 (opt1)
gggagacuccugucgggcggaaguaggaggaguagaguuuaaaaacaguacucuuuuuccgguucgggacguaguugaagcaacgacaagccggauaaccgcucuugagacaggaagcuuaccauggagcugcucauccugaaggccaacgccaucaccaccauccugacggcggugaccuucugcuucgccagcggccagaacaucaccgaggaguucuaccaguccacgugcagcgccgucuccaagggguaccucggcgcccugcggaccggcugguacaccuccgugaucaccaucgagcugagcaacaucaaggagaacaagugcaacgggaccgacgccaaggugaagcucaucaagcaggagcuggacaaguacaagaacgcggucacggagcugcagcuccugaugcaguccaccccggcaaccggcuccggcuccgccaucugcagcggcgucgccgugugcaaggugcugcaccucgagggggaggucaacaagaucaagagcgcccugcuguccaccaacaaggccguggugagccucuccaacggcgucagcgugcugaccuucaaggugcuggaccucaagaacuacaucgacaagcagcugcugcccauccugaacaagcagagcugcuccauccccaacaucgagacggugaucgaguuccagcagaagaacaaccggcuccuggagaucacccgcgaguucagcgugaacgccggggucaccacccccguguccacguacaugcugaccaacagcgagcuccugucccugaucaacgacaugccgaucaccaacgaccagaagaagcucaugagcaacaacgugcagaucguccggcagcaguccuacagcaucaugugcaucaucaaggaggaggugcuggcguacgugguccagcugccccucuacggcgugaucgacacccccugcuggaagcugcacacgagcccccugugcaccaccaacaccaaggagggguccaacaucugccucacgcgcaccgaccggggcugguacugcgacaacgccggcagcgucuccuucuucccgcaggccgagaccugcaaggugcagagcaaccgcguguucugcgacaccaugaacucccugacgcugcccagcgagguaaaccucugcaacgucgacaucuucaaccccaaguacgacugcaagaucaugaccuccaagaccgacgugagcuccagcgugaucaccucccugggggccaucgucagcugcuacggcaagacgaagugcaccgccagcaacaagaaccgggggaucaucaagaccuucuccaacggcugcgacuacgugagcaacaagggcguggacaccguguccgucgggaacacccuguacugcgugaacaagcaggagggccagagccucuacgugaagggggagcccaucaucaacuucuacgacccgcuggucuuccccuccgacgaguucgacgcgagcaucucccaggugaacgagaagaucaaccagagccuggccuucauccgcaaguccgacgagcugcuccacaacgugaacgccggcaagagcacgaccaacaucaugaucaccaccaucaucaucgucaucaucgugauccugcugucccucaucgccguggggcugcugcucuacugcaaggcccggagcacgcccgucacccuguccaaggaccagcugagcggcaucaacaacaucgcguucuccaacugaggacuaguggaagcauuuuccuggcugauuaaaagaaauuacucagcuauggucaucuguuccuguuagaaggcuaugcagcauauuauauacuaugcgcauguuaugaaaugcauaauaaaaaauuuuaaaaaaucuaaaagaucuaaaaaaaaaaaaaaaaaaaaaaaaaaaaaaaaaaaaaaaaaaaaaaaaaaaaaaaaaaaaaaaaugcaucccccccccccccccccccccccccccccccaaaggcucuuuucagagccaccagaauu

SEQ ID NO: 1734 - RNA, 2006 nt, Artificial Sequence
  mRNA product Design c-2 comprising derived and/or modified sequence from HRSV(A2)__F_DSCav1_mut1 (opt1)
gggagacuccugucgggcggaaguaggaggaguagaguuuaaaaacaguacucuuuuuccgguucgggacguaguugaagcaacgacaagccggauaaccgcucuugagacaggaagcuuaccauggagcugcucauccugaaggccaacgccaucaccaccauccugacggcggugaccuucugcuucgccagcggccagaacaucaccgaggaguucuaccaguccacgugcagcgccgucuccaagggguaccucggcgcccugcgcaccgggugguacaccagcgugaucaccaucgagcuguccaacaucaaggagaacaagugcaacggcaccgacgccaaggugaagcucaucaagcaggagcuggacaaguacaagaacgcggucacggagcugcagcuccugaugcagagcacccccgccaccggguccggcagcgccaucugcuccggcguggccgugugcaagguccugcaccucgagggggaggugaacaagaucaagagcgcgcugcuguccaccaacaaggccguggucagccucuccaacggcgugagcgugcugacguucaagguccuggaccucaagaacuacaucgacaagcagcugcugccgauccucaacaagcaguccugcagcauccccaacaucgagaccgugaucgaguuccagcagaagaacaaccggcugcuggagaucacccgcgaguucuccgugaacgccggggucaccacgcccgugagcaccuacaugcucaccaacuccgagcugcugagccucaucaacgacaugcccaucaccaacgaccagaagaagcugaugagcaacaacgugcagaucguccggcagcaguccuacagcaucaugugcaucaucaaggaggaggugcuggccuacgugguccagcucccgcuguacggcgugaucgacacgcccugcuggaagcugcacaccagcccccucugcaccaccaacacgaaggagggguccaacaucugccugacccgcaccgaccggggcugguacugcgacaacgccggcuccgugagcuucuucccccaggcggagaccugcaagguccaguccaaccgcguguucugcgacacgaugaacagccugacccucccguccgaggucaaccugugcaacguggacaucuucaaccccaaguacgacugcaagaucaugaccagcaagaccgacguguccagcuccgucaucacgagccugggggccaucguguccugcuacggcaagaccaagugcaccgccagcaacaagaaccgggggaucaucaagaccuucuccaacggcugcgacuacgugagcaacaagggcgucgacacgguguccguggggaacacccucuacugcgucaacaagcaggagggccagagccuguacgugaagggggagcccaucaucaacuucuacgacccccugguguucccgagcgacgaguucgacgccuccaucagccaggucaacgagaagaucaaccagucccucgccuucauccgcaagagcgacgagcugcugcacaacgugaacgcgggcaaguccaccaccaacaucaugaucaccacgaucaucaucgugaucaucgucauccuccugagccugaucgccguggggcuccugcuguacugcaaggcccgguccacccccgugacccugagcaaggaccagcucuccggcaucaacaacaucgccuucagcaacugaggacuaguggaagcauuuuccuggcugauuaaaagaaauuacucagcuauggucaucuguuccuguuagaaggcuaugcagcauauuauauacuaugcgcauguuaugaaaugcauaauaaaaaauuuuaaaaaaucuaaaagaucuaaaaaaaaaaaaaaaaaaaaaaaaaaaaaaaaaaaaaaaaaaaaaaaaaaaaaaaaaaaaaaaaugcaucccccccccccccccccccccccccccccccaaaggcucuuuucagagccaccagaauu

SEQ ID NO: 1735 - RNA, 2006 nt, Artificial Sequence
  mRNA product Design c-2 comprising derived and/or modified sequence from HRSV(A2)__F_DSCav1_mut1 (opt2)
gggagacuccugucgggcggaaguaggaggaguagaguuuaaaaacaguacucuuuuuccgguucgggacguaguugaagcaacgacaagccggauaaccgcucuugagacaggaagcuuaccauggagcuccucauccucaaggccaacgccaucaccaccauccucaccgccgucaccuucugcuucgccuccggccagaacaucaccgaggaguucuaccaguccaccugcuccgccgucuccaagggcuaccucggcgcccuccgcaccggcugguacaccuccgucaucaccaucgagcucuccaacaucaaggagaacaagugcaacggcaccgacgccaaggucaagcucaucaagcaggagcucgacaaguacaagaacgccgucaccgagcuccagcuccucaugcaguccacccccgccaccggcuccggcuccgccaucugcuccggcgucgccgucugcaagguccuccaccucgagggcgaggucaacaagaucaaguccgcccuccucuccaccaacaaggccgucgucucccucuccaacggcgucuccguccucaccuucaagguccucgaccucaagaacuacaucgacaagcagcuccuccccauccucaacaagcaguccugcuccauccccaacaucgagaccgucaucgaguuccagcagaagaacaaccgccuccucgagaucacccgcgaguucuccgucaacgccggcgucaccacccccgucuccaccuacaugcucaccaacuccgagcuccucucccucaucaacgacaugcccaucaccaacgaccagaagaagcucauguccaacaacguccagaucguccgccagcaguccuacuccaucaugugcaucaucaaggaggagguccucgccuacgucguccagcucccccucuacggcgucaucgacacccccugcuggaagcuccacaccuccccccucugcaccaccaacaccaaggagggcuccaacaucugccucacccgcaccgaccgcggcugguacugcgacaacgccggcuccgucuccuucuucccccaggccgagaccugcaagguccaguccaaccgcgucuucugcgacaccaugaacucccucacccuccccuccgaggucaaccucugcaacgucgacaucuucaaccccaaguacgacugcaagaucaugaccuccaagaccgacgucuccuccuccgucaucaccucccucggcgccaucgucuccugcuacggcaagaccaagugcaccgccuccaacaagaaccgcggcaucaucaagaccuucuccaacggcugcgacuacgucuccaacaagggcgucgacaccgucuccgucggcaacacccucuacugcgucaacaagcaggagggccagucccucuacgucaagggcgagcccaucaucaacuucuacgacccccucgucuuccccuccgacgaguucgacgccuccaucucccaggucaacgagaagaucaaccagucccucgccuucauccgcaaguccgacgagcuccuccacaacgucaacgccggcaaguccaccaccaacaucaugaucaccaccaucaucaucgucaucaucgucauccuccucucccucaucgccgucggccuccuccucuacugcaaggcccgcuccacccccgucacccucuccaaggaccagcucuccggcaucaacaacaucgccuucuccaacugaggacuaguggaagcauuuuccuggcugauuaaaagaaauuacucagcuauggucaucuguuccuguuagaaggcuaugcagcauauuauauacuaugcgcauguuaugaaaugcauaauaaaaaauuuuaaaaaaucuaaaagaucuaaaaaaaaaaaaaaaaaaaaaaaaaaaaaaaaaaaaaaaaaaaaaaaaaaaaaaaaaaaaaaaaugcaucccccccccccccccccccccccccccccccaaaggcucuuuucagagccaccagaauu

SEQ ID NO: 1736 - RNA, 2006 nt, Artificial Sequence
  mRNA product Design c-2 comprising derived and/or modified sequence from HRSV(A2)__F_DSCav1_mut1 (opt3)
gggagacuccugucgggcggaaguaggaggaguagaguuuaaaaacaguacucuuuuuccgguucgggacguaguugaagcaacgacaagccggauaaccgcucuugagacaggaagcuuaccauggagcugcucauccuuaaggccaacgcuauuaccacaauacugacugcagugacguucugcuuugccagcggccagaauaucaccgaagaguucuaccaauccacauguucugcggucucaaaaggguauuugggagcuuuaagaacugguugguacaccaguguuauuacaaucgaacugagcaacauuaaggagaauaaaugcaacggcaccgacgccaaggugaaacuaaucaagcaggaacucgauaaguauaaaaaugcaguaacugagcugcagcuucugaugcaguccacacccgccaccgggucuggaucggcuauauguucaggcguggcagucugcaagguguugcaccucgagggugaaguuaacaaaaucaagagcgcccugcugaguacgaauaaagcuguggucucccucucuaacggggugagcguauuaacuuuuaagguucuggaccuuaagaauuacauugauaaacaauugcugccuauccuaaacaagcaguccuguucaauuccaaauaucgagaccgugauagaguuccagcagaaaaacaauaggcuccuggaaauuacacgggaguuuagugucaacgccggagugacuaccccggugagcacauauaugcuuaccaauucugaacuguugucccucaucaacgacaugcccauuacgaacgaucaaaagaaacugaugucaaauaacguccagaucguucgccagcagagcuacaguaucaugugcauuauaaaggaggaaguguuagcguauguagugcaacugccucucuacggcgucaucgacacuccauguuggaaacuucauacaucuccccugugcaccacuaauacaaaggagggcuccaacauuuguuugacccgaacggaucgugggugguacugcgacaaugcaggaagcgugucguucuuuccucaggccgaaaccuguaagguucagucuaacagaguguucugcgauacaaugaacucccuaacucugccaucagaggucaaucucugcaauguggacaucuuuaaccccaaauaugauuguaagauaaugaccaguaaaacagacguaagcuccucuguuauuacuagccugggugcuaucgugucaugcuacggcaagaccaaauguacagccaguaauaagaacagggggaucauuaagaccuucuccaauggaugcgauuaugucagcaacaaaggcguggacacugucucuguggguaauacgcuuuacuguguuaacaagcaagaggggcagucacuguaugugaaaggagaaccuaucauuaacuuuuacgacccauugguauucccgagugaugaguuugacgcaagcauaucccaggucaaugaaaagaucaaccagucucucgcuuucauucggaaaucggaugagcuguuacacaaugugaacgccggcaagagcacaaccaauaucaugaucacuaccauuauaaucguuauuaucgugauucugcuaucccucaucgcggucggccugcuuuuguauugcaaggcccgcucaacacccgugacccugaguaaagaccaacucucugggauaaacaauaucgcauucagcaacugaggacuaguggaagcauuuuccuggcugauuaaaagaaauuacucagcuauggucaucuguuccuguuagaaggcuaugcagcauauuauauacuaugcgcauguuaugaaaugcauaauaaaaaauuuuaaaaaaucuaaaagaucuaaaaaaaaaaaaaaaaaaaaaaaaaaaaaaaaaaaaaaaaaaaaaaaaaaaaaaaaaaaaaaaaugcaucccccccccccccccccccccccccccccccaaaggcucuuuucagagccaccagaauu

SEQ ID NO: 1737 - RNA, 2006 nt, Artificial Sequence
  mRNA product Design c-2 comprising derived and/or modified sequence from HRSV(A2)__F_DSCav1_mut1 (opt4)
gggagacuccugucgggcggaaguaggaggaguagaguuuaaaaacaguacucuuuuuccgguucgggacguaguugaagcaacgacaagccggauaaccgcucuugagacaggaagcuuaccauggagcugcugauccugaaggccaacgccaucaccaccauccugaccgccgugaccuucugcuucgccagcggccagaacaucaccgaggaguucuaccagagcaccugcagcgccgugagcaagggcuaccugggcgcccugagaaccggcugguacaccagcgugaucaccaucgagcugagcaacaucaaggagaacaagugcaacggcaccgacgccaaggugaagcugaucaagcaggagcuggacaaguacaagaacgccgugaccgagcugcagcugcugaugcagagcacccccgccaccggcagcggcagcgccaucugcagcggcguggccgugugcaaggugcugcaccuggagggcgaggugaacaagaucaagagcgcccugcugagcaccaacaaggccguggugagccugagcaacggcgugagcgugcugaccuucaaggugcuggaccugaagaacuacaucgacaagcagcugcugcccauccugaacaagcagagcugcagcauccccaacaucgagaccgugaucgaguuccagcagaagaacaacagacugcuggagaucaccagagaguucagcgugaacgccggcgugaccacccccgugagcaccuacaugcugaccaacagcgagcugcugagccugaucaacgacaugcccaucaccaacgaccagaagaagcugaugagcaacaacgugcagaucgugagacagcagagcuacagcaucaugugcaucaucaaggaggaggugcuggccuacguggugcagcugccccuguacggcgugaucgacacccccugcuggaagcugcacaccagcccccugugcaccaccaacaccaaggagggcagcaacaucugccugaccagaaccgacagaggcugguacugcgacaacgccggcagcgugagcuucuucccccaggccgagaccugcaaggugcagagcaacagaguguucugcgacaccaugaacagccugacccugcccagcgaggugaaccugugcaacguggacaucuucaaccccaaguacgacugcaagaucaugaccagcaagaccgacgugagcagcagcgugaucaccagccugggcgccaucgugagcugcuacggcaagaccaagugcaccgccagcaacaagaacagaggcaucaucaagaccuucagcaacggcugcgacuacgugagcaacaagggcguggacaccgugagcgugggcaacacccuguacugcgugaacaagcaggagggccagagccuguacgugaagggcgagcccaucaucaacuucuacgacccccugguguuccccagcgacgaguucgacgccagcaucagccaggugaacgagaagaucaaccagagccuggccuucaucagaaagagcgacgagcugcugcacaacgugaacgccggcaagagcaccaccaacaucaugaucaccaccaucaucaucgugaucaucgugauccugcugagccugaucgccgugggccugcugcuguacugcaaggccagaagcacccccgugacccugagcaaggaccagcugagcggcaucaacaacaucgccuucagcaacugaggacuaguggaagcauuuuccuggcugauuaaaagaaauuacucagcuauggucaucuguuccuguuagaaggcuaugcagcauauuauauacuaugcgcauguuaugaaaugcauaauaaaaaauuuuaaaaaaucuaaaagaucuaaaaaaaaaaaaaaaaaaaaaaaaaaaaaaaaaaaaaaaaaaaaaaaaaaaaaaaaaaaaaaaaugcaucccccccccccccccccccccccccccccccaaaggcucuuuucagagccaccagaauu

SEQ ID NO: 1738 - RNA, 2006 nt, Artificial Sequence
  mRNA product Design c-2 comprising derived and/or modified sequence from HRSV(A2)__F_DSCav1_mut1 (opt5)
gggagacuccugucgggcggaaguaggaggaguagaguuuaaaaacaguacucuuuuuccgguucgggacguaguugaagcaacgacaagccggauaaccgcucuugagacaggaagcuuaccauggagcugcucauccugaaggccaacgcuauuaccacaauccuuacggccgugaccuucugcuuugcgagcggccagaauauuacagaagaguucuaccaauccaccuguucugcugucagcaaaggguaucugggagcccucagaacaggcugguacaccuccguuaucacaauugaacugucuaacaucaaggagaauaaaugcaacgggaccgacgccaaggugaaacuuaucaagcaggaacuggauaaguauaaaaaugcugugacggagcuccagcugcugaugcagagcacccccgccacaggauccggcucugcuauuuguagcggggucgccgugugcaagguucuccaccuggagggagaagugaacaaaaucaaguccgcgcuucugagcaccaauaaagccgucgugucucucuccaacggcguuagcgugcugacauuuaagguccuugaccugaagaauuacauugauaaacaacuccugccuauccugaacaagcagucuuguuccauuccgaauaucgagaccgugauugaguuccagcagaaaaacaaucggcuccuggaaaucacgcgcgaguuuagcgugaacgcuggcgucacaacccccguuucuacauauaugcuuaccaauuccgaacugcucagccugaucaacgacaugccuauuaccaacgaucaaaagaaacuuauguccaauaacgugcagaucgugagacagcagucuuacagcauuaugugcaucauuaaggaggaaguccuggccuaugugguucaacucccccuguacggggugaucgacacaccuuguuggaaacugcauacgagcccccucugcaccacaaauaccaaggagggauccaacaucugucugacacggaccgaucgcggcugguacugcgacaaugcugggucugucuccuucuuuccucaggccgaaacguguaaggugcagagcaacagaguuuucugcgauacaaugaacucucuuacccugccgagcgaggugaaucucugcaaugucgacauuuuuaaccccaaauaugauuguaagaucaugaccuccaaaacagacgugucuagcuccgucauuaccagccugggagcgaucgugucuugcuacggcaagacaaaauguacggccuccaauaagaaccgggggauuaucaagaccuucagcaauggaugcgauuauguuucuaacaaaggcguggacacagucuccgugggcaauacccuuuacuguguuaacaagcaagaggggcagagccuguaugugaaaggagaaccuaucauuaacuuuuacgacccccucgucuucccuuccgaugaguuugacgcuucuaucagccaggugaaugaaaagauuaaccagucccuggccuucauccgcaaaucugaugagcugcuccacaaugugaacgcuggcaagagcacaaccaauauuaugaucacgaccauuaucaucguuauuaucgucauucugcuuucccugaucgccguggggcuccugcuguauugcaaggccagaagcacacccgugacccuuucuaaagaccaacucuccggaauuaacaauaucgcuuucagcaacugaggacuaguggaagcauuuuccuggcugauuaaaagaaauuacucagcuauggucaucuguuccuguuagaaggcuaugcagcauauuauauacuaugcgcauguuaugaaaugcauaauaaaaaauuuuaaaaaaucuaaaagaucuaaaaaaaaaaaaaaaaaaaaaaaaaaaaaaaaaaaaaaaaaaaaaaaaaaaaaaaaaaaaaaaaugcaucccccccccccccccccccccccccccccccaaaggcucuuuucagagccaccagaauu

SEQ ID NO: 1739 - RNA, 2006 nt, Artificial Sequence
  mRNA product Design c-2 comprising derived and/or modified sequence from HRSV(A2)__F_DSCav1_mut1 (opt6)
gggagacuccugucgggcggaaguaggaggaguagaguuuaaaaacaguacucuuuuuccgguucgggacguaguugaagcaacgacaagccggauaaccgcucuugagacaggaagcuuaccauggaacuauuaauacuaaaagcaaacgcuauaacaacaauacuaacagcagucacauucugcuuugcaucaggccaaaacaucacagaagaauuuuaccaaucaacaugcuccgccguaucgaaaggauaccuaggcgcauuaagaaccggaugguauacaucagucauaacaauugaacuaucuaacauaaaagaaaacaaauguaacggcacagaugccaaaguaaaacucaucaaacaagaauuagauaaauacaaaaacgcagucacugaacuacaacucuuaaugcaaucaacaccugcaacaggaucaggaucagcaauaugcucaggaguagccguauguaaaguacuacaccuagaaggagaagucaacaaaauaaaaucagcccuccuaaguacaaacaaagcugucguaucacuauccaaugguguuucaguacuaacuuucaaaguucuagaccuaaaaaacuacauagacaaacaacuacuaccaauacuaaauaaacaaaguuguucuauacccaacauagaaaccgucauagaauuucaacaaaaaaauaauagacuccuagaaauaacaagagaauuuucaguuaacgcagguguaacaaccccaguauccaccuauaugcuaacaaauucagaauuacuuucccuaaucaacgacaugcccauaacaaaugaccaaaaaaaauuaaugucaaacaacguccaaauaguucgucaacaaucauauucaauaaugugcauaauaaaagaagaagucuuagccuacguaguacaacuuccccuuuauggaguuaucgacacacccugcuggaaacuccacacuucaccacuauguacuacaaacacaaaagaaggauccaacaucugccucacaagaaccgaucgaggaugguacugugauaacgccggauccgucucauucuucccacaagcagaaacaugcaaaguacaaucaaacagaguauuuugcgacacaaugaacucccucacauuaccuucugaaguaaaccuauguaauguagacauauucaaccccaaauacgauugcaaaauaaugacaucaaagacagauguaucaucaagugucaucacaucccuaggagcaauugucucauguuaugguaaaacaaaaugcaccgcaucaaauaaaaacagaggcauaauaaaaaccuucucaaacgguugugacuacguauccaauaaaggcgucgacacaguaucaguagguaacacauuauauuguguaaacaaacaagaaggacagucccuauauguaaaaggagaaccaauaaucaacuucuacgacccacuuguuuucccuucugaugaauuugacgcaaguauaucacaaguaaaugaaaaaaucaaucaaucacuagccuuuauaagaaaaucagaugaauuauuacacaacguaaacgccggaaaaucaacaaccaacauaaugauaaccacaauaauaaucgucauaauagucauccuacuaucacucauagcaguuggacuccuacuauacugcaaagcacgaucaacaccaguaacauuauccaaagaccaacuaagugguaucaauaacaucgccuuuucaaacugaggacuaguggaagcauuuuccuggcugauuaaaagaaauuacucagcuauggucaucuguuccuguuagaaggcuaugcagcauauuauauacuaugcgcauguuaugaaaugcauaauaaaaaauuuuaaaaaaucuaaaagaucuaaaaaaaaaaaaaaaaaaaaaaaaaaaaaaaaaaaaaaaaaaaaaaaaaaaaaaaaaaaaaaaaugcaucccccccccccccccccccccccccccccccaaaggcucuuuucagagccaccagaauu

SEQ ID NO: 1740 - RNA, 2006 nt, Artificial Sequence
  mRNA product Design c-2 comprising derived and/or modified sequence from HRSV(A2)__F_DSCav1_mut1 (opt11)
gggagacuccugucgggcggaaguaggaggaguagaguuuaaaaacaguacucuuuuuccgguucgggacguaguugaagcaacgacaagccggauaaccgcucuugagacaggaagcuuaccauggaacuccuaauccucaaagccaacgcaaucaccacaauccucacugccgucaccuucugcuucgccuccggccaaaacauaacagaagaauuuuaccaaucaaccuguucagcggucuccaaaggcuaccucggcgcccuccgcaccggcugguacaccuccgugaucaccauagaacucuccaacaucaaggaaaacaaaugcaacggcaccgacgcgaaggucaaacuuauuaaacaagaacucgacaaauacaaaaacgcagucaccgaacuacaacuccuaaugcaguccacgccagccaccggcucuggcucagccauaugcuccgguguggccguaugcaaaguccuacaccucgaaggagaagucaacaaaauaaaauccgcccuacuguccacaaacaaggccguagucucccucucaaacggcgucucaguacucaccuucaaaguccuagaccucaagaacuacaucgacaaacaacuccuacccauacuaaacaaacaauccugcucaauccccaacaucgaaaccguaauagaauuucaacaaaaaaacaacagacuccuggagaucacccgggaauuuuccguaaacgccggagucacaacacccgucucaaccuacaugcuaacgaacucagagcuccucucacuuaucaacgacaugcccauaacaaacgaccaaaaaaaacucauguccaacaacgugcaaaucguccgacaacaauccuacuccaucaugugcaucauuaaagaagaaguccucgcauacguaguccagcucccccucuacggcgucauagacacccccugcuggaaacuacacacaucaccccucugcacaacaaacaccaaagaaggcuccaacaucugccucacccgcaccgaccgaggcugguacugcgauaacgccggcagcgucuccuucuucccccaagcagaaaccugcaagguccaauccaaccgaguuuucugcgacacuaugaacucgcucacccuccccuccgaagucaaccucugcaacgucgacauuuucaaccccaaauacgacugcaaaaucaugaccuccaagaccgacguauccuccuccgucaucaccucccuaggcgccauaguaaguugcuacggcaaaaccaagugcacagcaagcaacaaaaaccgaggaauaaucaaaaccuucuccaacggcugcgacuacguauccaacaagggcgucgacaccguauccguagggaacacccuuuacugcguaaacaaacaagaaggacaaucacucuacguaaaaggcgaacccauaaucaacuucuacgacccccucguauuucccuccgacgaauuugacgcaucaaucucacaggucaacgaaaaaauaaaccaaucgcuagcauucaucagaaaaucagacgaacuccuacacaacgucaacgcaggcaagagcaccaccaacaucaugaucaccaccaucaucaucgucauaaucgucauacuacucucacucauagcagucggccuccuccuauacuguaaagcaaggucgaccccagucacccuauccaaagaccaacuaagcggcaucaacaacaucgcguucucaaacuaaggacuaguggaagcauuuuccuggcugauuaaaagaaauuacucagcuauggucaucuguuccuguuagaaggcuaugcagcauauuauauacuaugcgcauguuaugaaaugcauaauaaaaaauuuuaaaaaaucuaaaagaucuaaaaaaaaaaaaaaaaaaaaaaaaaaaaaaaaaaaaaaaaaaaaaaaaaaaaaaaaaaaaaaaaugcaucccccccccccccccccccccccccccccccaaaggcucuuuucagagccaccagaauu

SEQ ID NO: 1741 - RNA, 1983 nt, Artificial Sequence
  mRNA product Design c-3 comprising derived and/or modified sequence from HRSV(A2)__F_DSCav1_mut1 (opt1)
gggagaguccgcucagccagguugcagaagcggcuuagcguguguccuaaucuucucucugcguguagguaggccugugccgcaaacaagcuuaccauggagcugcucauccugaaggccaacgccaucaccaccauccugacggcggugaccuucugcuucgccagcggccagaacaucaccgaggaguucuaccaguccacgugcagcgccgucuccaagggguaccucggcgcccugcggaccggcugguacaccuccgugaucaccaucgagcugagcaacaucaaggagaacaagugcaacgggaccgacgccaaggugaagcucaucaagcaggagcuggacaaguacaagaacgcggucacggagcugcagcuccugaugcaguccaccccggcaaccggcuccggcuccgccaucugcagcggcgucgccgugugcaaggugcugcaccucgagggggaggucaacaagaucaagagcgcccugcuguccaccaacaaggccguggugagccucuccaacggcgucagcgugcugaccuucaaggugcuggaccucaagaacuacaucgacaagcagcugcugcccauccugaacaagcagagcugcuccauccccaacaucgagacggugaucgaguuccagcagaagaacaaccggcuccuggagaucacccgcgaguucagcgugaacgccggggucaccacccccguguccacguacaugcugaccaacagcgagcuccugucccugaucaacgacaugccgaucaccaacgaccagaagaagcucaugagcaacaacgugcagaucguccggcagcaguccuacagcaucaugugcaucaucaaggaggaggugcuggcguacgugguccagcugccccucuacggcgugaucgacacccccugcuggaagcugcacacgagcccccugugcaccaccaacaccaaggagggguccaacaucugccucacgcgcaccgaccggggcugguacugcgacaacgccggcagcgucuccuucuucccgcaggccgagaccugcaaggugcagagcaaccgcguguucugcgacaccaugaacucccugacgcugcccagcgagguaaaccucugcaacgucgacaucuucaaccccaaguacgacugcaagaucaugaccuccaagaccgacgugagcuccagcgugaucaccucccugggggccaucgucagcugcuacggcaagacgaagugcaccgccagcaacaagaaccgggggaucaucaagaccuucuccaacggcugcgacuacgugagcaacaagggcguggacaccguguccgucgggaacacccuguacugcgugaacaagcaggagggccagagccucuacgugaagggggagcccaucaucaacuucuacgacccgcuggucuuccccuccgacgaguucgacgcgagcaucucccaggugaacgagaagaucaaccagagccuggccuucauccgcaaguccgacgagcugcuccacaacgugaacgccggcaagagcacgaccaacaucaugaucaccaccaucaucaucgucaucaucgugauccugcugucccucaucgccguggggcugcugcucuacugcaaggcccggagcacgcccgucacccuguccaaggaccagcugagcggcaucaacaacaucgcguucuccaacugaggacuaguacuggcugcaucucccuuuccucuguccuccauccuucucccaggauggugaagggggaccugguacccagugauccccaccccaggauccuaaaucaugacuuaccugcuaauaaaaacucauuggaaaagugagaagaucuaaaaaaaaaaaaaaaaaaaaaaaaaaaaaaaaaaaaaaaaaaaaaaaaaaaaaaaaaaaaaaaaugcaucccccccccccccccccccccccccccccccaaaggcucuuuucagagccaccagaauu

SEQ ID NO: 1742 - RNA, 1983 nt, Artificial Sequence
  mRNA product Design c-3 comprising derived and/or modified sequence from HRSV(A2)__F_DSCav1_mut1 (opt1)
gggagaguccgcucagccagguugcagaagcggcuuagcguguguccuaaucuucucucugcguguagguaggccugugccgcaaacaagcuuaccauggagcugcucauccugaaggccaacgccaucaccaccauccugacggcggugaccuucugcuucgccagcggccagaacaucaccgaggaguucuaccaguccacgugcagcgccgucuccaagggguaccucggcgcccugcgcaccgggugguacaccagcgugaucaccaucgagcuguccaacaucaaggagaacaagugcaacggcaccgacgccaaggugaagcucaucaagcaggagcuggacaaguacaagaacgcggucacggagcugcagcuccugaugcagagcacccccgccaccggguccggcagcgccaucugcuccggcguggccgugugcaagguccugcaccucgagggggaggugaacaagaucaagagcgcgcugcuguccaccaacaaggccguggucagccucuccaacggcgugagcgugcugacguucaagguccuggaccucaagaacuacaucgacaagcagcugcugccgauccucaacaagcaguccugcagcauccccaacaucgagaccgugaucgaguuccagcagaagaacaaccggcugcuggagaucacccgcgaguucuccgugaacgccggggucaccacgcccgugagcaccuacaugcucaccaacuccgagcugcugagccucaucaacgacaugcccaucaccaacgaccagaagaagcugaugagcaacaacgugcagaucguccggcagcaguccuacagcaucaugugcaucaucaaggaggaggugcuggccuacgugguccagcucccgcuguacggcgugaucgacacgcccugcuggaagcugcacaccagcccccucugcaccaccaacacgaaggagggguccaacaucugccugacccgcaccgaccggggcugguacugcgacaacgccggcuccgugagcuucuucccccaggcggagaccugcaagguccaguccaaccgcguguucugcgacacgaugaacagccugacccucccguccgaggucaaccugugcaacguggacaucuucaaccccaaguacgacugcaagaucaugaccagcaagaccgacguguccagcuccgucaucacgagccugggggccaucguguccugcuacggcaagaccaagugcaccgccagcaacaagaaccgggggaucaucaagaccuucuccaacggcugcgacuacgugagcaacaagggcgucgacacgguguccguggggaacacccucuacugcgucaacaagcaggagggccagagccuguacgugaagggggagcccaucaucaacuucuacgacccccugguguucccgagcgacgaguucgacgccuccaucagccaggucaacgagaagaucaaccagucccucgccuucauccgcaagagcgacgagcugcugcacaacgugaacgcgggcaaguccaccaccaacaucaugaucaccacgaucaucaucgugaucaucgucauccuccugagccugaucgccguggggcuccugcuguacugcaaggcccgguccacccccgugacccugagcaaggaccagcucuccggcaucaacaacaucgccuucagcaacugaggacuaguacuggcugcaucucccuuuccucuguccuccauccuucucccaggauggugaagggggaccugguacccagugauccccaccccaggauccuaaaucaugacuuaccugcuaauaaaaacucauuggaaaagugagaagaucuaaaaaaaaaaaaaaaaaaaaaaaaaaaaaaaaaaaaaaaaaaaaaaaaaaaaaaaaaaaaaaaaugcaucccccccccccccccccccccccccccccccaaaggcucuuuucagagccaccagaauu

SEQ ID NO: 1743 - RNA, 1983 nt, Artificial Sequence
  mRNA product Design c-3 comprising derived and/or modified sequence from HRSV(A2)__F_DSCav1_mut1 (opt2)
gggagaguccgcucagccagguugcagaagcggcuuagcguguguccuaaucuucucucugcguguagguaggccugugccgcaaacaagcuuaccauggagcuccucauccucaaggccaacgccaucaccaccauccucaccgccgucaccuucugcuucgccuccggccagaacaucaccgaggaguucuaccaguccaccugcuccgccgucuccaagggcuaccucggcgcccuccgcaccggcugguacaccuccgucaucaccaucgagcucuccaacaucaaggagaacaagugcaacggcaccgacgccaaggucaagcucaucaagcaggagcucgacaaguacaagaacgccgucaccgagcuccagcuccucaugcaguccacccccgccaccggcuccggcuccgccaucugcuccggcgucgccgucugcaagguccuccaccucgagggcgaggucaacaagaucaaguccgcccuccucuccaccaacaaggccgucgucucccucuccaacggcgucuccguccucaccuucaagguccucgaccucaagaacuacaucgacaagcagcuccuccccauccucaacaagcaguccugcuccauccccaacaucgagaccgucaucgaguuccagcagaagaacaaccgccuccucgagaucacccgcgaguucuccgucaacgccggcgucaccacccccgucuccaccuacaugcucaccaacuccgagcuccucucccucaucaacgacaugcccaucaccaacgaccagaagaagcucauguccaacaacguccagaucguccgccagcaguccuacuccaucaugugcaucaucaaggaggagguccucgccuacgucguccagcucccccucuacggcgucaucgacacccccugcuggaagcuccacaccuccccccucugcaccaccaacaccaaggagggcuccaacaucugccucacccgcaccgaccgcggcugguacugcgacaacgccggcuccgucuccuucuucccccaggccgagaccugcaagguccaguccaaccgcgucuucugcgacaccaugaacucccucacccuccccuccgaggucaaccucugcaacgucgacaucuucaaccccaaguacgacugcaagaucaugaccuccaagaccgacgucuccuccuccgucaucaccucccucggcgccaucgucuccugcuacggcaagaccaagugcaccgccuccaacaagaaccgcggcaucaucaagaccuucuccaacggcugcgacuacgucuccaacaagggcgucgacaccgucuccgucggcaacacccucuacugcgucaacaagcaggagggccagucccucuacgucaagggcgagcccaucaucaacuucuacgacccccucgucuuccccuccgacgaguucgacgccuccaucucccaggucaacgagaagaucaaccagucccucgccuucauccgcaaguccgacgagcuccuccacaacgucaacgccggcaaguccaccaccaacaucaugaucaccaccaucaucaucgucaucaucgucauccuccucucccucaucgccgucggccuccuccucuacugcaaggcccgcuccacccccgucacccucuccaaggaccagcucuccggcaucaacaacaucgccuucuccaacugaggacuaguacuggcugcaucucccuuuccucuguccuccauccuucucccaggauggugaagggggaccugguacccagugauccccaccccaggauccuaaaucaugacuuaccugcuaauaaaaacucauuggaaaagugagaagaucuaaaaaaaaaaaaaaaaaaaaaaaaaaaaaaaaaaaaaaaaaaaaaaaaaaaaaaaaaaaaaaaaugcaucccccccccccccccccccccccccccccccaaaggcucuuuucagagccaccagaauu

SEQ ID NO: 1744 - RNA, 1983 nt, Artificial Sequence
  mRNA product Design c-3 comprising derived and/or modified sequence from HRSV(A2)__F_DSCav1_mut1 (opt3)
gggagaguccgcucagccagguugcagaagcggcuuagcguguguccuaaucuucucucugcguguagguaggccugugccgcaaacaagcuuaccauggagcugcucauccuuaaggccaacgcuauuaccacaauacugacugcagugacguucugcuuugccagcggccagaauaucaccgaagaguucuaccaauccacauguucugcggucucaaaaggguauuugggagcuuuaagaacugguugguacaccaguguuauuacaaucgaacugagcaacauuaaggagaauaaaugcaacggcaccgacgccaaggugaaacuaaucaagcaggaacucgauaaguauaaaaaugcaguaacugagcugcagcuucugaugcaguccacacccgccaccgggucuggaucggcuauauguucaggcguggcagucugcaagguguugcaccucgagggugaaguuaacaaaaucaagagcgcccugcugaguacgaauaaagcuguggucucccucucuaacggggugagcguauuaacuuuuaagguucuggaccuuaagaauuacauugauaaacaauugcugccuauccuaaacaagcaguccuguucaauuccaaauaucgagaccgugauagaguuccagcagaaaaacaauaggcuccuggaaauuacacgggaguuuagugucaacgccggagugacuaccccggugagcacauauaugcuuaccaauucugaacuguugucccucaucaacgacaugcccauuacgaacgaucaaaagaaacugaugucaaauaacguccagaucguucgccagcagagcuacaguaucaugugcauuauaaaggaggaaguguuagcguauguagugcaacugccucucuacggcgucaucgacacuccauguuggaaacuucauacaucuccccugugcaccacuaauacaaaggagggcuccaacauuuguuugacccgaacggaucgugggugguacugcgacaaugcaggaagcgugucguucuuuccucaggccgaaaccuguaagguucagucuaacagaguguucugcgauacaaugaacucccuaacucugccaucagaggucaaucucugcaauguggacaucuuuaaccccaaauaugauuguaagauaaugaccaguaaaacagacguaagcuccucuguuauuacuagccugggugcuaucgugucaugcuacggcaagaccaaauguacagccaguaauaagaacagggggaucauuaagaccuucuccaauggaugcgauuaugucagcaacaaaggcguggacacugucucuguggguaauacgcuuuacuguguuaacaagcaagaggggcagucacuguaugugaaaggagaaccuaucauuaacuuuuacgacccauugguauucccgagugaugaguuugacgcaagcauaucccaggucaaugaaaagaucaaccagucucucgcuuucauucggaaaucggaugagcuguuacacaaugugaacgccggcaagagcacaaccaauaucaugaucacuaccauuauaaucguuauuaucgugauucugcuaucccucaucgcggucggccugcuuuuguauugcaaggcccgcucaacacccgugacccugaguaaagaccaacucucugggauaaacaauaucgcauucagcaacugaggacuaguacuggcugcaucucccuuuccucuguccuccauccuucucccaggauggugaagggggaccugguacccagugauccccaccccaggauccuaaaucaugacuuaccugcuaauaaaaacucauuggaaaagugagaagaucuaaaaaaaaaaaaaaaaaaaaaaaaaaaaaaaaaaaaaaaaaaaaaaaaaaaaaaaaaaaaaaaaugcaucccccccccccccccccccccccccccccccaaaggcucuuuucagagccaccagaauu

SEQ ID NO: 1745 - RNA, 1983 nt, Artificial Sequence
  mRNA product Design c-3 comprising derived and/or modified sequence from HRSV(A2)__F_DSCav1_mut1 (opt4)
gggagaguccgcucagccagguugcagaagcggcuuagcguguguccuaaucuucucucugcguguagguaggccugugccgcaaacaagcuuaccauggagcugcugauccugaaggccaacgccaucaccaccauccugaccgccgugaccuucugcuucgccagcggccagaacaucaccgaggaguucuaccagagcaccugcagcgccgugagcaagggcuaccugggcgcccugagaaccggcugguacaccagcgugaucaccaucgagcugagcaacaucaaggagaacaagugcaacggcaccgacgccaaggugaagcugaucaagcaggagcuggacaaguacaagaacgccgugaccgagcugcagcugcugaugcagagcacccccgccaccggcagcggcagcgccaucugcagcggcguggccgugugcaaggugcugcaccuggagggcgaggugaacaagaucaagagcgcccugcugagcaccaacaaggccguggugagccugagcaacggcgugagcgugcugaccuucaaggugcuggaccugaagaacuacaucgacaagcagcugcugcccauccugaacaagcagagcugcagcauccccaacaucgagaccgugaucgaguuccagcagaagaacaacagacugcuggagaucaccagagaguucagcgugaacgccggcgugaccacccccgugagcaccuacaugcugaccaacagcgagcugcugagccugaucaacgacaugcccaucaccaacgaccagaagaagcugaugagcaacaacgugcagaucgugagacagcagagcuacagcaucaugugcaucaucaaggaggaggugcuggccuacguggugcagcugccccuguacggcgugaucgacacccccugcuggaagcugcacaccagcccccugugcaccaccaacaccaaggagggcagcaacaucugccugaccagaaccgacagaggcugguacugcgacaacgccggcagcgugagcuucuucccccaggccgagaccugcaaggugcagagcaacagaguguucugcgacaccaugaacagccugacccugcccagcgaggugaaccugugcaacguggacaucuucaaccccaaguacgacugcaagaucaugaccagcaagaccgacgugagcagcagcgugaucaccagccugggcgccaucgugagcugcuacggcaagaccaagugcaccgccagcaacaagaacagaggcaucaucaagaccuucagcaacggcugcgacuacgugagcaacaagggcguggacaccgugagcgugggcaacacccuguacugcgugaacaagcaggagggccagagccuguacgugaagggcgagcccaucaucaacuucuacgacccccugguguuccccagcgacgaguucgacgccagcaucagccaggugaacgagaagaucaaccagagccuggccuucaucagaaagagcgacgagcugcugcacaacgugaacgccggcaagagcaccaccaacaucaugaucaccaccaucaucaucgugaucaucgugauccugcugagccugaucgccgugggccugcugcuguacugcaaggccagaagcacccccgugacccugagcaaggaccagcugagcggcaucaacaacaucgccuucagcaacugaggacuaguacuggcugcaucucccuuuccucuguccuccauccuucucccaggauggugaagggggaccugguacccagugauccccaccccaggauccuaaaucaugacuuaccugcuaauaaaaacucauuggaaaagugagaagaucuaaaaaaaaaaaaaaaaaaaaaaaaaaaaaaaaaaaaaaaaaaaaaaaaaaaaaaaaaaaaaaaaugcaucccccccccccccccccccccccccccccccaaaggcucuuuucagagccaccagaauu

SEQ ID NO: 1746 - RNA, 1983 nt, Artificial Sequence
  mRNA product Design c-3 comprising derived and/or modified sequence from HRSV(A2)__F_DSCav1_mut1 (opt5)
gggagaguccgcucagccagguugcagaagcggcuuagcguguguccuaaucuucucucugcguguagguaggccugugccgcaaacaagcuuaccauggagcugcucauccugaaggccaacgcuauuaccacaauccuuacggccgugaccuucugcuuugcgagcggccagaauauuacagaagaguucuaccaauccaccuguucugcugucagcaaaggguaucugggagcccucagaacaggcugguacaccuccguuaucacaauugaacugucuaacaucaaggagaauaaaugcaacgggaccgacgccaaggugaaacuuaucaagcaggaacuggauaaguauaaaaaugcugugacggagcuccagcugcugaugcagagcacccccgccacaggauccggcucugcuauuuguagcggggucgccgugugcaagguucuccaccuggagggagaagugaacaaaaucaaguccgcgcuucugagcaccaauaaagccgucgugucucucuccaacggcguuagcgugcugacauuuaagguccuugaccugaagaauuacauugauaaacaacuccugccuauccugaacaagcagucuuguuccauuccgaauaucgagaccgugauugaguuccagcagaaaaacaaucggcuccuggaaaucacgcgcgaguuuagcgugaacgcuggcgucacaacccccguuucuacauauaugcuuaccaauuccgaacugcucagccugaucaacgacaugccuauuaccaacgaucaaaagaaacuuauguccaauaacgugcagaucgugagacagcagucuuacagcauuaugugcaucauuaaggaggaaguccuggccuaugugguucaacucccccuguacggggugaucgacacaccuuguuggaaacugcauacgagcccccucugcaccacaaauaccaaggagggauccaacaucugucugacacggaccgaucgcggcugguacugcgacaaugcugggucugucuccuucuuuccucaggccgaaacguguaaggugcagagcaacagaguuuucugcgauacaaugaacucucuuacccugccgagcgaggugaaucucugcaaugucgacauuuuuaaccccaaauaugauuguaagaucaugaccuccaaaacagacgugucuagcuccgucauuaccagccugggagcgaucgugucuugcuacggcaagacaaaauguacggccuccaauaagaaccgggggauuaucaagaccuucagcaauggaugcgauuauguuucuaacaaaggcguggacacagucuccgugggcaauacccuuuacuguguuaacaagcaagaggggcagagccuguaugugaaaggagaaccuaucauuaacuuuuacgacccccucgucuucccuuccgaugaguuugacgcuucuaucagccaggugaaugaaaagauuaaccagucccuggccuucauccgcaaaucugaugagcugcuccacaaugugaacgcuggcaagagcacaaccaauauuaugaucacgaccauuaucaucguuauuaucgucauucugcuuucccugaucgccguggggcuccugcuguauugcaaggccagaagcacacccgugacccuuucuaaagaccaacucuccggaauuaacaauaucgcuuucagcaacugaggacuaguacuggcugcaucucccuuuccucuguccuccauccuucucccaggauggugaagggggaccugguacccagugauccccaccccaggauccuaaaucaugacuuaccugcuaauaaaaacucauuggaaaagugagaagaucuaaaaaaaaaaaaaaaaaaaaaaaaaaaaaaaaaaaaaaaaaaaaaaaaaaaaaaaaaaaaaaaaugcaucccccccccccccccccccccccccccccccaaaggcucuuuucagagccaccagaauu

SEQ ID NO: 1747 - RNA, 1983 nt, Artificial Sequence
  mRNA product Design c-3 comprising derived and/or modified sequence from HRSV(A2)__F_DSCav1_mut1 (opt6)
gggagaguccgcucagccagguugcagaagcggcuuagcguguguccuaaucuucucucugcguguagguaggccugugccgcaaacaagcuuaccauggaacuauuaauacuaaaagcaaacgcuauaacaacaauacuaacagcagucacauucugcuuugcaucaggccaaaacaucacagaagaauuuuaccaaucaacaugcuccgccguaucgaaaggauaccuaggcgcauuaagaaccggaugguauacaucagucauaacaauugaacuaucuaacauaaaagaaaacaaauguaacggcacagaugccaaaguaaaacucaucaaacaagaauuagauaaauacaaaaacgcagucacugaacuacaacucuuaaugcaaucaacaccugcaacaggaucaggaucagcaauaugcucaggaguagccguauguaaaguacuacaccuagaaggagaagucaacaaaauaaaaucagcccuccuaaguacaaacaaagcugucguaucacuauccaaugguguuucaguacuaacuuucaaaguucuagaccuaaaaaacuacauagacaaacaacuacuaccaauacuaaauaaacaaaguuguucuauacccaacauagaaaccgucauagaauuucaacaaaaaaauaauagacuccuagaaauaacaagagaauuuucaguuaacgcagguguaacaaccccaguauccaccuauaugcuaacaaauucagaauuacuuucccuaaucaacgacaugcccauaacaaaugaccaaaaaaaauuaaugucaaacaacguccaaauaguucgucaacaaucauauucaauaaugugcauaauaaaagaagaagucuuagccuacguaguacaacuuccccuuuauggaguuaucgacacacccugcuggaaacuccacacuucaccacuauguacuacaaacacaaaagaaggauccaacaucugccucacaagaaccgaucgaggaugguacugugauaacgccggauccgucucauucuucccacaagcagaaacaugcaaaguacaaucaaacagaguauuuugcgacacaaugaacucccucacauuaccuucugaaguaaaccuauguaauguagacauauucaaccccaaauacgauugcaaaauaaugacaucaaagacagauguaucaucaagugucaucacaucccuaggagcaauugucucauguuaugguaaaacaaaaugcaccgcaucaaauaaaaacagaggcauaauaaaaaccuucucaaacgguugugacuacguauccaauaaaggcgucgacacaguaucaguagguaacacauuauauuguguaaacaaacaagaaggacagucccuauauguaaaaggagaaccaauaaucaacuucuacgacccacuuguuuucccuucugaugaauuugacgcaaguauaucacaaguaaaugaaaaaaucaaucaaucacuagccuuuauaagaaaaucagaugaauuauuacacaacguaaacgccggaaaaucaacaaccaacauaaugauaaccacaauaauaaucgucauaauagucauccuacuaucacucauagcaguuggacuccuacuauacugcaaagcacgaucaacaccaguaacauuauccaaagaccaacuaagugguaucaauaacaucgccuuuucaaacugaggacuaguacuggcugcaucucccuuuccucuguccuccauccuucucccaggauggugaagggggaccugguacccagugauccccaccccaggauccuaaaucaugacuuaccugcuaauaaaaacucauuggaaaagugagaagaucuaaaaaaaaaaaaaaaaaaaaaaaaaaaaaaaaaaaaaaaaaaaaaaaaaaaaaaaaaaaaaaaaugcaucccccccccccccccccccccccccccccccaaaggcucuuuucagagccaccagaauu

SEQ ID NO: 1748 - RNA, 1983 nt, Artificial Sequence
  mRNA product Design c-3 comprising derived and/or modified sequence from HRSV(A2)__F_DSCav1_mut1 (opt11)
gggagaguccgcucagccagguugcagaagcggcuuagcguguguccuaaucuucucucugcguguagguaggccugugccgcaaacaagcuuaccauggaacuccuaauccucaaagccaacgcaaucaccacaauccucacugccgucaccuucugcuucgccuccggccaaaacauaacagaagaauuuuaccaaucaaccuguucagcggucuccaaaggcuaccucggcgcccuccgcaccggcugguacaccuccgugaucaccauagaacucuccaacaucaaggaaaacaaaugcaacggcaccgacgcgaaggucaaacuuauuaaacaagaacucgacaaauacaaaaacgcagucaccgaacuacaacuccuaaugcaguccacgccagccaccggcucuggcucagccauaugcuccgguguggccguaugcaaaguccuacaccucgaaggagaagucaacaaaauaaaauccgcccuacuguccacaaacaaggccguagucucccucucaaacggcgucucaguacucaccuucaaaguccuagaccucaagaacuacaucgacaaacaacuccuacccauacuaaacaaacaauccugcucaauccccaacaucgaaaccguaauagaauuucaacaaaaaaacaacagacuccuggagaucacccgggaauuuuccguaaacgccggagucacaacacccgucucaaccuacaugcuaacgaacucagagcuccucucacuuaucaacgacaugcccauaacaaacgaccaaaaaaaacucauguccaacaacgugcaaaucguccgacaacaauccuacuccaucaugugcaucauuaaagaagaaguccucgcauacguaguccagcucccccucuacggcgucauagacacccccugcuggaaacuacacacaucaccccucugcacaacaaacaccaaagaaggcuccaacaucugccucacccgcaccgaccgaggcugguacugcgauaacgccggcagcgucuccuucuucccccaagcagaaaccugcaagguccaauccaaccgaguuuucugcgacacuaugaacucgcucacccuccccuccgaagucaaccucugcaacgucgacauuuucaaccccaaauacgacugcaaaaucaugaccuccaagaccgacguauccuccuccgucaucaccucccuaggcgccauaguaaguugcuacggcaaaaccaagugcacagcaagcaacaaaaaccgaggaauaaucaaaaccuucuccaacggcugcgacuacguauccaacaagggcgucgacaccguauccguagggaacacccuuuacugcguaaacaaacaagaaggacaaucacucuacguaaaaggcgaacccauaaucaacuucuacgacccccucguauuucccuccgacgaauuugacgcaucaaucucacaggucaacgaaaaaauaaaccaaucgcuagcauucaucagaaaaucagacgaacuccuacacaacgucaacgcaggcaagagcaccaccaacaucaugaucaccaccaucaucaucgucauaaucgucauacuacucucacucauagcagucggccuccuccuauacuguaaagcaaggucgaccccagucacccuauccaaagaccaacuaagcggcaucaacaacaucgcguucucaaacuaaggacuaguacuggcugcaucucccuuuccucuguccuccauccuucucccaggauggugaagggggaccugguacccagugauccccaccccaggauccuaaaucaugacuuaccugcuaauaaaaacucauuggaaaagugagaagaucuaaaaaaaaaaaaaaaaaaaaaaaaaaaaaaaaaaaaaaaaaaaaaaaaaaaaaaaaaaaaaaaaugcaucccccccccccccccccccccccccccccccaaaggcucuuuucagagccaccagaauu

SEQ ID NO: 1749 - RNA, 1979 nt, Artificial Sequence
  mRNA product Design c-4 comprising derived and/or modified sequence from HRSV(A2)__F_DSCav1_mut1 (opt1)
gggagaguccgcucagccagguugcagaagcggcuuagcguguguccuaaucuucucucugcguguagguaggccugugccgcaaacaagcuuaccauggagcugcucauccugaaggccaacgccaucaccaccauccugacggcggugaccuucugcuucgccagcggccagaacaucaccgaggaguucuaccaguccacgugcagcgccgucuccaagggguaccucggcgcccugcggaccggcugguacaccuccgugaucaccaucgagcugagcaacaucaaggagaacaagugcaacgggaccgacgccaaggugaagcucaucaagcaggagcuggacaaguacaagaacgcggucacggagcugcagcuccugaugcaguccaccccggcaaccggcuccggcuccgccaucugcagcggcgucgccgugugcaaggugcugcaccucgagggggaggucaacaagaucaagagcgcccugcuguccaccaacaaggccguggugagccucuccaacggcgucagcgugcugaccuucaaggugcuggaccucaagaacuacaucgacaagcagcugcugcccauccugaacaagcagagcugcuccauccccaacaucgagacggugaucgaguuccagcagaagaacaaccggcuccuggagaucacccgcgaguucagcgugaacgccggggucaccacccccguguccacguacaugcugaccaacagcgagcuccugucccugaucaacgacaugccgaucaccaacgaccagaagaagcucaugagcaacaacgugcagaucguccggcagcaguccuacagcaucaugugcaucaucaaggaggaggugcuggcguacgugguccagcugccccucuacggcgugaucgacacccccugcuggaagcugcacacgagcccccugugcaccaccaacaccaaggagggguccaacaucugccucacgcgcaccgaccggggcugguacugcgacaacgccggcagcgucuccuucuucccgcaggccgagaccugcaaggugcagagcaaccgcguguucugcgacaccaugaacucccugacgcugcccagcgagguaaaccucugcaacgucgacaucuucaaccccaaguacgacugcaagaucaugaccuccaagaccgacgugagcuccagcgugaucaccucccugggggccaucgucagcugcuacggcaagacgaagugcaccgccagcaacaagaaccgggggaucaucaagaccuucuccaacggcugcgacuacgugagcaacaagggcguggacaccguguccgucgggaacacccuguacugcgugaacaagcaggagggccagagccucuacgugaagggggagcccaucaucaacuucuacgacccgcuggucuuccccuccgacgaguucgacgcgagcaucucccaggugaacgagaagaucaaccagagccuggccuucauccgcaaguccgacgagcugcuccacaacgugaacgccggcaagagcacgaccaacaucaugaucaccaccaucaucaucgucaucaucgugauccugcugucccucaucgccguggggcugcugcucuacugcaaggcccggagcacgcccgucacccuguccaaggaccagcugagcggcaucaacaacaucgcguucuccaacugaggacuaguggaagcauuuuccuggcugauuaaaagaaauuacucagcuauggucaucuguuccuguuagaaggcuaugcagcauauuauauacuaugcgcauguuaugaaaugcauaauaaaaaauuuuaaaaaaucuaaaagaucuaaaaaaaaaaaaaaaaaaaaaaaaaaaaaaaaaaaaaaaaaaaaaaaaaaaaaaaaaaaaaaaaugcaucccccccccccccccccccccccccccccccaaaggcucuuuucagagccaccagaauu

SEQ ID NO: 1750 - RNA, 1979 nt, Artificial Sequence
  mRNA product Design c-4 comprising derived and/or modified sequence from HRSV(A2)__F_DSCav1_mut1 (opt1)
gggagaguccgcucagccagguugcagaagcggcuuagcguguguccuaaucuucucucugcguguagguaggccugugccgcaaacaagcuuaccauggagcugcucauccugaaggccaacgccaucaccaccauccugacggcggugaccuucugcuucgccagcggccagaacaucaccgaggaguucuaccaguccacgugcagcgccgucuccaagggguaccucggcgcccugcgcaccgggugguacaccagcgugaucaccaucgagcuguccaacaucaaggagaacaagugcaacggcaccgacgccaaggugaagcucaucaagcaggagcuggacaaguacaagaacgcggucacggagcugcagcuccugaugcagagcacccccgccaccggguccggcagcgccaucugcuccggcguggccgugugcaagguccugcaccucgagggggaggugaacaagaucaagagcgcgcugcuguccaccaacaaggccguggucagccucuccaacggcgugagcgugcugacguucaagguccuggaccucaagaacuacaucgacaagcagcugcugccgauccucaacaagcaguccugcagcauccccaacaucgagaccgugaucgaguuccagcagaagaacaaccggcugcuggagaucacccgcgaguucuccgugaacgccggggucaccacgcccgugagcaccuacaugcucaccaacuccgagcugcugagccucaucaacgacaugcccaucaccaacgaccagaagaagcugaugagcaacaacgugcagaucguccggcagcaguccuacagcaucaugugcaucaucaaggaggaggugcuggccuacgugguccagcucccgcuguacggcgugaucgacacgcccugcuggaagcugcacaccagcccccucugcaccaccaacacgaaggagggguccaacaucugccugacccgcaccgaccggggcugguacugcgacaacgccggcuccgugagcuucuucccccaggcggagaccugcaagguccaguccaaccgcguguucugcgacacgaugaacagccugacccucccguccgaggucaaccugugcaacguggacaucuucaaccccaaguacgacugcaagaucaugaccagcaagaccgacguguccagcuccgucaucacgagccugggggccaucguguccugcuacggcaagaccaagugcaccgccagcaacaagaaccgggggaucaucaagaccuucuccaacggcugcgacuacgugagcaacaagggcgucgacacgguguccguggggaacacccucuacugcgucaacaagcaggagggccagagccuguacgugaagggggagcccaucaucaacuucuacgacccccugguguucccgagcgacgaguucgacgccuccaucagccaggucaacgagaagaucaaccagucccucgccuucauccgcaagagcgacgagcugcugcacaacgugaacgcgggcaaguccaccaccaacaucaugaucaccacgaucaucaucgugaucaucgucauccuccugagccugaucgccguggggcuccugcuguacugcaaggcccgguccacccccgugacccugagcaaggaccagcucuccggcaucaacaacaucgccuucagcaacugaggacuaguggaagcauuuuccuggcugauuaaaagaaauuacucagcuauggucaucuguuccuguuagaaggcuaugcagcauauuauauacuaugcgcauguuaugaaaugcauaauaaaaaauuuuaaaaaaucuaaaagaucuaaaaaaaaaaaaaaaaaaaaaaaaaaaaaaaaaaaaaaaaaaaaaaaaaaaaaaaaaaaaaaaaugcaucccccccccccccccccccccccccccccccaaaggcucuuuucagagccaccagaauu

SEQ ID NO: 1751 - RNA, 1979 nt, Artificial Sequence
  mRNA product Design c-4 comprising derived and/or modified sequence from HRSV(A2)__F_DSCav1_mut1 (opt2)
gggagaguccgcucagccagguugcagaagcggcuuagcguguguccuaaucuucucucugcguguagguaggccugugccgcaaacaagcuuaccauggagcuccucauccucaaggccaacgccaucaccaccauccucaccgccgucaccuucugcuucgccuccggccagaacaucaccgaggaguucuaccaguccaccugcuccgccgucuccaagggcuaccucggcgcccuccgcaccggcugguacaccuccgucaucaccaucgagcucuccaacaucaaggagaacaagugcaacggcaccgacgccaaggucaagcucaucaagcaggagcucgacaaguacaagaacgccgucaccgagcuccagcuccucaugcaguccacccccgccaccggcuccggcuccgccaucugcuccggcgucgccgucugcaagguccuccaccucgagggcgaggucaacaagaucaaguccgcccuccucuccaccaacaaggccgucgucucccucuccaacggcgucuccguccucaccuucaagguccucgaccucaagaacuacaucgacaagcagcuccuccccauccucaacaagcaguccugcuccauccccaacaucgagaccgucaucgaguuccagcagaagaacaaccgccuccucgagaucacccgcgaguucuccgucaacgccggcgucaccacccccgucuccaccuacaugcucaccaacuccgagcuccucucccucaucaacgacaugcccaucaccaacgaccagaagaagcucauguccaacaacguccagaucguccgccagcaguccuacuccaucaugugcaucaucaaggaggagguccucgccuacgucguccagcucccccucuacggcgucaucgacacccccugcuggaagcuccacaccuccccccucugcaccaccaacaccaaggagggcuccaacaucugccucacccgcaccgaccgcggcugguacugcgacaacgccggcuccgucuccuucuucccccaggccgagaccugcaagguccaguccaaccgcgucuucugcgacaccaugaacucccucacccuccccuccgaggucaaccucugcaacgucgacaucuucaaccccaaguacgacugcaagaucaugaccuccaagaccgacgucuccuccuccgucaucaccucccucggcgccaucgucuccugcuacggcaagaccaagugcaccgccuccaacaagaaccgcggcaucaucaagaccuucuccaacggcugcgacuacgucuccaacaagggcgucgacaccgucuccgucggcaacacccucuacugcgucaacaagcaggagggccagucccucuacgucaagggcgagcccaucaucaacuucuacgacccccucgucuuccccuccgacgaguucgacgccuccaucucccaggucaacgagaagaucaaccagucccucgccuucauccgcaaguccgacgagcuccuccacaacgucaacgccggcaaguccaccaccaacaucaugaucaccaccaucaucaucgucaucaucgucauccuccucucccucaucgccgucggccuccuccucuacugcaaggcccgcuccacccccgucacccucuccaaggaccagcucuccggcaucaacaacaucgccuucuccaacugaggacuaguggaagcauuuuccuggcugauuaaaagaaauuacucagcuauggucaucuguuccuguuagaaggcuaugcagcauauuauauacuaugcgcauguuaugaaaugcauaauaaaaaauuuuaaaaaaucuaaaagaucuaaaaaaaaaaaaaaaaaaaaaaaaaaaaaaaaaaaaaaaaaaaaaaaaaaaaaaaaaaaaaaaaugcaucccccccccccccccccccccccccccccccaaaggcucuuuucagagccaccagaauu

SEQ ID NO: 1752 - RNA, 1979 nt, Artificial Sequence
  mRNA product Design c-4 comprising derived and/or modified sequence from HRSV(A2)__F_DSCav1_mut1 (opt3)
gggagaguccgcucagccagguugcagaagcggcuuagcguguguccuaaucuucucucugcguguagguaggccugugccgcaaacaagcuuaccauggagcugcucauccuuaaggccaacgcuauuaccacaauacugacugcagugacguucugcuuugccagcggccagaauaucaccgaagaguucuaccaauccacauguucugcggucucaaaaggguauuugggagcuuuaagaacugguugguacaccaguguuauuacaaucgaacugagcaacauuaaggagaauaaaugcaacggcaccgacgccaaggugaaacuaaucaagcaggaacucgauaaguauaaaaaugcaguaacugagcugcagcuucugaugcaguccacacccgccaccgggucuggaucggcuauauguucaggcguggcagucugcaagguguugcaccucgagggugaaguuaacaaaaucaagagcgcccugcugaguacgaauaaagcuguggucucccucucuaacggggugagcguauuaacuuuuaagguucuggaccuuaagaauuacauugauaaacaauugcugccuauccuaaacaagcaguccuguucaauuccaaauaucgagaccgugauagaguuccagcagaaaaacaauaggcuccuggaaauuacacgggaguuuagugucaacgccggagugacuaccccggugagcacauauaugcuuaccaauucugaacuguugucccucaucaacgacaugcccauuacgaacgaucaaaagaaacugaugucaaauaacguccagaucguucgccagcagagcuacaguaucaugugcauuauaaaggaggaaguguuagcguauguagugcaacugccucucuacggcgucaucgacacuccauguuggaaacuucauacaucuccccugugcaccacuaauacaaaggagggcuccaacauuuguuugacccgaacggaucgugggugguacugcgacaaugcaggaagcgugucguucuuuccucaggccgaaaccuguaagguucagucuaacagaguguucugcgauacaaugaacucccuaacucugccaucagaggucaaucucugcaauguggacaucuuuaaccccaaauaugauuguaagauaaugaccaguaaaacagacguaagcuccucuguuauuacuagccugggugcuaucgugucaugcuacggcaagaccaaauguacagccaguaauaagaacagggggaucauuaagaccuucuccaauggaugcgauuaugucagcaacaaaggcguggacacugucucuguggguaauacgcuuuacuguguuaacaagcaagaggggcagucacuguaugugaaaggagaaccuaucauuaacuuuuacgacccauugguauucccgagugaugaguuugacgcaagcauaucccaggucaaugaaaagaucaaccagucucucgcuuucauucggaaaucggaugagcuguuacacaaugugaacgccggcaagagcacaaccaauaucaugaucacuaccauuauaaucguuauuaucgugauucugcuaucccucaucgcggucggccugcuuuuguauugcaaggcccgcucaacacccgugacccugaguaaagaccaacucucugggauaaacaauaucgcauucagcaacugaggacuaguggaagcauuuuccuggcugauuaaaagaaauuacucagcuauggucaucuguuccuguuagaaggcuaugcagcauauuauauacuaugcgcauguuaugaaaugcauaauaaaaaauuuuaaaaaaucuaaaagaucuaaaaaaaaaaaaaaaaaaaaaaaaaaaaaaaaaaaaaaaaaaaaaaaaaaaaaaaaaaaaaaaaugcaucccccccccccccccccccccccccccccccaaaggcucuuuucagagccaccagaauu

SEQ ID NO: 1753 - RNA, 1979 nt, Artificial Sequence
  mRNA product Design c-4 comprising derived and/or modified sequence from HRSV(A2)__F_DSCav1_mut1 (opt4)
gggagaguccgcucagccagguugcagaagcggcuuagcguguguccuaaucuucucucugcguguagguaggccugugccgcaaacaagcuuaccauggagcugcugauccugaaggccaacgccaucaccaccauccugaccgccgugaccuucugcuucgccagcggccagaacaucaccgaggaguucuaccagagcaccugcagcgccgugagcaagggcuaccugggcgcccugagaaccggcugguacaccagcgugaucaccaucgagcugagcaacaucaaggagaacaagugcaacggcaccgacgccaaggugaagcugaucaagcaggagcuggacaaguacaagaacgccgugaccgagcugcagcugcugaugcagagcacccccgccaccggcagcggcagcgccaucugcagcggcguggccgugugcaaggugcugcaccuggagggcgaggugaacaagaucaagagcgcccugcugagcaccaacaaggccguggugagccugagcaacggcgugagcgugcugaccuucaaggugcuggaccugaagaacuacaucgacaagcagcugcugcccauccugaacaagcagagcugcagcauccccaacaucgagaccgugaucgaguuccagcagaagaacaacagacugcuggagaucaccagagaguucagcgugaacgccggcgugaccacccccgugagcaccuacaugcugaccaacagcgagcugcugagccugaucaacgacaugcccaucaccaacgaccagaagaagcugaugagcaacaacgugcagaucgugagacagcagagcuacagcaucaugugcaucaucaaggaggaggugcuggccuacguggugcagcugccccuguacggcgugaucgacacccccugcuggaagcugcacaccagcccccugugcaccaccaacaccaaggagggcagcaacaucugccugaccagaaccgacagaggcugguacugcgacaacgccggcagcgugagcuucuucccccaggccgagaccugcaaggugcagagcaacagaguguucugcgacaccaugaacagccugacccugcccagcgaggugaaccugugcaacguggacaucuucaaccccaaguacgacugcaagaucaugaccagcaagaccgacgugagcagcagcgugaucaccagccugggcgccaucgugagcugcuacggcaagaccaagugcaccgccagcaacaagaacagaggcaucaucaagaccuucagcaacggcugcgacuacgugagcaacaagggcguggacaccgugagcgugggcaacacccuguacugcgugaacaagcaggagggccagagccuguacgugaagggcgagcccaucaucaacuucuacgacccccugguguuccccagcgacgaguucgacgccagcaucagccaggugaacgagaagaucaaccagagccuggccuucaucagaaagagcgacgagcugcugcacaacgugaacgccggcaagagcaccaccaacaucaugaucaccaccaucaucaucgugaucaucgugauccugcugagccugaucgccgugggccugcugcuguacugcaaggccagaagcacccccgugacccugagcaaggaccagcugagcggcaucaacaacaucgccuucagcaacugaggacuaguggaagcauuuuccuggcugauuaaaagaaauuacucagcuauggucaucuguuccuguuagaaggcuaugcagcauauuauauacuaugcgcauguuaugaaaugcauaauaaaaaauuuuaaaaaaucuaaaagaucuaaaaaaaaaaaaaaaaaaaaaaaaaaaaaaaaaaaaaaaaaaaaaaaaaaaaaaaaaaaaaaaaugcaucccccccccccccccccccccccccccccccaaaggcucuuuucagagccaccagaauu

SEQ ID NO: 1754 - RNA, 1979 nt, Artificial Sequence
  mRNA product Design c-4 comprising derived and/or modified sequence from HRSV(A2)__F_DSCav1_mut1 (opt5)
gggagaguccgcucagccagguugcagaagcggcuuagcguguguccuaaucuucucucugcguguagguaggccugugccgcaaacaagcuuaccauggagcugcucauccugaaggccaacgcuauuaccacaauccuuacggccgugaccuucugcuuugcgagcggccagaauauuacagaagaguucuaccaauccaccuguucugcugucagcaaaggguaucugggagcccucagaacaggcugguacaccuccguuaucacaauugaacugucuaacaucaaggagaauaaaugcaacgggaccgacgccaaggugaaacuuaucaagcaggaacuggauaaguauaaaaaugcugugacggagcuccagcugcugaugcagagcacccccgccacaggauccggcucugcuauuuguagcggggucgccgugugcaagguucuccaccuggagggagaagugaacaaaaucaaguccgcgcuucugagcaccaauaaagccgucgugucucucuccaacggcguuagcgugcugacauuuaagguccuugaccugaagaauuacauugauaaacaacuccugccuauccugaacaagcagucuuguuccauuccgaauaucgagaccgugauugaguuccagcagaaaaacaaucggcuccuggaaaucacgcgcgaguuuagcgugaacgcuggcgucacaacccccguuucuacauauaugcuuaccaauuccgaacugcucagccugaucaacgacaugccuauuaccaacgaucaaaagaaacuuauguccaauaacgugcagaucgugagacagcagucuuacagcauuaugugcaucauuaaggaggaaguccuggccuaugugguucaacucccccuguacggggugaucgacacaccuuguuggaaacugcauacgagcccccucugcaccacaaauaccaaggagggauccaacaucugucugacacggaccgaucgcggcugguacugcgacaaugcugggucugucuccuucuuuccucaggccgaaacguguaaggugcagagcaacagaguuuucugcgauacaaugaacucucuuacccugccgagcgaggugaaucucugcaaugucgacauuuuuaaccccaaauaugauuguaagaucaugaccuccaaaacagacgugucuagcuccgucauuaccagccugggagcgaucgugucuugcuacggcaagacaaaauguacggccuccaauaagaaccgggggauuaucaagaccuucagcaauggaugcgauuauguuucuaacaaaggcguggacacagucuccgugggcaauacccuuuacuguguuaacaagcaagaggggcagagccuguaugugaaaggagaaccuaucauuaacuuuuacgacccccucgucuucccuuccgaugaguuugacgcuucuaucagccaggugaaugaaaagauuaaccagucccuggccuucauccgcaaaucugaugagcugcuccacaaugugaacgcuggcaagagcacaaccaauauuaugaucacgaccauuaucaucguuauuaucgucauucugcuuucccugaucgccguggggcuccugcuguauugcaaggccagaagcacacccgugacccuuucuaaagaccaacucuccggaauuaacaauaucgcuuucagcaacugaggacuaguggaagcauuuuccuggcugauuaaaagaaauuacucagcuauggucaucuguuccuguuagaaggcuaugcagcauauuauauacuaugcgcauguuaugaaaugcauaauaaaaaauuuuaaaaaaucuaaaagaucuaaaaaaaaaaaaaaaaaaaaaaaaaaaaaaaaaaaaaaaaaaaaaaaaaaaaaaaaaaaaaaaaugcaucccccccccccccccccccccccccccccccaaaggcucuuuucagagccaccagaauu

SEQ ID NO: 1755 - RNA, 1979 nt, Artificial Sequence
  mRNA product Design c-4 comprising derived and/or modified sequence from HRSV(A2)__F_DSCav1_mut1 (opt6)
gggagaguccgcucagccagguugcagaagcggcuuagcguguguccuaaucuucucucugcguguagguaggccugugccgcaaacaagcuuaccauggaacuauuaauacuaaaagcaaacgcuauaacaacaauacuaacagcagucacauucugcuuugcaucaggccaaaacaucacagaagaauuuuaccaaucaacaugcuccgccguaucgaaaggauaccuaggcgcauuaagaaccggaugguauacaucagucauaacaauugaacuaucuaacauaaaagaaaacaaauguaacggcacagaugccaaaguaaaacucaucaaacaagaauuagauaaauacaaaaacgcagucacugaacuacaacucuuaaugcaaucaacaccugcaacaggaucaggaucagcaauaugcucaggaguagccguauguaaaguacuacaccuagaaggagaagucaacaaaauaaaaucagcccuccuaaguacaaacaaagcugucguaucacuauccaaugguguuucaguacuaacuuucaaaguucuagaccuaaaaaacuacauagacaaacaacuacuaccaauacuaaauaaacaaaguuguucuauacccaacauagaaaccgucauagaauuucaacaaaaaaauaauagacuccuagaaauaacaagagaauuuucaguuaacgcagguguaacaaccccaguauccaccuauaugcuaacaaauucagaauuacuuucccuaaucaacgacaugcccauaacaaaugaccaaaaaaaauuaaugucaaacaacguccaaauaguucgucaacaaucauauucaauaaugugcauaauaaaagaagaagucuuagccuacguaguacaacuuccccuuuauggaguuaucgacacacccugcuggaaacuccacacuucaccacuauguacuacaaacacaaaagaaggauccaacaucugccucacaagaaccgaucgaggaugguacugugauaacgccggauccgucucauucuucccacaagcagaaacaugcaaaguacaaucaaacagaguauuuugcgacacaaugaacucccucacauuaccuucugaaguaaaccuauguaauguagacauauucaaccccaaauacgauugcaaaauaaugacaucaaagacagauguaucaucaagugucaucacaucccuaggagcaauugucucauguuaugguaaaacaaaaugcaccgcaucaaauaaaaacagaggcauaauaaaaaccuucucaaacgguugugacuacguauccaauaaaggcgucgacacaguaucaguagguaacacauuauauuguguaaacaaacaagaaggacagucccuauauguaaaaggagaaccaauaaucaacuucuacgacccacuuguuuucccuucugaugaauuugacgcaaguauaucacaaguaaaugaaaaaaucaaucaaucacuagccuuuauaagaaaaucagaugaauuauuacacaacguaaacgccggaaaaucaacaaccaacauaaugauaaccacaauaauaaucgucauaauagucauccuacuaucacucauagcaguuggacuccuacuauacugcaaagcacgaucaacaccaguaacauuauccaaagaccaacuaagugguaucaauaacaucgccuuuucaaacugaggacuaguggaagcauuuuccuggcugauuaaaagaaauuacucagcuauggucaucuguuccuguuagaaggcuaugcagcauauuauauacuaugcgcauguuaugaaaugcauaauaaaaaauuuuaaaaaaucuaaaagaucuaaaaaaaaaaaaaaaaaaaaaaaaaaaaaaaaaaaaaaaaaaaaaaaaaaaaaaaaaaaaaaaaugcaucccccccccccccccccccccccccccccccaaaggcucuuuucagagccaccagaauu

SEQ ID NO: 1756 - RNA, 1979 nt, Artificial Sequence
  mRNA product Design c-4 comprising derived and/or modified sequence from HRSV(A2)__F_DSCav1_mut1 (opt11)
gggagaguccgcucagccagguugcagaagcggcuuagcguguguccuaaucuucucucugcguguagguaggccugugccgcaaacaagcuuaccauggaacuccuaauccucaaagccaacgcaaucaccacaauccucacugccgucaccuucugcuucgccuccggccaaaacauaacagaagaauuuuaccaaucaaccuguucagcggucuccaaaggcuaccucggcgcccuccgcaccggcugguacaccuccgugaucaccauagaacucuccaacaucaaggaaaacaaaugcaacggcaccgacgcgaaggucaaacuuauuaaacaagaacucgacaaauacaaaaacgcagucaccgaacuacaacuccuaaugcaguccacgccagccaccggcucuggcucagccauaugcuccgguguggccguaugcaaaguccuacaccucgaaggagaagucaacaaaauaaaauccgcccuacuguccacaaacaaggccguagucucccucucaaacggcgucucaguacucaccuucaaaguccuagaccucaagaacuacaucgacaaacaacuccuacccauacuaaacaaacaauccugcucaauccccaacaucgaaaccguaauagaauuucaacaaaaaaacaacagacuccuggagaucacccgggaauuuuccguaaacgccggagucacaacacccgucucaaccuacaugcuaacgaacucagagcuccucucacuuaucaacgacaugcccauaacaaacgaccaaaaaaaacucauguccaacaacgugcaaaucguccgacaacaauccuacuccaucaugugcaucauuaaagaagaaguccucgcauacguaguccagcucccccucuacggcgucauagacacccccugcuggaaacuacacacaucaccccucugcacaacaaacaccaaagaaggcuccaacaucugccucacccgcaccgaccgaggcugguacugcgauaacgccggcagcgucuccuucuucccccaagcagaaaccugcaagguccaauccaaccgaguuuucugcgacacuaugaacucgcucacccuccccuccgaagucaaccucugcaacgucgacauuuucaaccccaaauacgacugcaaaaucaugaccuccaagaccgacguauccuccuccgucaucaccucccuaggcgccauaguaaguugcuacggcaaaaccaagugcacagcaagcaacaaaaaccgaggaauaaucaaaaccuucuccaacggcugcgacuacguauccaacaagggcgucgacaccguauccguagggaacacccuuuacugcguaaacaaacaagaaggacaaucacucuacguaaaaggcgaacccauaaucaacuucuacgacccccucguauuucccuccgacgaauuugacgcaucaaucucacaggucaacgaaaaaauaaaccaaucgcuagcauucaucagaaaaucagacgaacuccuacacaacgucaacgcaggcaagagcaccaccaacaucaugaucaccaccaucaucaucgucauaaucgucauacuacucucacucauagcagucggccuccuccuauacuguaaagcaaggucgaccccagucacccuauccaaagaccaacuaagcggcaucaacaacaucgcguucucaaacuaaggacuaguggaagcauuuuccuggcugauuaaaagaaauuacucagcuauggucaucuguuccuguuagaaggcuaugcagcauauuauauacuaugcgcauguuaugaaaugcauaauaaaaaauuuuaaaaaaucuaaaagaucuaaaaaaaaaaaaaaaaaaaaaaaaaaaaaaaaaaaaaaaaaaaaaaaaaaaaaaaaaaaaaaaaugcaucccccccccccccccccccccccccccccccaaaggcucuuuucagagccaccagaauu

SEQ ID NO: 1757 - RNA, 1897 nt, Artificial Sequence
  mRNA product Design c-5 comprising derived and/or modified sequence from HRSV(A2)__F_DSCav1_mut1 (opt1)
gggagagcggcucggccauuuugucccagucaguccggaggcugcggcugcagaaguaccgccugcggaguaacugcaaagaagcuuaccauggagcugcucauccugaaggccaacgccaucaccaccauccugacggcggugaccuucugcuucgccagcggccagaacaucaccgaggaguucuaccaguccacgugcagcgccgucuccaagggguaccucggcgcccugcggaccggcugguacaccuccgugaucaccaucgagcugagcaacaucaaggagaacaagugcaacgggaccgacgccaaggugaagcucaucaagcaggagcuggacaaguacaagaacgcggucacggagcugcagcuccugaugcaguccaccccggcaaccggcuccggcuccgccaucugcagcggcgucgccgugugcaaggugcugcaccucgagggggaggucaacaagaucaagagcgcccugcuguccaccaacaaggccguggugagccucuccaacggcgucagcgugcugaccuucaaggugcuggaccucaagaacuacaucgacaagcagcugcugcccauccugaacaagcagagcugcuccauccccaacaucgagacggugaucgaguuccagcagaagaacaaccggcuccuggagaucacccgcgaguucagcgugaacgccggggucaccacccccguguccacguacaugcugaccaacagcgagcuccugucccugaucaacgacaugccgaucaccaacgaccagaagaagcucaugagcaacaacgugcagaucguccggcagcaguccuacagcaucaugugcaucaucaaggaggaggugcuggcguacgugguccagcugccccucuacggcgugaucgacacccccugcuggaagcugcacacgagcccccugugcaccaccaacaccaaggagggguccaacaucugccucacgcgcaccgaccggggcugguacugcgacaacgccggcagcgucuccuucuucccgcaggccgagaccugcaaggugcagagcaaccgcguguucugcgacaccaugaacucccugacgcugcccagcgagguaaaccucugcaacgucgacaucuucaaccccaaguacgacugcaagaucaugaccuccaagaccgacgugagcuccagcgugaucaccucccugggggccaucgucagcugcuacggcaagacgaagugcaccgccagcaacaagaaccgggggaucaucaagaccuucuccaacggcugcgacuacgugagcaacaagggcguggacaccguguccgucgggaacacccuguacugcgugaacaagcaggagggccagagccucuacgugaagggggagcccaucaucaacuucuacgacccgcuggucuuccccuccgacgaguucgacgcgagcaucucccaggugaacgagaagaucaaccagagccuggccuucauccgcaaguccgacgagcugcuccacaacgugaacgccggcaagagcacgaccaacaucaugaucaccaccaucaucaucgucaucaucgugauccugcugucccucaucgccguggggcugcugcucuacugcaaggcccggagcacgcccgucacccuguccaaggaccagcugagcggcaucaacaacaucgcguucuccaacugaggacuagucccuguucccagagcccacuuuuuuuucuuuuuuugaaauaaaauagccugucuuucagaucuaaaaaaaaaaaaaaaaaaaaaaaaaaaaaaaaaaaaaaaaaaaaaaaaaaaaaaaaaaaaaaaaugcaucccccccccccccccccccccccccccccccaaaggcucuuuucagagccaccagaauu

SEQ ID NO: 1758 - RNA, 1897 nt, Artificial Sequence
  mRNA product Design c-5 comprising derived and/or modified sequence from HRSV(A2)__F_DSCav1_mut1 (opt1)
gggagagcggcucggccauuuugucccagucaguccggaggcugcggcugcagaaguaccgccugcggaguaacugcaaagaagcuuaccauggagcugcucauccugaaggccaacgccaucaccaccauccugacggcggugaccuucugcuucgccagcggccagaacaucaccgaggaguucuaccaguccacgugcagcgccgucuccaagggguaccucggcgcccugcgcaccgggugguacaccagcgugaucaccaucgagcuguccaacaucaaggagaacaagugcaacggcaccgacgccaaggugaagcucaucaagcaggagcuggacaaguacaagaacgcggucacggagcugcagcuccugaugcagagcacccccgccaccggguccggcagcgccaucugcuccggcguggccgugugcaagguccugcaccucgagggggaggugaacaagaucaagagcgcgcugcuguccaccaacaaggccguggucagccucuccaacggcgugagcgugcugacguucaagguccuggaccucaagaacuacaucgacaagcagcugcugccgauccucaacaagcaguccugcagcauccccaacaucgagaccgugaucgaguuccagcagaagaacaaccggcugcuggagaucacccgcgaguucuccgugaacgccggggucaccacgcccgugagcaccuacaugcucaccaacuccgagcugcugagccucaucaacgacaugcccaucaccaacgaccagaagaagcugaugagcaacaacgugcagaucguccggcagcaguccuacagcaucaugugcaucaucaaggaggaggugcuggccuacgugguccagcucccgcuguacggcgugaucgacacgcccugcuggaagcugcacaccagcccccucugcaccaccaacacgaaggagggguccaacaucugccugacccgcaccgaccggggcugguacugcgacaacgccggcuccgugagcuucuucccccaggcggagaccugcaagguccaguccaaccgcguguucugcgacacgaugaacagccugacccucccguccgaggucaaccugugcaacguggacaucuucaaccccaaguacgacugcaagaucaugaccagcaagaccgacguguccagcuccgucaucacgagccugggggccaucguguccugcuacggcaagaccaagugcaccgccagcaacaagaaccgggggaucaucaagaccuucuccaacggcugcgacuacgugagcaacaagggcgucgacacgguguccguggggaacacccucuacugcgucaacaagcaggagggccagagccuguacgugaagggggagcccaucaucaacuucuacgacccccugguguucccgagcgacgaguucgacgccuccaucagccaggucaacgagaagaucaaccagucccucgccuucauccgcaagagcgacgagcugcugcacaacgugaacgcgggcaaguccaccaccaacaucaugaucaccacgaucaucaucgugaucaucgucauccuccugagccugaucgccguggggcuccugcuguacugcaaggcccgguccacccccgugacccugagcaaggaccagcucuccggcaucaacaacaucgccuucagcaacugaggacuagucccuguucccagagcccacuuuuuuuucuuuuuuugaaauaaaauagccugucuuucagaucuaaaaaaaaaaaaaaaaaaaaaaaaaaaaaaaaaaaaaaaaaaaaaaaaaaaaaaaaaaaaaaaaugcaucccccccccccccccccccccccccccccccaaaggcucuuuucagagccaccagaauu

SEQ ID NO: 1759 - RNA, 1897 nt, Artificial Sequence
  mRNA product Design c-5 comprising derived and/or modified sequence from HRSV(A2)__F_DSCav1_mut1 (opt2)
gggagagcggcucggccauuuugucccagucaguccggaggcugcggcugcagaaguaccgccugcggaguaacugcaaagaagcuuaccauggagcuccucauccucaaggccaacgccaucaccaccauccucaccgccgucaccuucugcuucgccuccggccagaacaucaccgaggaguucuaccaguccaccugcuccgccgucuccaagggcuaccucggcgcccuccgcaccggcugguacaccuccgucaucaccaucgagcucuccaacaucaaggagaacaagugcaacggcaccgacgccaaggucaagcucaucaagcaggagcucgacaaguacaagaacgccgucaccgagcuccagcuccucaugcaguccacccccgccaccggcuccggcuccgccaucugcuccggcgucgccgucugcaagguccuccaccucgagggcgaggucaacaagaucaaguccgcccuccucuccaccaacaaggccgucgucucccucuccaacggcgucuccguccucaccuucaagguccucgaccucaagaacuacaucgacaagcagcuccuccccauccucaacaagcaguccugcuccauccccaacaucgagaccgucaucgaguuccagcagaagaacaaccgccuccucgagaucacccgcgaguucuccgucaacgccggcgucaccacccccgucuccaccuacaugcucaccaacuccgagcuccucucccucaucaacgacaugcccaucaccaacgaccagaagaagcucauguccaacaacguccagaucguccgccagcaguccuacuccaucaugugcaucaucaaggaggagguccucgccuacgucguccagcucccccucuacggcgucaucgacacccccugcuggaagcuccacaccuccccccucugcaccaccaacaccaaggagggcuccaacaucugccucacccgcaccgaccgcggcugguacugcgacaacgccggcuccgucuccuucuucccccaggccgagaccugcaagguccaguccaaccgcgucuucugcgacaccaugaacucccucacccuccccuccgaggucaaccucugcaacgucgacaucuucaaccccaaguacgacugcaagaucaugaccuccaagaccgacgucuccuccuccgucaucaccucccucggcgccaucgucuccugcuacggcaagaccaagugcaccgccuccaacaagaaccgcggcaucaucaagaccuucuccaacggcugcgacuacgucuccaacaagggcgucgacaccgucuccgucggcaacacccucuacugcgucaacaagcaggagggccagucccucuacgucaagggcgagcccaucaucaacuucuacgacccccucgucuuccccuccgacgaguucgacgccuccaucucccaggucaacgagaagaucaaccagucccucgccuucauccgcaaguccgacgagcuccuccacaacgucaacgccggcaaguccaccaccaacaucaugaucaccaccaucaucaucgucaucaucgucauccuccucucccucaucgccgucggccuccuccucuacugcaaggcccgcuccacccccgucacccucuccaaggaccagcucuccggcaucaacaacaucgccuucuccaacugaggacuagucccuguucccagagcccacuuuuuuuucuuuuuuugaaauaaaauagccugucuuucagaucuaaaaaaaaaaaaaaaaaaaaaaaaaaaaaaaaaaaaaaaaaaaaaaaaaaaaaaaaaaaaaaaaugcaucccccccccccccccccccccccccccccccaaaggcucuuuucagagccaccagaauu

SEQ ID NO: 1760 - RNA, 1897 nt, Artificial Sequence
  mRNA product Design c-5 comprising derived and/or modified sequence from HRSV(A2)__F_DSCav1_mut1 (opt3)
gggagagcggcucggccauuuugucccagucaguccggaggcugcggcugcagaaguaccgccugcggaguaacugcaaagaagcuuaccauggagcugcucauccuuaaggccaacgcuauuaccacaauacugacugcagugacguucugcuuugccagcggccagaauaucaccgaagaguucuaccaauccacauguucugcggucucaaaaggguauuugggagcuuuaagaacugguugguacaccaguguuauuacaaucgaacugagcaacauuaaggagaauaaaugcaacggcaccgacgccaaggugaaacuaaucaagcaggaacucgauaaguauaaaaaugcaguaacugagcugcagcuucugaugcaguccacacccgccaccgggucuggaucggcuauauguucaggcguggcagucugcaagguguugcaccucgagggugaaguuaacaaaaucaagagcgcccugcugaguacgaauaaagcuguggucucccucucuaacggggugagcguauuaacuuuuaagguucuggaccuuaagaauuacauugauaaacaauugcugccuauccuaaacaagcaguccuguucaauuccaaauaucgagaccgugauagaguuccagcagaaaaacaauaggcuccuggaaauuacacgggaguuuagugucaacgccggagugacuaccccggugagcacauauaugcuuaccaauucugaacuguugucccucaucaacgacaugcccauuacgaacgaucaaaagaaacugaugucaaauaacguccagaucguucgccagcagagcuacaguaucaugugcauuauaaaggaggaaguguuagcguauguagugcaacugccucucuacggcgucaucgacacuccauguuggaaacuucauacaucuccccugugcaccacuaauacaaaggagggcuccaacauuuguuugacccgaacggaucgugggugguacugcgacaaugcaggaagcgugucguucuuuccucaggccgaaaccuguaagguucagucuaacagaguguucugcgauacaaugaacucccuaacucugccaucagaggucaaucucugcaauguggacaucuuuaaccccaaauaugauuguaagauaaugaccaguaaaacagacguaagcuccucuguuauuacuagccugggugcuaucgugucaugcuacggcaagaccaaauguacagccaguaauaagaacagggggaucauuaagaccuucuccaauggaugcgauuaugucagcaacaaaggcguggacacugucucuguggguaauacgcuuuacuguguuaacaagcaagaggggcagucacuguaugugaaaggagaaccuaucauuaacuuuuacgacccauugguauucccgagugaugaguuugacgcaagcauaucccaggucaaugaaaagaucaaccagucucucgcuuucauucggaaaucggaugagcuguuacacaaugugaacgccggcaagagcacaaccaauaucaugaucacuaccauuauaaucguuauuaucgugauucugcuaucccucaucgcggucggccugcuuuuguauugcaaggcccgcucaacacccgugacccugaguaaagaccaacucucugggauaaacaauaucgcauucagcaacugaggacuagucccuguucccagagcccacuuuuuuuucuuuuuuugaaauaaaauagccugucuuucagaucuaaaaaaaaaaaaaaaaaaaaaaaaaaaaaaaaaaaaaaaaaaaaaaaaaaaaaaaaaaaaaaaaugcaucccccccccccccccccccccccccccccccaaaggcucuuuucagagccaccagaauu

SEQ ID NO: 1761 - RNA, 1897 nt, Artificial Sequence
  mRNA product Design c-5 comprising derived and/or modified sequence from HRSV(A2)__F_DSCav1_mut1 (opt4)
gggagagcggcucggccauuuugucccagucaguccggaggcugcggcugcagaaguaccgccugcggaguaacugcaaagaagcuuaccauggagcugcugauccugaaggccaacgccaucaccaccauccugaccgccgugaccuucugcuucgccagcggccagaacaucaccgaggaguucuaccagagcaccugcagcgccgugagcaagggcuaccugggcgcccugagaaccggcugguacaccagcgugaucaccaucgagcugagcaacaucaaggagaacaagugcaacggcaccgacgccaaggugaagcugaucaagcaggagcuggacaaguacaagaacgccgugaccgagcugcagcugcugaugcagagcacccccgccaccggcagcggcagcgccaucugcagcggcguggccgugugcaaggugcugcaccuggagggcgaggugaacaagaucaagagcgcccugcugagcaccaacaaggccguggugagccugagcaacggcgugagcgugcugaccuucaaggugcuggaccugaagaacuacaucgacaagcagcugcugcccauccugaacaagcagagcugcagcauccccaacaucgagaccgugaucgaguuccagcagaagaacaacagacugcuggagaucaccagagaguucagcgugaacgccggcgugaccacccccgugagcaccuacaugcugaccaacagcgagcugcugagccugaucaacgacaugcccaucaccaacgaccagaagaagcugaugagcaacaacgugcagaucgugagacagcagagcuacagcaucaugugcaucaucaaggaggaggugcuggccuacguggugcagcugccccuguacggcgugaucgacacccccugcuggaagcugcacaccagcccccugugcaccaccaacaccaaggagggcagcaacaucugccugaccagaaccgacagaggcugguacugcgacaacgccggcagcgugagcuucuucccccaggccgagaccugcaaggugcagagcaacagaguguucugcgacaccaugaacagccugacccugcccagcgaggugaaccugugcaacguggacaucuucaaccccaaguacgacugcaagaucaugaccagcaagaccgacgugagcagcagcgugaucaccagccugggcgccaucgugagcugcuacggcaagaccaagugcaccgccagcaacaagaacagaggcaucaucaagaccuucagcaacggcugcgacuacgugagcaacaagggcguggacaccgugagcgugggcaacacccuguacugcgugaacaagcaggagggccagagccuguacgugaagggcgagcccaucaucaacuucuacgacccccugguguuccccagcgacgaguucgacgccagcaucagccaggugaacgagaagaucaaccagagccuggccuucaucagaaagagcgacgagcugcugcacaacgugaacgccggcaagagcaccaccaacaucaugaucaccaccaucaucaucgugaucaucgugauccugcugagccugaucgccgugggccugcugcuguacugcaaggccagaagcacccccgugacccugagcaaggaccagcugagcggcaucaacaacaucgccuucagcaacugaggacuagucccuguucccagagcccacuuuuuuuucuuuuuuugaaauaaaauagccugucuuucagaucuaaaaaaaaaaaaaaaaaaaaaaaaaaaaaaaaaaaaaaaaaaaaaaaaaaaaaaaaaaaaaaaaugcaucccccccccccccccccccccccccccccccaaaggcucuuuucagagccaccagaauu

SEQ ID NO: 1762 - RNA, 1897 nt, Artificial Sequence
  mRNA product Design c-5 comprising derived and/or modified sequence from HRSV(A2)__F_DSCav1_mut1 (opt5)
gggagagcggcucggccauuuugucccagucaguccggaggcugcggcugcagaaguaccgccugcggaguaacugcaaagaagcuuaccauggagcugcucauccugaaggccaacgcuauuaccacaauccuuacggccgugaccuucugcuuugcgagcggccagaauauuacagaagaguucuaccaauccaccuguucugcugucagcaaaggguaucugggagcccucagaacaggcugguacaccuccguuaucacaauugaacugucuaacaucaaggagaauaaaugcaacgggaccgacgccaaggugaaacuuaucaagcaggaacuggauaaguauaaaaaugcugugacggagcuccagcugcugaugcagagcacccccgccacaggauccggcucugcuauuuguagcggggucgccgugugcaagguucuccaccuggagggagaagugaacaaaaucaaguccgcgcuucugagcaccaauaaagccgucgugucucucuccaacggcguuagcgugcugacauuuaagguccuugaccugaagaauuacauugauaaacaacuccugccuauccugaacaagcagucuuguuccauuccgaauaucgagaccgugauugaguuccagcagaaaaacaaucggcuccuggaaaucacgcgcgaguuuagcgugaacgcuggcgucacaacccccguuucuacauauaugcuuaccaauuccgaacugcucagccugaucaacgacaugccuauuaccaacgaucaaaagaaacuuauguccaauaacgugcagaucgugagacagcagucuuacagcauuaugugcaucauuaaggaggaaguccuggccuaugugguucaacucccccuguacggggugaucgacacaccuuguuggaaacugcauacgagcccccucugcaccacaaauaccaaggagggauccaacaucugucugacacggaccgaucgcggcugguacugcgacaaugcugggucugucuccuucuuuccucaggccgaaacguguaaggugcagagcaacagaguuuucugcgauacaaugaacucucuuacccugccgagcgaggugaaucucugcaaugucgacauuuuuaaccccaaauaugauuguaagaucaugaccuccaaaacagacgugucuagcuccgucauuaccagccugggagcgaucgugucuugcuacggcaagacaaaauguacggccuccaauaagaaccgggggauuaucaagaccuucagcaauggaugcgauuauguuucuaacaaaggcguggacacagucuccgugggcaauacccuuuacuguguuaacaagcaagaggggcagagccuguaugugaaaggagaaccuaucauuaacuuuuacgacccccucgucuucccuuccgaugaguuugacgcuucuaucagccaggugaaugaaaagauuaaccagucccuggccuucauccgcaaaucugaugagcugcuccacaaugugaacgcuggcaagagcacaaccaauauuaugaucacgaccauuaucaucguuauuaucgucauucugcuuucccugaucgccguggggcuccugcuguauugcaaggccagaagcacacccgugacccuuucuaaagaccaacucuccggaauuaacaauaucgcuuucagcaacugaggacuagucccuguucccagagcccacuuuuuuuucuuuuuuugaaauaaaauagccugucuuucagaucuaaaaaaaaaaaaaaaaaaaaaaaaaaaaaaaaaaaaaaaaaaaaaaaaaaaaaaaaaaaaaaaaugcaucccccccccccccccccccccccccccccccaaaggcucuuuucagagccaccagaauu

SEQ ID NO: 1763 - RNA, 1897 nt, Artificial Sequence
  mRNA product Design c-5 comprising derived and/or modified sequence from HRSV(A2)__F_DSCav1_mut1 (opt6)
gggagagcggcucggccauuuugucccagucaguccggaggcugcggcugcagaaguaccgccugcggaguaacugcaaagaagcuuaccauggaacuauuaauacuaaaagcaaacgcuauaacaacaauacuaacagcagucacauucugcuuugcaucaggccaaaacaucacagaagaauuuuaccaaucaacaugcuccgccguaucgaaaggauaccuaggcgcauuaagaaccggaugguauacaucagucauaacaauugaacuaucuaacauaaaagaaaacaaauguaacggcacagaugccaaaguaaaacucaucaaacaagaauuagauaaauacaaaaacgcagucacugaacuacaacucuuaaugcaaucaacaccugcaacaggaucaggaucagcaauaugcucaggaguagccguauguaaaguacuacaccuagaaggagaagucaacaaaauaaaaucagcccuccuaaguacaaacaaagcugucguaucacuauccaaugguguuucaguacuaacuuucaaaguucuagaccuaaaaaacuacauagacaaacaacuacuaccaauacuaaauaaacaaaguuguucuauacccaacauagaaaccgucauagaauuucaacaaaaaaauaauagacuccuagaaauaacaagagaauuuucaguuaacgcagguguaacaaccccaguauccaccuauaugcuaacaaauucagaauuacuuucccuaaucaacgacaugcccauaacaaaugaccaaaaaaaauuaaugucaaacaacguccaaauaguucgucaacaaucauauucaauaaugugcauaauaaaagaagaagucuuagccuacguaguacaacuuccccuuuauggaguuaucgacacacccugcuggaaacuccacacuucaccacuauguacuacaaacacaaaagaaggauccaacaucugccucacaagaaccgaucgaggaugguacugugauaacgccggauccgucucauucuucccacaagcagaaacaugcaaaguacaaucaaacagaguauuuugcgacacaaugaacucccucacauuaccuucugaaguaaaccuauguaauguagacauauucaaccccaaauacgauugcaaaauaaugacaucaaagacagauguaucaucaagugucaucacaucccuaggagcaauugucucauguuaugguaaaacaaaaugcaccgcaucaaauaaaaacagaggcauaauaaaaaccuucucaaacgguugugacuacguauccaauaaaggcgucgacacaguaucaguagguaacacauuauauuguguaaacaaacaagaaggacagucccuauauguaaaaggagaaccaauaaucaacuucuacgacccacuuguuuucccuucugaugaauuugacgcaaguauaucacaaguaaaugaaaaaaucaaucaaucacuagccuuuauaagaaaaucagaugaauuauuacacaacguaaacgccggaaaaucaacaaccaacauaaugauaaccacaauaauaaucgucauaauagucauccuacuaucacucauagcaguuggacuccuacuauacugcaaagcacgaucaacaccaguaacauuauccaaagaccaacuaagugguaucaauaacaucgccuuuucaaacugaggacuagucccuguucccagagcccacuuuuuuuucuuuuuuugaaauaaaauagccugucuuucagaucuaaaaaaaaaaaaaaaaaaaaaaaaaaaaaaaaaaaaaaaaaaaaaaaaaaaaaaaaaaaaaaaaugcaucccccccccccccccccccccccccccccccaaaggcucuuuucagagccaccagaauu

SEQ ID NO: 1764 - RNA, 1897 nt, Artificial Sequence
  mRNA product Design c-5 comprising derived and/or modified sequence from HRSV(A2)__F_DSCav1_mut1 (opt11)
gggagagcggcucggccauuuugucccagucaguccggaggcugcggcugcagaaguaccgccugcggaguaacugcaaagaagcuuaccauggaacuccuaauccucaaagccaacgcaaucaccacaauccucacugccgucaccuucugcuucgccuccggccaaaacauaacagaagaauuuuaccaaucaaccuguucagcggucuccaaaggcuaccucggcgcccuccgcaccggcugguacaccuccgugaucaccauagaacucuccaacaucaaggaaaacaaaugcaacggcaccgacgcgaaggucaaacuuauuaaacaagaacucgacaaauacaaaaacgcagucaccgaacuacaacuccuaaugcaguccacgccagccaccggcucuggcucagccauaugcuccgguguggccguaugcaaaguccuacaccucgaaggagaagucaacaaaauaaaauccgcccuacuguccacaaacaaggccguagucucccucucaaacggcgucucaguacucaccuucaaaguccuagaccucaagaacuacaucgacaaacaacuccuacccauacuaaacaaacaauccugcucaauccccaacaucgaaaccguaauagaauuucaacaaaaaaacaacagacuccuggagaucacccgggaauuuuccguaaacgccggagucacaacacccgucucaaccuacaugcuaacgaacucagagcuccucucacuuaucaacgacaugcccauaacaaacgaccaaaaaaaacucauguccaacaacgugcaaaucguccgacaacaauccuacuccaucaugugcaucauuaaagaagaaguccucgcauacguaguccagcucccccucuacggcgucauagacacccccugcuggaaacuacacacaucaccccucugcacaacaaacaccaaagaaggcuccaacaucugccucacccgcaccgaccgaggcugguacugcgauaacgccggcagcgucuccuucuucccccaagcagaaaccugcaagguccaauccaaccgaguuuucugcgacacuaugaacucgcucacccuccccuccgaagucaaccucugcaacgucgacauuuucaaccccaaauacgacugcaaaaucaugaccuccaagaccgacguauccuccuccgucaucaccucccuaggcgccauaguaaguugcuacggcaaaaccaagugcacagcaagcaacaaaaaccgaggaauaaucaaaaccuucuccaacggcugcgacuacguauccaacaagggcgucgacaccguauccguagggaacacccuuuacugcguaaacaaacaagaaggacaaucacucuacguaaaaggcgaacccauaaucaacuucuacgacccccucguauuucccuccgacgaauuugacgcaucaaucucacaggucaacgaaaaaauaaaccaaucgcuagcauucaucagaaaaucagacgaacuccuacacaacgucaacgcaggcaagagcaccaccaacaucaugaucaccaccaucaucaucgucauaaucgucauacuacucucacucauagcagucggccuccuccuauacuguaaagcaaggucgaccccagucacccuauccaaagaccaacuaagcggcaucaacaacaucgcguucucaaacuaaggacuagucccuguucccagagcccacuuuuuuuucuuuuuuugaaauaaaauagccugucuuucagaucuaaaaaaaaaaaaaaaaaaaaaaaaaaaaaaaaaaaaaaaaaaaaaaaaaaaaaaaaaaaaaaaaugcaucccccccccccccccccccccccccccccccaaaggcucuuuucagagccaccagaauu

SEQ ID NO: 1765 - RNA, 1906 nt, Artificial Sequence
  mRNA product Design d-1 comprising derived and/or modified sequence from HRSV(A2)__F_DSCav1_mut1 (opt1)
gggagacccgugacccggaaguuguacggcuacgcgacuuucccucccacaaacccucgcgcccuuccuuuccuacuugggcccggcagaaagcuuaccauggagcugcucauccugaaggccaacgccaucaccaccauccugacggcggugaccuucugcuucgccagcggccagaacaucaccgaggaguucuaccaguccacgugcagcgccgucuccaagggguaccucggcgcccugcggaccggcugguacaccuccgugaucaccaucgagcugagcaacaucaaggagaacaagugcaacgggaccgacgccaaggugaagcucaucaagcaggagcuggacaaguacaagaacgcggucacggagcugcagcuccugaugcaguccaccccggcaaccggcuccggcuccgccaucugcagcggcgucgccgugugcaaggugcugcaccucgagggggaggucaacaagaucaagagcgcccugcuguccaccaacaaggccguggugagccucuccaacggcgucagcgugcugaccuucaaggugcuggaccucaagaacuacaucgacaagcagcugcugcccauccugaacaagcagagcugcuccauccccaacaucgagacggugaucgaguuccagcagaagaacaaccggcuccuggagaucacccgcgaguucagcgugaacgccggggucaccacccccguguccacguacaugcugaccaacagcgagcuccugucccugaucaacgacaugccgaucaccaacgaccagaagaagcucaugagcaacaacgugcagaucguccggcagcaguccuacagcaucaugugcaucaucaaggaggaggugcuggcguacgugguccagcugccccucuacggcgugaucgacacccccugcuggaagcugcacacgagcccccugugcaccaccaacaccaaggagggguccaacaucugccucacgcgcaccgaccggggcugguacugcgacaacgccggcagcgucuccuucuucccgcaggccgagaccugcaaggugcagagcaaccgcguguucugcgacaccaugaacucccugacgcugcccagcgagguaaaccucugcaacgucgacaucuucaaccccaaguacgacugcaagaucaugaccuccaagaccgacgugagcuccagcgugaucaccucccugggggccaucgucagcugcuacggcaagacgaagugcaccgccagcaacaagaaccgggggaucaucaagaccuucuccaacggcugcgacuacgugagcaacaagggcguggacaccguguccgucgggaacacccuguacugcgugaacaagcaggagggccagagccucuacgugaagggggagcccaucaucaacuucuacgacccgcuggucuuccccuccgacgaguucgacgcgagcaucucccaggugaacgagaagaucaaccagagccuggccuucauccgcaaguccgacgagcugcuccacaacgugaacgccggcaagagcacgaccaacaucaugaucaccaccaucaucaucgucaucaucgugauccugcugucccucaucgccguggggcugcugcucuacugcaaggcccggagcacgcccgucacccuguccaaggaccagcugagcggcaucaacaacaucgcguucuccaacugaggacuagucccuguucccagagcccacuuuuuuuucuuuuuuugaaauaaaauagccugucuuucagaucuaaaaaaaaaaaaaaaaaaaaaaaaaaaaaaaaaaaaaaaaaaaaaaaaaaaaaaaaaaaaaaaaugcaucccccccccccccccccccccccccccccccaaaggcucuuuucagagccaccagaauu

SEQ ID NO: 1766 - RNA, 1906 nt, Artificial Sequence
  mRNA product Design d-1 comprising derived and/or modified sequence from HRSV(A2)__F_DSCav1_mut1 (opt1)
gggagacccgugacccggaaguuguacggcuacgcgacuuucccucccacaaacccucgcgcccuuccuuuccuacuugggcccggcagaaagcuuaccauggagcugcucauccugaaggccaacgccaucaccaccauccugacggcggugaccuucugcuucgccagcggccagaacaucaccgaggaguucuaccaguccacgugcagcgccgucuccaagggguaccucggcgcccugcgcaccgggugguacaccagcgugaucaccaucgagcuguccaacaucaaggagaacaagugcaacggcaccgacgccaaggugaagcucaucaagcaggagcuggacaaguacaagaacgcggucacggagcugcagcuccugaugcagagcacccccgccaccggguccggcagcgccaucugcuccggcguggccgugugcaagguccugcaccucgagggggaggugaacaagaucaagagcgcgcugcuguccaccaacaaggccguggucagccucuccaacggcgugagcgugcugacguucaagguccuggaccucaagaacuacaucgacaagcagcugcugccgauccucaacaagcaguccugcagcauccccaacaucgagaccgugaucgaguuccagcagaagaacaaccggcugcuggagaucacccgcgaguucuccgugaacgccggggucaccacgcccgugagcaccuacaugcucaccaacuccgagcugcugagccucaucaacgacaugcccaucaccaacgaccagaagaagcugaugagcaacaacgugcagaucguccggcagcaguccuacagcaucaugugcaucaucaaggaggaggugcuggccuacgugguccagcucccgcuguacggcgugaucgacacgcccugcuggaagcugcacaccagcccccucugcaccaccaacacgaaggagggguccaacaucugccugacccgcaccgaccggggcugguacugcgacaacgccggcuccgugagcuucuucccccaggcggagaccugcaagguccaguccaaccgcguguucugcgacacgaugaacagccugacccucccguccgaggucaaccugugcaacguggacaucuucaaccccaaguacgacugcaagaucaugaccagcaagaccgacguguccagcuccgucaucacgagccugggggccaucguguccugcuacggcaagaccaagugcaccgccagcaacaagaaccgggggaucaucaagaccuucuccaacggcugcgacuacgugagcaacaagggcgucgacacgguguccguggggaacacccucuacugcgucaacaagcaggagggccagagccuguacgugaagggggagcccaucaucaacuucuacgacccccugguguucccgagcgacgaguucgacgccuccaucagccaggucaacgagaagaucaaccagucccucgccuucauccgcaagagcgacgagcugcugcacaacgugaacgcgggcaaguccaccaccaacaucaugaucaccacgaucaucaucgugaucaucgucauccuccugagccugaucgccguggggcuccugcuguacugcaaggcccgguccacccccgugacccugagcaaggaccagcucuccggcaucaacaacaucgccuucagcaacugaggacuagucccuguucccagagcccacuuuuuuuucuuuuuuugaaauaaaauagccugucuuucagaucuaaaaaaaaaaaaaaaaaaaaaaaaaaaaaaaaaaaaaaaaaaaaaaaaaaaaaaaaaaaaaaaaugcaucccccccccccccccccccccccccccccccaaaggcucuuuucagagccaccagaauu

SEQ ID NO: 1767 - RNA, 1906 nt, Artificial Sequence
  mRNA product Design d-1 comprising derived and/or modified sequence from HRSV(A2)__F_DSCav1_mut1 (opt2)
gggagacccgugacccggaaguuguacggcuacgcgacuuucccucccacaaacccucgcgcccuuccuuuccuacuugggcccggcagaaagcuuaccauggagcuccucauccucaaggccaacgccaucaccaccauccucaccgccgucaccuucugcuucgccuccggccagaacaucaccgaggaguucuaccaguccaccugcuccgccgucuccaagggcuaccucggcgcccuccgcaccggcugguacaccuccgucaucaccaucgagcucuccaacaucaaggagaacaagugcaacggcaccgacgccaaggucaagcucaucaagcaggagcucgacaaguacaagaacgccgucaccgagcuccagcuccucaugcaguccacccccgccaccggcuccggcuccgccaucugcuccggcgucgccgucugcaagguccuccaccucgagggcgaggucaacaagaucaaguccgcccuccucuccaccaacaaggccgucgucucccucuccaacggcgucuccguccucaccuucaagguccucgaccucaagaacuacaucgacaagcagcuccuccccauccucaacaagcaguccugcuccauccccaacaucgagaccgucaucgaguuccagcagaagaacaaccgccuccucgagaucacccgcgaguucuccgucaacgccggcgucaccacccccgucuccaccuacaugcucaccaacuccgagcuccucucccucaucaacgacaugcccaucaccaacgaccagaagaagcucauguccaacaacguccagaucguccgccagcaguccuacuccaucaugugcaucaucaaggaggagguccucgccuacgucguccagcucccccucuacggcgucaucgacacccccugcuggaagcuccacaccuccccccucugcaccaccaacaccaaggagggcuccaacaucugccucacccgcaccgaccgcggcugguacugcgacaacgccggcuccgucuccuucuucccccaggccgagaccugcaagguccaguccaaccgcgucuucugcgacaccaugaacucccucacccuccccuccgaggucaaccucugcaacgucgacaucuucaaccccaaguacgacugcaagaucaugaccuccaagaccgacgucuccuccuccgucaucaccucccucggcgccaucgucuccugcuacggcaagaccaagugcaccgccuccaacaagaaccgcggcaucaucaagaccuucuccaacggcugcgacuacgucuccaacaagggcgucgacaccgucuccgucggcaacacccucuacugcgucaacaagcaggagggccagucccucuacgucaagggcgagcccaucaucaacuucuacgacccccucgucuuccccuccgacgaguucgacgccuccaucucccaggucaacgagaagaucaaccagucccucgccuucauccgcaaguccgacgagcuccuccacaacgucaacgccggcaaguccaccaccaacaucaugaucaccaccaucaucaucgucaucaucgucauccuccucucccucaucgccgucggccuccuccucuacugcaaggcccgcuccacccccgucacccucuccaaggaccagcucuccggcaucaacaacaucgccuucuccaacugaggacuagucccuguucccagagcccacuuuuuuuucuuuuuuugaaauaaaauagccugucuuucagaucuaaaaaaaaaaaaaaaaaaaaaaaaaaaaaaaaaaaaaaaaaaaaaaaaaaaaaaaaaaaaaaaaugcaucccccccccccccccccccccccccccccccaaaggcucuuuucagagccaccagaauu

SEQ ID NO: 1768 - RNA, 1906 nt, Artificial Sequence
  mRNA product Design d-1 comprising derived and/or modified sequence from HRSV(A2)__F_DSCav1_mut1 (opt3)
gggagacccgugacccggaaguuguacggcuacgcgacuuucccucccacaaacccucgcgcccuuccuuuccuacuugggcccggcagaaagcuuaccauggagcugcucauccuuaaggccaacgcuauuaccacaauacugacugcagugacguucugcuuugccagcggccagaauaucaccgaagaguucuaccaauccacauguucugcggucucaaaaggguauuugggagcuuuaagaacugguugguacaccaguguuauuacaaucgaacugagcaacauuaaggagaauaaaugcaacggcaccgacgccaaggugaaacuaaucaagcaggaacucgauaaguauaaaaaugcaguaacugagcugcagcuucugaugcaguccacacccgccaccgggucuggaucggcuauauguucaggcguggcagucugcaagguguugcaccucgagggugaaguuaacaaaaucaagagcgcccugcugaguacgaauaaagcuguggucucccucucuaacggggugagcguauuaacuuuuaagguucuggaccuuaagaauuacauugauaaacaauugcugccuauccuaaacaagcaguccuguucaauuccaaauaucgagaccgugauagaguuccagcagaaaaacaauaggcuccuggaaauuacacgggaguuuagugucaacgccggagugacuaccccggugagcacauauaugcuuaccaauucugaacuguugucccucaucaacgacaugcccauuacgaacgaucaaaagaaacugaugucaaauaacguccagaucguucgccagcagagcuacaguaucaugugcauuauaaaggaggaaguguuagcguauguagugcaacugccucucuacggcgucaucgacacuccauguuggaaacuucauacaucuccccugugcaccacuaauacaaaggagggcuccaacauuuguuugacccgaacggaucgugggugguacugcgacaaugcaggaagcgugucguucuuuccucaggccgaaaccuguaagguucagucuaacagaguguucugcgauacaaugaacucccuaacucugccaucagaggucaaucucugcaauguggacaucuuuaaccccaaauaugauuguaagauaaugaccaguaaaacagacguaagcuccucuguuauuacuagccugggugcuaucgugucaugcuacggcaagaccaaauguacagccaguaauaagaacagggggaucauuaagaccuucuccaauggaugcgauuaugucagcaacaaaggcguggacacugucucuguggguaauacgcuuuacuguguuaacaagcaagaggggcagucacuguaugugaaaggagaaccuaucauuaacuuuuacgacccauugguauucccgagugaugaguuugacgcaagcauaucccaggucaaugaaaagaucaaccagucucucgcuuucauucggaaaucggaugagcuguuacacaaugugaacgccggcaagagcacaaccaauaucaugaucacuaccauuauaaucguuauuaucgugauucugcuaucccucaucgcggucggccugcuuuuguauugcaaggcccgcucaacacccgugacccugaguaaagaccaacucucugggauaaacaauaucgcauucagcaacugaggacuagucccuguucccagagcccacuuuuuuuucuuuuuuugaaauaaaauagccugucuuucagaucuaaaaaaaaaaaaaaaaaaaaaaaaaaaaaaaaaaaaaaaaaaaaaaaaaaaaaaaaaaaaaaaaugcaucccccccccccccccccccccccccccccccaaaggcucuuuucagagccaccagaauu

SEQ ID NO: 1769 - RNA, 1906 nt, Artificial Sequence
  mRNA product Design d-1 comprising derived and/or modified sequence from HRSV(A2)__F_DSCav1_mut1 (opt4)
gggagacccgugacccggaaguuguacggcuacgcgacuuucccucccacaaacccucgcgcccuuccuuuccuacuugggcccggcagaaagcuuaccauggagcugcugauccugaaggccaacgccaucaccaccauccugaccgccgugaccuucugcuucgccagcggccagaacaucaccgaggaguucuaccagagcaccugcagcgccgugagcaagggcuaccugggcgcccugagaaccggcugguacaccagcgugaucaccaucgagcugagcaacaucaaggagaacaagugcaacggcaccgacgccaaggugaagcugaucaagcaggagcuggacaaguacaagaacgccgugaccgagcugcagcugcugaugcagagcacccccgccaccggcagcggcagcgccaucugcagcggcguggccgugugcaaggugcugcaccuggagggcgaggugaacaagaucaagagcgcccugcugagcaccaacaaggccguggugagccugagcaacggcgugagcgugcugaccuucaaggugcuggaccugaagaacuacaucgacaagcagcugcugcccauccugaacaagcagagcugcagcauccccaacaucgagaccgugaucgaguuccagcagaagaacaacagacugcuggagaucaccagagaguucagcgugaacgccggcgugaccacccccgugagcaccuacaugcugaccaacagcgagcugcugagccugaucaacgacaugcccaucaccaacgaccagaagaagcugaugagcaacaacgugcagaucgugagacagcagagcuacagcaucaugugcaucaucaaggaggaggugcuggccuacguggugcagcugccccuguacggcgugaucgacacccccugcuggaagcugcacaccagcccccugugcaccaccaacaccaaggagggcagcaacaucugccugaccagaaccgacagaggcugguacugcgacaacgccggcagcgugagcuucuucccccaggccgagaccugcaaggugcagagcaacagaguguucugcgacaccaugaacagccugacccugcccagcgaggugaaccugugcaacguggacaucuucaaccccaaguacgacugcaagaucaugaccagcaagaccgacgugagcagcagcgugaucaccagccugggcgccaucgugagcugcuacggcaagaccaagugcaccgccagcaacaagaacagaggcaucaucaagaccuucagcaacggcugcgacuacgugagcaacaagggcguggacaccgugagcgugggcaacacccuguacugcgugaacaagcaggagggccagagccuguacgugaagggcgagcccaucaucaacuucuacgacccccugguguuccccagcgacgaguucgacgccagcaucagccaggugaacgagaagaucaaccagagccuggccuucaucagaaagagcgacgagcugcugcacaacgugaacgccggcaagagcaccaccaacaucaugaucaccaccaucaucaucgugaucaucgugauccugcugagccugaucgccgugggccugcugcuguacugcaaggccagaagcacccccgugacccugagcaaggaccagcugagcggcaucaacaacaucgccuucagcaacugaggacuagucccuguucccagagcccacuuuuuuuucuuuuuuugaaauaaaauagccugucuuucagaucuaaaaaaaaaaaaaaaaaaaaaaaaaaaaaaaaaaaaaaaaaaaaaaaaaaaaaaaaaaaaaaaaugcaucccccccccccccccccccccccccccccccaaaggcucuuuucagagccaccagaauu

SEQ ID NO: 1770 - RNA, 1906 nt, Artificial Sequence
  mRNA product Design d-1 comprising derived and/or modified sequence from HRSV(A2)__F_DSCav1_mut1 (opt5)
gggagacccgugacccggaaguuguacggcuacgcgacuuucccucccacaaacccucgcgcccuuccuuuccuacuugggcccggcagaaagcuuaccauggagcugcucauccugaaggccaacgcuauuaccacaauccuuacggccgugaccuucugcuuugcgagcggccagaauauuacagaagaguucuaccaauccaccuguucugcugucagcaaaggguaucugggagcccucagaacaggcugguacaccuccguuaucacaauugaacugucuaacaucaaggagaauaaaugcaacgggaccgacgccaaggugaaacuuaucaagcaggaacuggauaaguauaaaaaugcugugacggagcuccagcugcugaugcagagcacccccgccacaggauccggcucugcuauuuguagcggggucgccgugugcaagguucuccaccuggagggagaagugaacaaaaucaaguccgcgcuucugagcaccaauaaagccgucgugucucucuccaacggcguuagcgugcugacauuuaagguccuugaccugaagaauuacauugauaaacaacuccugccuauccugaacaagcagucuuguuccauuccgaauaucgagaccgugauugaguuccagcagaaaaacaaucggcuccuggaaaucacgcgcgaguuuagcgugaacgcuggcgucacaacccccguuucuacauauaugcuuaccaauuccgaacugcucagccugaucaacgacaugccuauuaccaacgaucaaaagaaacuuauguccaauaacgugcagaucgugagacagcagucuuacagcauuaugugcaucauuaaggaggaaguccuggccuaugugguucaacucccccuguacggggugaucgacacaccuuguuggaaacugcauacgagcccccucugcaccacaaauaccaaggagggauccaacaucugucugacacggaccgaucgcggcugguacugcgacaaugcugggucugucuccuucuuuccucaggccgaaacguguaaggugcagagcaacagaguuuucugcgauacaaugaacucucuuacccugccgagcgaggugaaucucugcaaugucgacauuuuuaaccccaaauaugauuguaagaucaugaccuccaaaacagacgugucuagcuccgucauuaccagccugggagcgaucgugucuugcuacggcaagacaaaauguacggccuccaauaagaaccgggggauuaucaagaccuucagcaauggaugcgauuauguuucuaacaaaggcguggacacagucuccgugggcaauacccuuuacuguguuaacaagcaagaggggcagagccuguaugugaaaggagaaccuaucauuaacuuuuacgacccccucgucuucccuuccgaugaguuugacgcuucuaucagccaggugaaugaaaagauuaaccagucccuggccuucauccgcaaaucugaugagcugcuccacaaugugaacgcuggcaagagcacaaccaauauuaugaucacgaccauuaucaucguuauuaucgucauucugcuuucccugaucgccguggggcuccugcuguauugcaaggccagaagcacacccgugacccuuucuaaagaccaacucuccggaauuaacaauaucgcuuucagcaacugaggacuagucccuguucccagagcccacuuuuuuuucuuuuuuugaaauaaaauagccugucuuucagaucuaaaaaaaaaaaaaaaaaaaaaaaaaaaaaaaaaaaaaaaaaaaaaaaaaaaaaaaaaaaaaaaaugcaucccccccccccccccccccccccccccccccaaaggcucuuuucagagccaccagaauu

SEQ ID NO: 1771 - RNA, 1906 nt, Artificial Sequence
  mRNA product Design d-1 comprising derived and/or modified sequence from HRSV(A2)__F_DSCav1_mut1 (opt6)
gggagacccgugacccggaaguuguacggcuacgcgacuuucccucccacaaacccucgcgcccuuccuuuccuacuugggcccggcagaaagcuuaccauggaacuauuaauacuaaaagcaaacgcuauaacaacaauacuaacagcagucacauucugcuuugcaucaggccaaaacaucacagaagaauuuuaccaaucaacaugcuccgccguaucgaaaggauaccuaggcgcauuaagaaccggaugguauacaucagucauaacaauugaacuaucuaacauaaaagaaaacaaauguaacggcacagaugccaaaguaaaacucaucaaacaagaauuagauaaauacaaaaacgcagucacugaacuacaacucuuaaugcaaucaacaccugcaacaggaucaggaucagcaauaugcucaggaguagccguauguaaaguacuacaccuagaaggagaagucaacaaaauaaaaucagcccuccuaaguacaaacaaagcugucguaucacuauccaaugguguuucaguacuaacuuucaaaguucuagaccuaaaaaacuacauagacaaacaacuacuaccaauacuaaauaaacaaaguuguucuauacccaacauagaaaccgucauagaauuucaacaaaaaaauaauagacuccuagaaauaacaagagaauuuucaguuaacgcagguguaacaaccccaguauccaccuauaugcuaacaaauucagaauuacuuucccuaaucaacgacaugcccauaacaaaugaccaaaaaaaauuaaugucaaacaacguccaaauaguucgucaacaaucauauucaauaaugugcauaauaaaagaagaagucuuagccuacguaguacaacuuccccuuuauggaguuaucgacacacccugcuggaaacuccacacuucaccacuauguacuacaaacacaaaagaaggauccaacaucugccucacaagaaccgaucgaggaugguacugugauaacgccggauccgucucauucuucccacaagcagaaacaugcaaaguacaaucaaacagaguauuuugcgacacaaugaacucccucacauuaccuucugaaguaaaccuauguaauguagacauauucaaccccaaauacgauugcaaaauaaugacaucaaagacagauguaucaucaagugucaucacaucccuaggagcaauugucucauguuaugguaaaacaaaaugcaccgcaucaaauaaaaacagaggcauaauaaaaaccuucucaaacgguugugacuacguauccaauaaaggcgucgacacaguaucaguagguaacacauuauauuguguaaacaaacaagaaggacagucccuauauguaaaaggagaaccaauaaucaacuucuacgacccacuuguuuucccuucugaugaauuugacgcaaguauaucacaaguaaaugaaaaaaucaaucaaucacuagccuuuauaagaaaaucagaugaauuauuacacaacguaaacgccggaaaaucaacaaccaacauaaugauaaccacaauaauaaucgucauaauagucauccuacuaucacucauagcaguuggacuccuacuauacugcaaagcacgaucaacaccaguaacauuauccaaagaccaacuaagugguaucaauaacaucgccuuuucaaacugaggacuagucccuguucccagagcccacuuuuuuuucuuuuuuugaaauaaaauagccugucuuucagaucuaaaaaaaaaaaaaaaaaaaaaaaaaaaaaaaaaaaaaaaaaaaaaaaaaaaaaaaaaaaaaaaaugcaucccccccccccccccccccccccccccccccaaaggcucuuuucagagccaccagaauu

SEQ ID NO: 1772 - RNA, 1906 nt, Artificial Sequence
  mRNA product Design d-1 comprising derived and/or modified sequence from HRSV(A2)__F_DSCav1_mut1 (opt11)
gggagacccgugacccggaaguuguacggcuacgcgacuuucccucccacaaacccucgcgcccuuccuuuccuacuugggcccggcagaaagcuuaccauggaacuccuaauccucaaagccaacgcaaucaccacaauccucacugccgucaccuucugcuucgccuccggccaaaacauaacagaagaauuuuaccaaucaaccuguucagcggucuccaaaggcuaccucggcgcccuccgcaccggcugguacaccuccgugaucaccauagaacucuccaacaucaaggaaaacaaaugcaacggcaccgacgcgaaggucaaacuuauuaaacaagaacucgacaaauacaaaaacgcagucaccgaacuacaacuccuaaugcaguccacgccagccaccggcucuggcucagccauaugcuccgguguggccguaugcaaaguccuacaccucgaaggagaagucaacaaaauaaaauccgcccuacuguccacaaacaaggccguagucucccucucaaacggcgucucaguacucaccuucaaaguccuagaccucaagaacuacaucgacaaacaacuccuacccauacuaaacaaacaauccugcucaauccccaacaucgaaaccguaauagaauuucaacaaaaaaacaacagacuccuggagaucacccgggaauuuuccguaaacgccggagucacaacacccgucucaaccuacaugcuaacgaacucagagcuccucucacuuaucaacgacaugcccauaacaaacgaccaaaaaaaacucauguccaacaacgugcaaaucguccgacaacaauccuacuccaucaugugcaucauuaaagaagaaguccucgcauacguaguccagcucccccucuacggcgucauagacacccccugcuggaaacuacacacaucaccccucugcacaacaaacaccaaagaaggcuccaacaucugccucacccgcaccgaccgaggcugguacugcgauaacgccggcagcgucuccuucuucccccaagcagaaaccugcaagguccaauccaaccgaguuuucugcgacacuaugaacucgcucacccuccccuccgaagucaaccucugcaacgucgacauuuucaaccccaaauacgacugcaaaaucaugaccuccaagaccgacguauccuccuccgucaucaccucccuaggcgccauaguaaguugcuacggcaaaaccaagugcacagcaagcaacaaaaaccgaggaauaaucaaaaccuucuccaacggcugcgacuacguauccaacaagggcgucgacaccguauccguagggaacacccuuuacugcguaaacaaacaagaaggacaaucacucuacguaaaaggcgaacccauaaucaacuucuacgacccccucguauuucccuccgacgaauuugacgcaucaaucucacaggucaacgaaaaaauaaaccaaucgcuagcauucaucagaaaaucagacgaacuccuacacaacgucaacgcaggcaagagcaccaccaacaucaugaucaccaccaucaucaucgucauaaucgucauacuacucucacucauagcagucggccuccuccuauacuguaaagcaaggucgaccccagucacccuauccaaagaccaacuaagcggcaucaacaacaucgcguucucaaacuaaggacuagucccuguucccagagcccacuuuuuuuucuuuuuuugaaauaaaauagccugucuuucagaucuaaaaaaaaaaaaaaaaaaaaaaaaaaaaaaaaaaaaaaaaaaaaaaaaaaaaaaaaaaaaaaaaugcaucccccccccccccccccccccccccccccccaaaggcucuuuucagagccaccagaauu

SEQ ID NO: 1773 - RNA, 1961 nt, Artificial Sequence
  mRNA product Design d-2 comprising derived and/or modified sequence from HRSV(A2)__F_DSCav1_mut1 (opt1)
gggagagcggcucggccauuuugucccagucaguccggaggcugcggcugcagaaguaccgccugcggaguaacugcaaagaagcuuaccauggagcugcucauccugaaggccaacgccaucaccaccauccugacggcggugaccuucugcuucgccagcggccagaacaucaccgaggaguucuaccaguccacgugcagcgccgucuccaagggguaccucggcgcccugcggaccggcugguacaccuccgugaucaccaucgagcugagcaacaucaaggagaacaagugcaacgggaccgacgccaaggugaagcucaucaagcaggagcuggacaaguacaagaacgcggucacggagcugcagcuccugaugcaguccaccccggcaaccggcuccggcuccgccaucugcagcggcgucgccgugugcaaggugcugcaccucgagggggaggucaacaagaucaagagcgcccugcuguccaccaacaaggccguggugagccucuccaacggcgucagcgugcugaccuucaaggugcuggaccucaagaacuacaucgacaagcagcugcugcccauccugaacaagcagagcugcuccauccccaacaucgagacggugaucgaguuccagcagaagaacaaccggcuccuggagaucacccgcgaguucagcgugaacgccggggucaccacccccguguccacguacaugcugaccaacagcgagcuccugucccugaucaacgacaugccgaucaccaacgaccagaagaagcucaugagcaacaacgugcagaucguccggcagcaguccuacagcaucaugugcaucaucaaggaggaggugcuggcguacgugguccagcugccccucuacggcgugaucgacacccccugcuggaagcugcacacgagcccccugugcaccaccaacaccaaggagggguccaacaucugccucacgcgcaccgaccggggcugguacugcgacaacgccggcagcgucuccuucuucccgcaggccgagaccugcaaggugcagagcaaccgcguguucugcgacaccaugaacucccugacgcugcccagcgagguaaaccucugcaacgucgacaucuucaaccccaaguacgacugcaagaucaugaccuccaagaccgacgugagcuccagcgugaucaccucccugggggccaucgucagcugcuacggcaagacgaagugcaccgccagcaacaagaaccgggggaucaucaagaccuucuccaacggcugcgacuacgugagcaacaagggcguggacaccguguccgucgggaacacccuguacugcgugaacaagcaggagggccagagccucuacgugaagggggagcccaucaucaacuucuacgacccgcuggucuuccccuccgacgaguucgacgcgagcaucucccaggugaacgagaagaucaaccagagccuggccuucauccgcaaguccgacgagcugcuccacaacgugaacgccggcaagagcacgaccaacaucaugaucaccaccaucaucaucgucaucaucgugauccugcugucccucaucgccguggggcugcugcucuacugcaaggcccggagcacgcccgucacccuguccaaggaccagcugagcggcaucaacaacaucgcguucuccaacugaggacuaguaauaaggaaacuguaugaaugucugugggcaggaagugaagagauccuucuguaaagguuuuuggaauuaugucugcugaauaauaaacuuuuuugaaauaauaaaucugguagaaaaaugagaucuaaaaaaaaaaaaaaaaaaaaaaaaaaaaaaaaaaaaaaaaaaaaaaaaaaaaaaaaaaaaaaaaugcaucccccccccccccccccccccccccccccccaaaggcucuuuucagagccaccagaauu

SEQ ID NO: 1774 - RNA, 1961 nt, Artificial Sequence
  mRNA product Design d-2 comprising derived and/or modified sequence from HRSV(A2)__F_DSCav1_mut1 (opt1)
gggagagcggcucggccauuuugucccagucaguccggaggcugcggcugcagaaguaccgccugcggaguaacugcaaagaagcuuaccauggagcugcucauccugaaggccaacgccaucaccaccauccugacggcggugaccuucugcuucgccagcggccagaacaucaccgaggaguucuaccaguccacgugcagcgccgucuccaagggguaccucggcgcccugcgcaccgggugguacaccagcgugaucaccaucgagcuguccaacaucaaggagaacaagugcaacggcaccgacgccaaggugaagcucaucaagcaggagcuggacaaguacaagaacgcggucacggagcugcagcuccugaugcagagcacccccgccaccggguccggcagcgccaucugcuccggcguggccgugugcaagguccugcaccucgagggggaggugaacaagaucaagagcgcgcugcuguccaccaacaaggccguggucagccucuccaacggcgugagcgugcugacguucaagguccuggaccucaagaacuacaucgacaagcagcugcugccgauccucaacaagcaguccugcagcauccccaacaucgagaccgugaucgaguuccagcagaagaacaaccggcugcuggagaucacccgcgaguucuccgugaacgccggggucaccacgcccgugagcaccuacaugcucaccaacuccgagcugcugagccucaucaacgacaugcccaucaccaacgaccagaagaagcugaugagcaacaacgugcagaucguccggcagcaguccuacagcaucaugugcaucaucaaggaggaggugcuggccuacgugguccagcucccgcuguacggcgugaucgacacgcccugcuggaagcugcacaccagcccccucugcaccaccaacacgaaggagggguccaacaucugccugacccgcaccgaccggggcugguacugcgacaacgccggcuccgugagcuucuucccccaggcggagaccugcaagguccaguccaaccgcguguucugcgacacgaugaacagccugacccucccguccgaggucaaccugugcaacguggacaucuucaaccccaaguacgacugcaagaucaugaccagcaagaccgacguguccagcuccgucaucacgagccugggggccaucguguccugcuacggcaagaccaagugcaccgccagcaacaagaaccgggggaucaucaagaccuucuccaacggcugcgacuacgugagcaacaagggcgucgacacgguguccguggggaacacccucuacugcgucaacaagcaggagggccagagccuguacgugaagggggagcccaucaucaacuucuacgacccccugguguucccgagcgacgaguucgacgccuccaucagccaggucaacgagaagaucaaccagucccucgccuucauccgcaagagcgacgagcugcugcacaacgugaacgcgggcaaguccaccaccaacaucaugaucaccacgaucaucaucgugaucaucgucauccuccugagccugaucgccguggggcuccugcuguacugcaaggcccgguccacccccgugacccugagcaaggaccagcucuccggcaucaacaacaucgccuucagcaacugaggacuaguaauaaggaaacuguaugaaugucugugggcaggaagugaagagauccuucuguaaagguuuuuggaauuaugucugcugaauaauaaacuuuuuugaaauaauaaaucugguagaaaaaugagaucuaaaaaaaaaaaaaaaaaaaaaaaaaaaaaaaaaaaaaaaaaaaaaaaaaaaaaaaaaaaaaaaaugcaucccccccccccccccccccccccccccccccaaaggcucuuuucagagccaccagaauu

SEQ ID NO: 1775 - RNA, 1961 nt, Artificial Sequence
  mRNA product Design d-2 comprising derived and/or modified sequence from HRSV(A2)__F_DSCav1_mut1 (opt2)
gggagagcggcucggccauuuugucccagucaguccggaggcugcggcugcagaaguaccgccugcggaguaacugcaaagaagcuuaccauggagcuccucauccucaaggccaacgccaucaccaccauccucaccgccgucaccuucugcuucgccuccggccagaacaucaccgaggaguucuaccaguccaccugcuccgccgucuccaagggcuaccucggcgcccuccgcaccggcugguacaccuccgucaucaccaucgagcucuccaacaucaaggagaacaagugcaacggcaccgacgccaaggucaagcucaucaagcaggagcucgacaaguacaagaacgccgucaccgagcuccagcuccucaugcaguccacccccgccaccggcuccggcuccgccaucugcuccggcgucgccgucugcaagguccuccaccucgagggcgaggucaacaagaucaaguccgcccuccucuccaccaacaaggccgucgucucccucuccaacggcgucuccguccucaccuucaagguccucgaccucaagaacuacaucgacaagcagcuccuccccauccucaacaagcaguccugcuccauccccaacaucgagaccgucaucgaguuccagcagaagaacaaccgccuccucgagaucacccgcgaguucuccgucaacgccggcgucaccacccccgucuccaccuacaugcucaccaacuccgagcuccucucccucaucaacgacaugcccaucaccaacgaccagaagaagcucauguccaacaacguccagaucguccgccagcaguccuacuccaucaugugcaucaucaaggaggagguccucgccuacgucguccagcucccccucuacggcgucaucgacacccccugcuggaagcuccacaccuccccccucugcaccaccaacaccaaggagggcuccaacaucugccucacccgcaccgaccgcggcugguacugcgacaacgccggcuccgucuccuucuucccccaggccgagaccugcaagguccaguccaaccgcgucuucugcgacaccaugaacucccucacccuccccuccgaggucaaccucugcaacgucgacaucuucaaccccaaguacgacugcaagaucaugaccuccaagaccgacgucuccuccuccgucaucaccucccucggcgccaucgucuccugcuacggcaagaccaagugcaccgccuccaacaagaaccgcggcaucaucaagaccuucuccaacggcugcgacuacgucuccaacaagggcgucgacaccgucuccgucggcaacacccucuacugcgucaacaagcaggagggccagucccucuacgucaagggcgagcccaucaucaacuucuacgacccccucgucuuccccuccgacgaguucgacgccuccaucucccaggucaacgagaagaucaaccagucccucgccuucauccgcaaguccgacgagcuccuccacaacgucaacgccggcaaguccaccaccaacaucaugaucaccaccaucaucaucgucaucaucgucauccuccucucccucaucgccgucggccuccuccucuacugcaaggcccgcuccacccccgucacccucuccaaggaccagcucuccggcaucaacaacaucgccuucuccaacugaggacuaguaauaaggaaacuguaugaaugucugugggcaggaagugaagagauccuucuguaaagguuuuuggaauuaugucugcugaauaauaaacuuuuuugaaauaauaaaucugguagaaaaaugagaucuaaaaaaaaaaaaaaaaaaaaaaaaaaaaaaaaaaaaaaaaaaaaaaaaaaaaaaaaaaaaaaaaugcaucccccccccccccccccccccccccccccccaaaggcucuuuucagagccaccagaauu

SEQ ID NO: 1776 - RNA, 1961 nt, Artificial Sequence
  mRNA product Design d-2 comprising derived and/or modified sequence from HRSV(A2)__F_DSCav1_mut1 (opt3)
gggagagcggcucggccauuuugucccagucaguccggaggcugcggcugcagaaguaccgccugcggaguaacugcaaagaagcuuaccauggagcugcucauccuuaaggccaacgcuauuaccacaauacugacugcagugacguucugcuuugccagcggccagaauaucaccgaagaguucuaccaauccacauguucugcggucucaaaaggguauuugggagcuuuaagaacugguugguacaccaguguuauuacaaucgaacugagcaacauuaaggagaauaaaugcaacggcaccgacgccaaggugaaacuaaucaagcaggaacucgauaaguauaaaaaugcaguaacugagcugcagcuucugaugcaguccacacccgccaccgggucuggaucggcuauauguucaggcguggcagucugcaagguguugcaccucgagggugaaguuaacaaaaucaagagcgcccugcugaguacgaauaaagcuguggucucccucucuaacggggugagcguauuaacuuuuaagguucuggaccuuaagaauuacauugauaaacaauugcugccuauccuaaacaagcaguccuguucaauuccaaauaucgagaccgugauagaguuccagcagaaaaacaauaggcuccuggaaauuacacgggaguuuagugucaacgccggagugacuaccccggugagcacauauaugcuuaccaauucugaacuguugucccucaucaacgacaugcccauuacgaacgaucaaaagaaacugaugucaaauaacguccagaucguucgccagcagagcuacaguaucaugugcauuauaaaggaggaaguguuagcguauguagugcaacugccucucuacggcgucaucgacacuccauguuggaaacuucauacaucuccccugugcaccacuaauacaaaggagggcuccaacauuuguuugacccgaacggaucgugggugguacugcgacaaugcaggaagcgugucguucuuuccucaggccgaaaccuguaagguucagucuaacagaguguucugcgauacaaugaacucccuaacucugccaucagaggucaaucucugcaauguggacaucuuuaaccccaaauaugauuguaagauaaugaccaguaaaacagacguaagcuccucuguuauuacuagccugggugcuaucgugucaugcuacggcaagaccaaauguacagccaguaauaagaacagggggaucauuaagaccuucuccaauggaugcgauuaugucagcaacaaaggcguggacacugucucuguggguaauacgcuuuacuguguuaacaagcaagaggggcagucacuguaugugaaaggagaaccuaucauuaacuuuuacgacccauugguauucccgagugaugaguuugacgcaagcauaucccaggucaaugaaaagaucaaccagucucucgcuuucauucggaaaucggaugagcuguuacacaaugugaacgccggcaagagcacaaccaauaucaugaucacuaccauuauaaucguuauuaucgugauucugcuaucccucaucgcggucggccugcuuuuguauugcaaggcccgcucaacacccgugacccugaguaaagaccaacucucugggauaaacaauaucgcauucagcaacugaggacuaguaauaaggaaacuguaugaaugucugugggcaggaagugaagagauccuucuguaaagguuuuuggaauuaugucugcugaauaauaaacuuuuuugaaauaauaaaucugguagaaaaaugagaucuaaaaaaaaaaaaaaaaaaaaaaaaaaaaaaaaaaaaaaaaaaaaaaaaaaaaaaaaaaaaaaaaugcaucccccccccccccccccccccccccccccccaaaggcucuuuucagagccaccagaauu

SEQ ID NO: 1777 - RNA, 1961 nt, Artificial Sequence
  mRNA product Design d-2 comprising derived and/or modified sequence from HRSV(A2)__F_DSCav1_mut1 (opt4)
gggagagcggcucggccauuuugucccagucaguccggaggcugcggcugcagaaguaccgccugcggaguaacugcaaagaagcuuaccauggagcugcugauccugaaggccaacgccaucaccaccauccugaccgccgugaccuucugcuucgccagcggccagaacaucaccgaggaguucuaccagagcaccugcagcgccgugagcaagggcuaccugggcgcccugagaaccggcugguacaccagcgugaucaccaucgagcugagcaacaucaaggagaacaagugcaacggcaccgacgccaaggugaagcugaucaagcaggagcuggacaaguacaagaacgccgugaccgagcugcagcugcugaugcagagcacccccgccaccggcagcggcagcgccaucugcagcggcguggccgugugcaaggugcugcaccuggagggcgaggugaacaagaucaagagcgcccugcugagcaccaacaaggccguggugagccugagcaacggcgugagcgugcugaccuucaaggugcuggaccugaagaacuacaucgacaagcagcugcugcccauccugaacaagcagagcugcagcauccccaacaucgagaccgugaucgaguuccagcagaagaacaacagacugcuggagaucaccagagaguucagcgugaacgccggcgugaccacccccgugagcaccuacaugcugaccaacagcgagcugcugagccugaucaacgacaugcccaucaccaacgaccagaagaagcugaugagcaacaacgugcagaucgugagacagcagagcuacagcaucaugugcaucaucaaggaggaggugcuggccuacguggugcagcugccccuguacggcgugaucgacacccccugcuggaagcugcacaccagcccccugugcaccaccaacaccaaggagggcagcaacaucugccugaccagaaccgacagaggcugguacugcgacaacgccggcagcgugagcuucuucccccaggccgagaccugcaaggugcagagcaacagaguguucugcgacaccaugaacagccugacccugcccagcgaggugaaccugugcaacguggacaucuucaaccccaaguacgacugcaagaucaugaccagcaagaccgacgugagcagcagcgugaucaccagccugggcgccaucgugagcugcuacggcaagaccaagugcaccgccagcaacaagaacagaggcaucaucaagaccuucagcaacggcugcgacuacgugagcaacaagggcguggacaccgugagcgugggcaacacccuguacugcgugaacaagcaggagggccagagccuguacgugaagggcgagcccaucaucaacuucuacgacccccugguguuccccagcgacgaguucgacgccagcaucagccaggugaacgagaagaucaaccagagccuggccuucaucagaaagagcgacgagcugcugcacaacgugaacgccggcaagagcaccaccaacaucaugaucaccaccaucaucaucgugaucaucgugauccugcugagccugaucgccgugggccugcugcuguacugcaaggccagaagcacccccgugacccugagcaaggaccagcugagcggcaucaacaacaucgccuucagcaacugaggacuaguaauaaggaaacuguaugaaugucugugggcaggaagugaagagauccuucuguaaagguuuuuggaauuaugucugcugaauaauaaacuuuuuugaaauaauaaaucugguagaaaaaugagaucuaaaaaaaaaaaaaaaaaaaaaaaaaaaaaaaaaaaaaaaaaaaaaaaaaaaaaaaaaaaaaaaaugcaucccccccccccccccccccccccccccccccaaaggcucuuuucagagccaccagaauu

SEQ ID NO: 1778 - RNA, 1961 nt, Artificial Sequence
  mRNA product Design d-2 comprising derived and/or modified sequence from HRSV(A2)__F_DSCav1_mut1 (opt5)
gggagagcggcucggccauuuugucccagucaguccggaggcugcggcugcagaaguaccgccugcggaguaacugcaaagaagcuuaccauggagcugcucauccugaaggccaacgcuauuaccacaauccuuacggccgugaccuucugcuuugcgagcggccagaauauuacagaagaguucuaccaauccaccuguucugcugucagcaaaggguaucugggagcccucagaacaggcugguacaccuccguuaucacaauugaacugucuaacaucaaggagaauaaaugcaacgggaccgacgccaaggugaaacuuaucaagcaggaacuggauaaguauaaaaaugcugugacggagcuccagcugcugaugcagagcacccccgccacaggauccggcucugcuauuuguagcggggucgccgugugcaagguucuccaccuggagggagaagugaacaaaaucaaguccgcgcuucugagcaccaauaaagccgucgugucucucuccaacggcguuagcgugcugacauuuaagguccuugaccugaagaauuacauugauaaacaacuccugccuauccugaacaagcagucuuguuccauuccgaauaucgagaccgugauugaguuccagcagaaaaacaaucggcuccuggaaaucacgcgcgaguuuagcgugaacgcuggcgucacaacccccguuucuacauauaugcuuaccaauuccgaacugcucagccugaucaacgacaugccuauuaccaacgaucaaaagaaacuuauguccaauaacgugcagaucgugagacagcagucuuacagcauuaugugcaucauuaaggaggaaguccuggccuaugugguucaacucccccuguacggggugaucgacacaccuuguuggaaacugcauacgagcccccucugcaccacaaauaccaaggagggauccaacaucugucugacacggaccgaucgcggcugguacugcgacaaugcugggucugucuccuucuuuccucaggccgaaacguguaaggugcagagcaacagaguuuucugcgauacaaugaacucucuuacccugccgagcgaggugaaucucugcaaugucgacauuuuuaaccccaaauaugauuguaagaucaugaccuccaaaacagacgugucuagcuccgucauuaccagccugggagcgaucgugucuugcuacggcaagacaaaauguacggccuccaauaagaaccgggggauuaucaagaccuucagcaauggaugcgauuauguuucuaacaaaggcguggacacagucuccgugggcaauacccuuuacuguguuaacaagcaagaggggcagagccuguaugugaaaggagaaccuaucauuaacuuuuacgacccccucgucuucccuuccgaugaguuugacgcuucuaucagccaggugaaugaaaagauuaaccagucccuggccuucauccgcaaaucugaugagcugcuccacaaugugaacgcuggcaagagcacaaccaauauuaugaucacgaccauuaucaucguuauuaucgucauucugcuuucccugaucgccguggggcuccugcuguauugcaaggccagaagcacacccgugacccuuucuaaagaccaacucuccggaauuaacaauaucgcuuucagcaacugaggacuaguaauaaggaaacuguaugaaugucugugggcaggaagugaagagauccuucuguaaagguuuuuggaauuaugucugcugaauaauaaacuuuuuugaaauaauaaaucugguagaaaaaugagaucuaaaaaaaaaaaaaaaaaaaaaaaaaaaaaaaaaaaaaaaaaaaaaaaaaaaaaaaaaaaaaaaaugcaucccccccccccccccccccccccccccccccaaaggcucuuuucagagccaccagaauu

SEQ ID NO: 1779 - RNA, 1961 nt, Artificial Sequence
  mRNA product Design d-2 comprising derived and/or modified sequence from HRSV(A2)__F_DSCav1_mut1 (opt6)
gggagagcggcucggccauuuugucccagucaguccggaggcugcggcugcagaaguaccgccugcggaguaacugcaaagaagcuuaccauggaacuauuaauacuaaaagcaaacgcuauaacaacaauacuaacagcagucacauucugcuuugcaucaggccaaaacaucacagaagaauuuuaccaaucaacaugcuccgccguaucgaaaggauaccuaggcgcauuaagaaccggaugguauacaucagucauaacaauugaacuaucuaacauaaaagaaaacaaauguaacggcacagaugccaaaguaaaacucaucaaacaagaauuagauaaauacaaaaacgcagucacugaacuacaacucuuaaugcaaucaacaccugcaacaggaucaggaucagcaauaugcucaggaguagccguauguaaaguacuacaccuagaaggagaagucaacaaaauaaaaucagcccuccuaaguacaaacaaagcugucguaucacuauccaaugguguuucaguacuaacuuucaaaguucuagaccuaaaaaacuacauagacaaacaacuacuaccaauacuaaauaaacaaaguuguucuauacccaacauagaaaccgucauagaauuucaacaaaaaaauaauagacuccuagaaauaacaagagaauuuucaguuaacgcagguguaacaaccccaguauccaccuauaugcuaacaaauucagaauuacuuucccuaaucaacgacaugcccauaacaaaugaccaaaaaaaauuaaugucaaacaacguccaaauaguucgucaacaaucauauucaauaaugugcauaauaaaagaagaagucuuagccuacguaguacaacuuccccuuuauggaguuaucgacacacccugcuggaaacuccacacuucaccacuauguacuacaaacacaaaagaaggauccaacaucugccucacaagaaccgaucgaggaugguacugugauaacgccggauccgucucauucuucccacaagcagaaacaugcaaaguacaaucaaacagaguauuuugcgacacaaugaacucccucacauuaccuucugaaguaaaccuauguaauguagacauauucaaccccaaauacgauugcaaaauaaugacaucaaagacagauguaucaucaagugucaucacaucccuaggagcaauugucucauguuaugguaaaacaaaaugcaccgcaucaaauaaaaacagaggcauaauaaaaaccuucucaaacgguugugacuacguauccaauaaaggcgucgacacaguaucaguagguaacacauuauauuguguaaacaaacaagaaggacagucccuauauguaaaaggagaaccaauaaucaacuucuacgacccacuuguuuucccuucugaugaauuugacgcaaguauaucacaaguaaaugaaaaaaucaaucaaucacuagccuuuauaagaaaaucagaugaauuauuacacaacguaaacgccggaaaaucaacaaccaacauaaugauaaccacaauaauaaucgucauaauagucauccuacuaucacucauagcaguuggacuccuacuauacugcaaagcacgaucaacaccaguaacauuauccaaagaccaacuaagugguaucaauaacaucgccuuuucaaacugaggacuaguaauaaggaaacuguaugaaugucugugggcaggaagugaagagauccuucuguaaagguuuuuggaauuaugucugcugaauaauaaacuuuuuugaaauaauaaaucugguagaaaaaugagaucuaaaaaaaaaaaaaaaaaaaaaaaaaaaaaaaaaaaaaaaaaaaaaaaaaaaaaaaaaaaaaaaaugcaucccccccccccccccccccccccccccccccaaaggcucuuuucagagccaccagaauu

SEQ ID NO: 1780 - RNA, 1961 nt, Artificial Sequence
  mRNA product Design d-2 comprising derived and/or modified sequence from HRSV(A2)__F_DSCav1_mut1 (opt11)
gggagagcggcucggccauuuugucccagucaguccggaggcugcggcugcagaaguaccgccugcggaguaacugcaaagaagcuuaccauggaacuccuaauccucaaagccaacgcaaucaccacaauccucacugccgucaccuucugcuucgccuccggccaaaacauaacagaagaauuuuaccaaucaaccuguucagcggucuccaaaggcuaccucggcgcccuccgcaccggcugguacaccuccgugaucaccauagaacucuccaacaucaaggaaaacaaaugcaacggcaccgacgcgaaggucaaacuuauuaaacaagaacucgacaaauacaaaaacgcagucaccgaacuacaacuccuaaugcaguccacgccagccaccggcucuggcucagccauaugcuccgguguggccguaugcaaaguccuacaccucgaaggagaagucaacaaaauaaaauccgcccuacuguccacaaacaaggccguagucucccucucaaacggcgucucaguacucaccuucaaaguccuagaccucaagaacuacaucgacaaacaacuccuacccauacuaaacaaacaauccugcucaauccccaacaucgaaaccguaauagaauuucaacaaaaaaacaacagacuccuggagaucacccgggaauuuuccguaaacgccggagucacaacacccgucucaaccuacaugcuaacgaacucagagcuccucucacuuaucaacgacaugcccauaacaaacgaccaaaaaaaacucauguccaacaacgugcaaaucguccgacaacaauccuacuccaucaugugcaucauuaaagaagaaguccucgcauacguaguccagcucccccucuacggcgucauagacacccccugcuggaaacuacacacaucaccccucugcacaacaaacaccaaagaaggcuccaacaucugccucacccgcaccgaccgaggcugguacugcgauaacgccggcagcgucuccuucuucccccaagcagaaaccugcaagguccaauccaaccgaguuuucugcgacacuaugaacucgcucacccuccccuccgaagucaaccucugcaacgucgacauuuucaaccccaaauacgacugcaaaaucaugaccuccaagaccgacguauccuccuccgucaucaccucccuaggcgccauaguaaguugcuacggcaaaaccaagugcacagcaagcaacaaaaaccgaggaauaaucaaaaccuucuccaacggcugcgacuacguauccaacaagggcgucgacaccguauccguagggaacacccuuuacugcguaaacaaacaagaaggacaaucacucuacguaaaaggcgaacccauaaucaacuucuacgacccccucguauuucccuccgacgaauuugacgcaucaaucucacaggucaacgaaaaaauaaaccaaucgcuagcauucaucagaaaaucagacgaacuccuacacaacgucaacgcaggcaagagcaccaccaacaucaugaucaccaccaucaucaucgucauaaucgucauacuacucucacucauagcagucggccuccuccuauacuguaaagcaaggucgaccccagucacccuauccaaagaccaacuaagcggcaucaacaacaucgcguucucaaacuaaggacuaguaauaaggaaacuguaugaaugucugugggcaggaagugaagagauccuucuguaaagguuuuuggaauuaugucugcugaauaauaaacuuuuuugaaauaauaaaucugguagaaaaaugagaucuaaaaaaaaaaaaaaaaaaaaaaaaaaaaaaaaaaaaaaaaaaaaaaaaaaaaaaaaaaaaaaaaugcaucccccccccccccccccccccccccccccccaaaggcucuuuucagagccaccagaauu

SEQ ID NO: 1781 - RNA, 2277 nt, Artificial Sequence
  mRNA product Design d-3 comprising derived and/or modified sequence from HRSV(A2)__F_DSCav1_mut1 (opt1)
gggagagggcgcuuggcuugcaaggacccugagcugcggcauugaagcacacccaacccaacucgacugaagucagccucacugaaccggaucugagaaucuucucucucugggcuugccagggcucuccgaaccuagcuagcauccucuucaauuccaacuagaaagcuuaccauggagcugcucauccugaaggccaacgccaucaccaccauccugacggcggugaccuucugcuucgccagcggccagaacaucaccgaggaguucuaccaguccacgugcagcgccgucuccaagggguaccucggcgcccugcggaccggcugguacaccuccgugaucaccaucgagcugagcaacaucaaggagaacaagugcaacgggaccgacgccaaggugaagcucaucaagcaggagcuggacaaguacaagaacgcggucacggagcugcagcuccugaugcaguccaccccggcaaccggcuccggcuccgccaucugcagcggcgucgccgugugcaaggugcugcaccucgagggggaggucaacaagaucaagagcgcccugcuguccaccaacaaggccguggugagccucuccaacggcgucagcgugcugaccuucaaggugcuggaccucaagaacuacaucgacaagcagcugcugcccauccugaacaagcagagcugcuccauccccaacaucgagacggugaucgaguuccagcagaagaacaaccggcuccuggagaucacccgcgaguucagcgugaacgccggggucaccacccccguguccacguacaugcugaccaacagcgagcuccugucccugaucaacgacaugccgaucaccaacgaccagaagaagcucaugagcaacaacgugcagaucguccggcagcaguccuacagcaucaugugcaucaucaaggaggaggugcuggcguacgugguccagcugccccucuacggcgugaucgacacccccugcuggaagcugcacacgagcccccugugcaccaccaacaccaaggagggguccaacaucugccucacgcgcaccgaccggggcugguacugcgacaacgccggcagcgucuccuucuucccgcaggccgagaccugcaaggugcagagcaaccgcguguucugcgacaccaugaacucccugacgcugcccagcgagguaaaccucugcaacgucgacaucuucaaccccaaguacgacugcaagaucaugaccuccaagaccgacgugagcuccagcgugaucaccucccugggggccaucgucagcugcuacggcaagacgaagugcaccgccagcaacaagaaccgggggaucaucaagaccuucuccaacggcugcgacuacgugagcaacaagggcguggacaccguguccgucgggaacacccuguacugcgugaacaagcaggagggccagagccucuacgugaagggggagcccaucaucaacuucuacgacccgcuggucuuccccuccgacgaguucgacgcgagcaucucccaggugaacgagaagaucaaccagagccuggccuucauccgcaaguccgacgagcugcuccacaacgugaacgccggcaagagcacgaccaacaucaugaucaccaccaucaucaucgucaucaucgugauccugcugucccucaucgccguggggcugcugcucuacugcaaggcccggagcacgcccgucacccuguccaaggaccagcugagcggcaucaacaacaucgcguucuccaacugaggacuagugaagggaacacccaaauuuaauucagccuuaagcacaauuaauuaagagugaaacguaauuguacaagcaguuggucacccaccauagggcaugaucaacaccgcaaccuuuccuuuuucccccagugauucugaaaaaccccucuucccuucagcuugcuuagauguuccaaauuuaguaagcuuaaggcggccuacagaagaaaaagaaaaaaaaggccacaaaaguucccucucacuuucaguaaauaaaauaaaagcagcaacagaaauaaagaaauaaaugaaauucaaaaugaaauaaauauuguguugugcagcauuaaaaaaucaauaaaaauuaaaaaugagcaagaucuaaaaaaaaaaaaaaaaaaaaaaaaaaaaaaaaaaaaaaaaaaaaaaaaaaaaaaaaaaaaaaaaugcaucccccccccccccccccccccccccccccccaaaggcucuuuucagagccaccagaauu

SEQ ID NO: 1782 - RNA, 2277 nt, Artificial Sequence
  mRNA product Design d-3 comprising derived and/or modified sequence from HRSV(A2)__F_DSCav1_mut1 (opt1)
gggagagggcgcuuggcuugcaaggacccugagcugcggcauugaagcacacccaacccaacucgacugaagucagccucacugaaccggaucugagaaucuucucucucugggcuugccagggcucuccgaaccuagcuagcauccucuucaauuccaacuagaaagcuuaccauggagcugcucauccugaaggccaacgccaucaccaccauccugacggcggugaccuucugcuucgccagcggccagaacaucaccgaggaguucuaccaguccacgugcagcgccgucuccaagggguaccucggcgcccugcgcaccgggugguacaccagcgugaucaccaucgagcuguccaacaucaaggagaacaagugcaacggcaccgacgccaaggugaagcucaucaagcaggagcuggacaaguacaagaacgcggucacggagcugcagcuccugaugcagagcacccccgccaccggguccggcagcgccaucugcuccggcguggccgugugcaagguccugcaccucgagggggaggugaacaagaucaagagcgcgcugcuguccaccaacaaggccguggucagccucuccaacggcgugagcgugcugacguucaagguccuggaccucaagaacuacaucgacaagcagcugcugccgauccucaacaagcaguccugcagcauccccaacaucgagaccgugaucgaguuccagcagaagaacaaccggcugcuggagaucacccgcgaguucuccgugaacgccggggucaccacgcccgugagcaccuacaugcucaccaacuccgagcugcugagccucaucaacgacaugcccaucaccaacgaccagaagaagcugaugagcaacaacgugcagaucguccggcagcaguccuacagcaucaugugcaucaucaaggaggaggugcuggccuacgugguccagcucccgcuguacggcgugaucgacacgcccugcuggaagcugcacaccagcccccucugcaccaccaacacgaaggagggguccaacaucugccugacccgcaccgaccggggcugguacugcgacaacgccggcuccgugagcuucuucccccaggcggagaccugcaagguccaguccaaccgcguguucugcgacacgaugaacagccugacccucccguccgaggucaaccugugcaacguggacaucuucaaccccaaguacgacugcaagaucaugaccagcaagaccgacguguccagcuccgucaucacgagccugggggccaucguguccugcuacggcaagaccaagugcaccgccagcaacaagaaccgggggaucaucaagaccuucuccaacggcugcgacuacgugagcaacaagggcgucgacacgguguccguggggaacacccucuacugcgucaacaagcaggagggccagagccuguacgugaagggggagcccaucaucaacuucuacgacccccugguguucccgagcgacgaguucgacgccuccaucagccaggucaacgagaagaucaaccagucccucgccuucauccgcaagagcgacgagcugcugcacaacgugaacgcgggcaaguccaccaccaacaucaugaucaccacgaucaucaucgugaucaucgucauccuccugagccugaucgccguggggcuccugcuguacugcaaggcccgguccacccccgugacccugagcaaggaccagcucuccggcaucaacaacaucgccuucagcaacugaggacuagugaagggaacacccaaauuuaauucagccuuaagcacaauuaauuaagagugaaacguaauuguacaagcaguuggucacccaccauagggcaugaucaacaccgcaaccuuuccuuuuucccccagugauucugaaaaaccccucuucccuucagcuugcuuagauguuccaaauuuaguaagcuuaaggcggccuacagaagaaaaagaaaaaaaaggccacaaaaguucccucucacuuucaguaaauaaaauaaaagcagcaacagaaauaaagaaauaaaugaaauucaaaaugaaauaaauauuguguugugcagcauuaaaaaaucaauaaaaauuaaaaaugagcaagaucuaaaaaaaaaaaaaaaaaaaaaaaaaaaaaaaaaaaaaaaaaaaaaaaaaaaaaaaaaaaaaaaaugcaucccccccccccccccccccccccccccccccaaaggcucuuuucagagccaccagaauu

SEQ ID NO: 1783 - RNA, 2277 nt, Artificial Sequence
  mRNA product Design d-3 comprising derived and/or modified sequence from HRSV(A2)__F_DSCav1_mut1 (opt2)
gggagagggcgcuuggcuugcaaggacccugagcugcggcauugaagcacacccaacccaacucgacugaagucagccucacugaaccggaucugagaaucuucucucucugggcuugccagggcucuccgaaccuagcuagcauccucuucaauuccaacuagaaagcuuaccauggagcuccucauccucaaggccaacgccaucaccaccauccucaccgccgucaccuucugcuucgccuccggccagaacaucaccgaggaguucuaccaguccaccugcuccgccgucuccaagggcuaccucggcgcccuccgcaccggcugguacaccuccgucaucaccaucgagcucuccaacaucaaggagaacaagugcaacggcaccgacgccaaggucaagcucaucaagcaggagcucgacaaguacaagaacgccgucaccgagcuccagcuccucaugcaguccacccccgccaccggcuccggcuccgccaucugcuccggcgucgccgucugcaagguccuccaccucgagggcgaggucaacaagaucaaguccgcccuccucuccaccaacaaggccgucgucucccucuccaacggcgucuccguccucaccuucaagguccucgaccucaagaacuacaucgacaagcagcuccuccccauccucaacaagcaguccugcuccauccccaacaucgagaccgucaucgaguuccagcagaagaacaaccgccuccucgagaucacccgcgaguucuccgucaacgccggcgucaccacccccgucuccaccuacaugcucaccaacuccgagcuccucucccucaucaacgacaugcccaucaccaacgaccagaagaagcucauguccaacaacguccagaucguccgccagcaguccuacuccaucaugugcaucaucaaggaggagguccucgccuacgucguccagcucccccucuacggcgucaucgacacccccugcuggaagcuccacaccuccccccucugcaccaccaacaccaaggagggcuccaacaucugccucacccgcaccgaccgcggcugguacugcgacaacgccggcuccgucuccuucuucccccaggccgagaccugcaagguccaguccaaccgcgucuucugcgacaccaugaacucccucacccuccccuccgaggucaaccucugcaacgucgacaucuucaaccccaaguacgacugcaagaucaugaccuccaagaccgacgucuccuccuccgucaucaccucccucggcgccaucgucuccugcuacggcaagaccaagugcaccgccuccaacaagaaccgcggcaucaucaagaccuucuccaacggcugcgacuacgucuccaacaagggcgucgacaccgucuccgucggcaacacccucuacugcgucaacaagcaggagggccagucccucuacgucaagggcgagcccaucaucaacuucuacgacccccucgucuuccccuccgacgaguucgacgccuccaucucccaggucaacgagaagaucaaccagucccucgccuucauccgcaaguccgacgagcuccuccacaacgucaacgccggcaaguccaccaccaacaucaugaucaccaccaucaucaucgucaucaucgucauccuccucucccucaucgccgucggccuccuccucuacugcaaggcccgcuccacccccgucacccucuccaaggaccagcucuccggcaucaacaacaucgccuucuccaacugaggacuagugaagggaacacccaaauuuaauucagccuuaagcacaauuaauuaagagugaaacguaauuguacaagcaguuggucacccaccauagggcaugaucaacaccgcaaccuuuccuuuuucccccagugauucugaaaaaccccucuucccuucagcuugcuuagauguuccaaauuuaguaagcuuaaggcggccuacagaagaaaaagaaaaaaaaggccacaaaaguucccucucacuuucaguaaauaaaauaaaagcagcaacagaaauaaagaaauaaaugaaauucaaaaugaaauaaauauuguguugugcagcauuaaaaaaucaauaaaaauuaaaaaugagcaagaucuaaaaaaaaaaaaaaaaaaaaaaaaaaaaaaaaaaaaaaaaaaaaaaaaaaaaaaaaaaaaaaaaugcaucccccccccccccccccccccccccccccccaaaggcucuuuucagagccaccagaauu

SEQ ID NO: 1784 - RNA, 2277 nt, Artificial Sequence
  mRNA product Design d-3 comprising derived and/or modified sequence from HRSV(A2)__F_DSCav1_mut1 (opt3)
gggagagggcgcuuggcuugcaaggacccugagcugcggcauugaagcacacccaacccaacucgacugaagucagccucacugaaccggaucugagaaucuucucucucugggcuugccagggcucuccgaaccuagcuagcauccucuucaauuccaacuagaaagcuuaccauggagcugcucauccuuaaggccaacgcuauuaccacaauacugacugcagugacguucugcuuugccagcggccagaauaucaccgaagaguucuaccaauccacauguucugcggucucaaaaggguauuugggagcuuuaagaacugguugguacaccaguguuauuacaaucgaacugagcaacauuaaggagaauaaaugcaacggcaccgacgccaaggugaaacuaaucaagcaggaacucgauaaguauaaaaaugcaguaacugagcugcagcuucugaugcaguccacacccgccaccgggucuggaucggcuauauguucaggcguggcagucugcaagguguugcaccucgagggugaaguuaacaaaaucaagagcgcccugcugaguacgaauaaagcuguggucucccucucuaacggggugagcguauuaacuuuuaagguucuggaccuuaagaauuacauugauaaacaauugcugccuauccuaaacaagcaguccuguucaauuccaaauaucgagaccgugauagaguuccagcagaaaaacaauaggcuccuggaaauuacacgggaguuuagugucaacgccggagugacuaccccggugagcacauauaugcuuaccaauucugaacuguugucccucaucaacgacaugcccauuacgaacgaucaaaagaaacugaugucaaauaacguccagaucguucgccagcagagcuacaguaucaugugcauuauaaaggaggaaguguuagcguauguagugcaacugccucucuacggcgucaucgacacuccauguuggaaacuucauacaucuccccugugcaccacuaauacaaaggagggcuccaacauuuguuugacccgaacggaucgugggugguacugcgacaaugcaggaagcgugucguucuuuccucaggccgaaaccuguaagguucagucuaacagaguguucugcgauacaaugaacucccuaacucugccaucagaggucaaucucugcaauguggacaucuuuaaccccaaauaugauuguaagauaaugaccaguaaaacagacguaagcuccucuguuauuacuagccugggugcuaucgugucaugcuacggcaagaccaaauguacagccaguaauaagaacagggggaucauuaagaccuucuccaauggaugcgauuaugucagcaacaaaggcguggacacugucucuguggguaauacgcuuuacuguguuaacaagcaagaggggcagucacuguaugugaaaggagaaccuaucauuaacuuuuacgacccauugguauucccgagugaugaguuugacgcaagcauaucccaggucaaugaaaagaucaaccagucucucgcuuucauucggaaaucggaugagcuguuacacaaugugaacgccggcaagagcacaaccaauaucaugaucacuaccauuauaaucguuauuaucgugauucugcuaucccucaucgcggucggccugcuuuuguauugcaaggcccgcucaacacccgugacccugaguaaagaccaacucucugggauaaacaauaucgcauucagcaacugaggacuagugaagggaacacccaaauuuaauucagccuuaagcacaauuaauuaagagugaaacguaauuguacaagcaguuggucacccaccauagggcaugaucaacaccgcaaccuuuccuuuuucccccagugauucugaaaaaccccucuucccuucagcuugcuuagauguuccaaauuuaguaagcuuaaggcggccuacagaagaaaaagaaaaaaaaggccacaaaaguucccucucacuuucaguaaauaaaauaaaagcagcaacagaaauaaagaaauaaaugaaauucaaaaugaaauaaauauuguguugugcagcauuaaaaaaucaauaaaaauuaaaaaugagcaagaucuaaaaaaaaaaaaaaaaaaaaaaaaaaaaaaaaaaaaaaaaaaaaaaaaaaaaaaaaaaaaaaaaugcaucccccccccccccccccccccccccccccccaaaggcucuuuucagagccaccagaauu

SEQ ID NO: 1785 - RNA, 2277 nt, Artificial Sequence
  mRNA product Design d-3 comprising derived and/or modified sequence from HRSV(A2)__F_DSCav1_mut1 (opt4)
gggagagggcgcuuggcuugcaaggacccugagcugcggcauugaagcacacccaacccaacucgacugaagucagccucacugaaccggaucugagaaucuucucucucugggcuugccagggcucuccgaaccuagcuagcauccucuucaauuccaacuagaaagcuuaccauggagcugcugauccugaaggccaacgccaucaccaccauccugaccgccgugaccuucugcuucgccagcggccagaacaucaccgaggaguucuaccagagcaccugcagcgccgugagcaagggcuaccugggcgcccugagaaccggcugguacaccagcgugaucaccaucgagcugagcaacaucaaggagaacaagugcaacggcaccgacgccaaggugaagcugaucaagcaggagcuggacaaguacaagaacgccgugaccgagcugcagcugcugaugcagagcacccccgccaccggcagcggcagcgccaucugcagcggcguggccgugugcaaggugcugcaccuggagggcgaggugaacaagaucaagagcgcccugcugagcaccaacaaggccguggugagccugagcaacggcgugagcgugcugaccuucaaggugcuggaccugaagaacuacaucgacaagcagcugcugcccauccugaacaagcagagcugcagcauccccaacaucgagaccgugaucgaguuccagcagaagaacaacagacugcuggagaucaccagagaguucagcgugaacgccggcgugaccacccccgugagcaccuacaugcugaccaacagcgagcugcugagccugaucaacgacaugcccaucaccaacgaccagaagaagcugaugagcaacaacgugcagaucgugagacagcagagcuacagcaucaugugcaucaucaaggaggaggugcuggccuacguggugcagcugccccuguacggcgugaucgacacccccugcuggaagcugcacaccagcccccugugcaccaccaacaccaaggagggcagcaacaucugccugaccagaaccgacagaggcugguacugcgacaacgccggcagcgugagcuucuucccccaggccgagaccugcaaggugcagagcaacagaguguucugcgacaccaugaacagccugacccugcccagcgaggugaaccugugcaacguggacaucuucaaccccaaguacgacugcaagaucaugaccagcaagaccgacgugagcagcagcgugaucaccagccugggcgccaucgugagcugcuacggcaagaccaagugcaccgccagcaacaagaacagaggcaucaucaagaccuucagcaacggcugcgacuacgugagcaacaagggcguggacaccgugagcgugggcaacacccuguacugcgugaacaagcaggagggccagagccuguacgugaagggcgagcccaucaucaacuucuacgacccccugguguuccccagcgacgaguucgacgccagcaucagccaggugaacgagaagaucaaccagagccuggccuucaucagaaagagcgacgagcugcugcacaacgugaacgccggcaagagcaccaccaacaucaugaucaccaccaucaucaucgugaucaucgugauccugcugagccugaucgccgugggccugcugcuguacugcaaggccagaagcacccccgugacccugagcaaggaccagcugagcggcaucaacaacaucgccuucagcaacugaggacuagugaagggaacacccaaauuuaauucagccuuaagcacaauuaauuaagagugaaacguaauuguacaagcaguuggucacccaccauagggcaugaucaacaccgcaaccuuuccuuuuucccccagugauucugaaaaaccccucuucccuucagcuugcuuagauguuccaaauuuaguaagcuuaaggcggccuacagaagaaaaagaaaaaaaaggccacaaaaguucccucucacuuucaguaaauaaaauaaaagcagcaacagaaauaaagaaauaaaugaaauucaaaaugaaauaaauauuguguugugcagcauuaaaaaaucaauaaaaauuaaaaaugagcaagaucuaaaaaaaaaaaaaaaaaaaaaaaaaaaaaaaaaaaaaaaaaaaaaaaaaaaaaaaaaaaaaaaaugcaucccccccccccccccccccccccccccccccaaaggcucuuuucagagccaccagaauu

SEQ ID NO: 1786 - RNA, 2277 nt, Artificial Sequence
  mRNA product Design d-3 comprising derived and/or modified sequence from HRSV(A2)__F_DSCav1_mut1 (opt5)
gggagagggcgcuuggcuugcaaggacccugagcugcggcauugaagcacacccaacccaacucgacugaagucagccucacugaaccggaucugagaaucuucucucucugggcuugccagggcucuccgaaccuagcuagcauccucuucaauuccaacuagaaagcuuaccauggagcugcucauccugaaggccaacgcuauuaccacaauccuuacggccgugaccuucugcuuugcgagcggccagaauauuacagaagaguucuaccaauccaccuguucugcugucagcaaaggguaucugggagcccucagaacaggcugguacaccuccguuaucacaauugaacugucuaacaucaaggagaauaaaugcaacgggaccgacgccaaggugaaacuuaucaagcaggaacuggauaaguauaaaaaugcugugacggagcuccagcugcugaugcagagcacccccgccacaggauccggcucugcuauuuguagcggggucgccgugugcaagguucuccaccuggagggagaagugaacaaaaucaaguccgcgcuucugagcaccaauaaagccgucgugucucucuccaacggcguuagcgugcugacauuuaagguccuugaccugaagaauuacauugauaaacaacuccugccuauccugaacaagcagucuuguuccauuccgaauaucgagaccgugauugaguuccagcagaaaaacaaucggcuccuggaaaucacgcgcgaguuuagcgugaacgcuggcgucacaacccccguuucuacauauaugcuuaccaauuccgaacugcucagccugaucaacgacaugccuauuaccaacgaucaaaagaaacuuauguccaauaacgugcagaucgugagacagcagucuuacagcauuaugugcaucauuaaggaggaaguccuggccuaugugguucaacucccccuguacggggugaucgacacaccuuguuggaaacugcauacgagcccccucugcaccacaaauaccaaggagggauccaacaucugucugacacggaccgaucgcggcugguacugcgacaaugcugggucugucuccuucuuuccucaggccgaaacguguaaggugcagagcaacagaguuuucugcgauacaaugaacucucuuacccugccgagcgaggugaaucucugcaaugucgacauuuuuaaccccaaauaugauuguaagaucaugaccuccaaaacagacgugucuagcuccgucauuaccagccugggagcgaucgugucuugcuacggcaagacaaaauguacggccuccaauaagaaccgggggauuaucaagaccuucagcaauggaugcgauuauguuucuaacaaaggcguggacacagucuccgugggcaauacccuuuacuguguuaacaagcaagaggggcagagccuguaugugaaaggagaaccuaucauuaacuuuuacgacccccucgucuucccuuccgaugaguuugacgcuucuaucagccaggugaaugaaaagauuaaccagucccuggccuucauccgcaaaucugaugagcugcuccacaaugugaacgcuggcaagagcacaaccaauauuaugaucacgaccauuaucaucguuauuaucgucauucugcuuucccugaucgccguggggcuccugcuguauugcaaggccagaagcacacccgugacccuuucuaaagaccaacucuccggaauuaacaauaucgcuuucagcaacugaggacuagugaagggaacacccaaauuuaauucagccuuaagcacaauuaauuaagagugaaacguaauuguacaagcaguuggucacccaccauagggcaugaucaacaccgcaaccuuuccuuuuucccccagugauucugaaaaaccccucuucccuucagcuugcuuagauguuccaaauuuaguaagcuuaaggcggccuacagaagaaaaagaaaaaaaaggccacaaaaguucccucucacuuucaguaaauaaaauaaaagcagcaacagaaauaaagaaauaaaugaaauucaaaaugaaauaaauauuguguugugcagcauuaaaaaaucaauaaaaauuaaaaaugagcaagaucuaaaaaaaaaaaaaaaaaaaaaaaaaaaaaaaaaaaaaaaaaaaaaaaaaaaaaaaaaaaaaaaaugcaucccccccccccccccccccccccccccccccaaaggcucuuuucagagccaccagaauu

SEQ ID NO: 1787 - RNA, 2277 nt, Artificial Sequence
  mRNA product Design d-3 comprising derived and/or modified sequence from HRSV(A2)__F_DSCav1_mut1 (opt6)
gggagagggcgcuuggcuugcaaggacccugagcugcggcauugaagcacacccaacccaacucgacugaagucagccucacugaaccggaucugagaaucuucucucucugggcuugccagggcucuccgaaccuagcuagcauccucuucaauuccaacuagaaagcuuaccauggaacuauuaauacuaaaagcaaacgcuauaacaacaauacuaacagcagucacauucugcuuugcaucaggccaaaacaucacagaagaauuuuaccaaucaacaugcuccgccguaucgaaaggauaccuaggcgcauuaagaaccggaugguauacaucagucauaacaauugaacuaucuaacauaaaagaaaacaaauguaacggcacagaugccaaaguaaaacucaucaaacaagaauuagauaaauacaaaaacgcagucacugaacuacaacucuuaaugcaaucaacaccugcaacaggaucaggaucagcaauaugcucaggaguagccguauguaaaguacuacaccuagaaggagaagucaacaaaauaaaaucagcccuccuaaguacaaacaaagcugucguaucacuauccaaugguguuucaguacuaacuuucaaaguucuagaccuaaaaaacuacauagacaaacaacuacuaccaauacuaaauaaacaaaguuguucuauacccaacauagaaaccgucauagaauuucaacaaaaaaauaauagacuccuagaaauaacaagagaauuuucaguuaacgcagguguaacaaccccaguauccaccuauaugcuaacaaauucagaauuacuuucccuaaucaacgacaugcccauaacaaaugaccaaaaaaaauuaaugucaaacaacguccaaauaguucgucaacaaucauauucaauaaugugcauaauaaaagaagaagucuuagccuacguaguacaacuuccccuuuauggaguuaucgacacacccugcuggaaacuccacacuucaccacuauguacuacaaacacaaaagaaggauccaacaucugccucacaagaaccgaucgaggaugguacugugauaacgccggauccgucucauucuucccacaagcagaaacaugcaaaguacaaucaaacagaguauuuugcgacacaaugaacucccucacauuaccuucugaaguaaaccuauguaauguagacauauucaaccccaaauacgauugcaaaauaaugacaucaaagacagauguaucaucaagugucaucacaucccuaggagcaauugucucauguuaugguaaaacaaaaugcaccgcaucaaauaaaaacagaggcauaauaaaaaccuucucaaacgguugugacuacguauccaauaaaggcgucgacacaguaucaguagguaacacauuauauuguguaaacaaacaagaaggacagucccuauauguaaaaggagaaccaauaaucaacuucuacgacccacuuguuuucccuucugaugaauuugacgcaaguauaucacaaguaaaugaaaaaaucaaucaaucacuagccuuuauaagaaaaucagaugaauuauuacacaacguaaacgccggaaaaucaacaaccaacauaaugauaaccacaauaauaaucgucauaauagucauccuacuaucacucauagcaguuggacuccuacuauacugcaaagcacgaucaacaccaguaacauuauccaaagaccaacuaagugguaucaauaacaucgccuuuucaaacugaggacuagugaagggaacacccaaauuuaauucagccuuaagcacaauuaauuaagagugaaacguaauuguacaagcaguuggucacccaccauagggcaugaucaacaccgcaaccuuuccuuuuucccccagugauucugaaaaaccccucuucccuucagcuugcuuagauguuccaaauuuaguaagcuuaaggcggccuacagaagaaaaagaaaaaaaaggccacaaaaguucccucucacuuucaguaaauaaaauaaaagcagcaacagaaauaaagaaauaaaugaaauucaaaaugaaauaaauauuguguugugcagcauuaaaaaaucaauaaaaauuaaaaaugagcaagaucuaaaaaaaaaaaaaaaaaaaaaaaaaaaaaaaaaaaaaaaaaaaaaaaaaaaaaaaaaaaaaaaaugcaucccccccccccccccccccccccccccccccaaaggcucuuuucagagccaccagaauu

SEQ ID NO: 1788 - RNA, 2277 nt, Artificial Sequence
  mRNA product Design d-3 comprising derived and/or modified sequence from HRSV(A2)__F_DSCav1_mut1 (opt11)
gggagagggcgcuuggcuugcaaggacccugagcugcggcauugaagcacacccaacccaacucgacugaagucagccucacugaaccggaucugagaaucuucucucucugggcuugccagggcucuccgaaccuagcuagcauccucuucaauuccaacuagaaagcuuaccauggaacuccuaauccucaaagccaacgcaaucaccacaauccucacugccgucaccuucugcuucgccuccggccaaaacauaacagaagaauuuuaccaaucaaccuguucagcggucuccaaaggcuaccucggcgcccuccgcaccggcugguacaccuccgugaucaccauagaacucuccaacaucaaggaaaacaaaugcaacggcaccgacgcgaaggucaaacuuauuaaacaagaacucgacaaauacaaaaacgcagucaccgaacuacaacuccuaaugcaguccacgccagccaccggcucuggcucagccauaugcuccgguguggccguaugcaaaguccuacaccucgaaggagaagucaacaaaauaaaauccgcccuacuguccacaaacaaggccguagucucccucucaaacggcgucucaguacucaccuucaaaguccuagaccucaagaacuacaucgacaaacaacuccuacccauacuaaacaaacaauccugcucaauccccaacaucgaaaccguaauagaauuucaacaaaaaaacaacagacuccuggagaucacccgggaauuuuccguaaacgccggagucacaacacccgucucaaccuacaugcuaacgaacucagagcuccucucacuuaucaacgacaugcccauaacaaacgaccaaaaaaaacucauguccaacaacgugcaaaucguccgacaacaauccuacuccaucaugugcaucauuaaagaagaaguccucgcauacguaguccagcucccccucuacggcgucauagacacccccugcuggaaacuacacacaucaccccucugcacaacaaacaccaaagaaggcuccaacaucugccucacccgcaccgaccgaggcugguacugcgauaacgccggcagcgucuccuucuucccccaagcagaaaccugcaagguccaauccaaccgaguuuucugcgacacuaugaacucgcucacccuccccuccgaagucaaccucugcaacgucgacauuuucaaccccaaauacgacugcaaaaucaugaccuccaagaccgacguauccuccuccgucaucaccucccuaggcgccauaguaaguugcuacggcaaaaccaagugcacagcaagcaacaaaaaccgaggaauaaucaaaaccuucuccaacggcugcgacuacguauccaacaagggcgucgacaccguauccguagggaacacccuuuacugcguaaacaaacaagaaggacaaucacucuacguaaaaggcgaacccauaaucaacuucuacgacccccucguauuucccuccgacgaauuugacgcaucaaucucacaggucaacgaaaaaauaaaccaaucgcuagcauucaucagaaaaucagacgaacuccuacacaacgucaacgcaggcaagagcaccaccaacaucaugaucaccaccaucaucaucgucauaaucgucauacuacucucacucauagcagucggccuccuccuauacuguaaagcaaggucgaccccagucacccuauccaaagaccaacuaagcggcaucaacaacaucgcguucucaaacuaaggacuagugaagggaacacccaaauuuaauucagccuuaagcacaauuaauuaagagugaaacguaauuguacaagcaguuggucacccaccauagggcaugaucaacaccgcaaccuuuccuuuuucccccagugauucugaaaaaccccucuucccuucagcuugcuuagauguuccaaauuuaguaagcuuaaggcggccuacagaagaaaaagaaaaaaaaggccacaaaaguucccucucacuuucaguaaauaaaauaaaagcagcaacagaaauaaagaaauaaaugaaauucaaaaugaaauaaauauuguguugugcagcauuaaaaaaucaauaaaaauuaaaaaugagcaagaucuaaaaaaaaaaaaaaaaaaaaaaaaaaaaaaaaaaaaaaaaaaaaaaaaaaaaaaaaaaaaaaaaugcaucccccccccccccccccccccccccccccccaaaggcucuuuucagagccaccagaauu

SEQ ID NO: 1789 - RNA, 1960 nt, Artificial Sequence
  mRNA product Design d-4 comprising derived and/or modified sequence from HRSV(A2)__F_DSCav1_mut1 (opt1)
gggagagucccgcagucggcguccagcggcucugcuuguucgugugugugucguugcaggccuuauucaagcuuaccauggagcugcucauccugaaggccaacgccaucaccaccauccugacggcggugaccuucugcuucgccagcggccagaacaucaccgaggaguucuaccaguccacgugcagcgccgucuccaagggguaccucggcgcccugcggaccggcugguacaccuccgugaucaccaucgagcugagcaacaucaaggagaacaagugcaacgggaccgacgccaaggugaagcucaucaagcaggagcuggacaaguacaagaacgcggucacggagcugcagcuccugaugcaguccaccccggcaaccggcuccggcuccgccaucugcagcggcgucgccgugugcaaggugcugcaccucgagggggaggucaacaagaucaagagcgcccugcuguccaccaacaaggccguggugagccucuccaacggcgucagcgugcugaccuucaaggugcuggaccucaagaacuacaucgacaagcagcugcugcccauccugaacaagcagagcugcuccauccccaacaucgagacggugaucgaguuccagcagaagaacaaccggcuccuggagaucacccgcgaguucagcgugaacgccggggucaccacccccguguccacguacaugcugaccaacagcgagcuccugucccugaucaacgacaugccgaucaccaacgaccagaagaagcucaugagcaacaacgugcagaucguccggcagcaguccuacagcaucaugugcaucaucaaggaggaggugcuggcguacgugguccagcugccccucuacggcgugaucgacacccccugcuggaagcugcacacgagcccccugugcaccaccaacaccaaggagggguccaacaucugccucacgcgcaccgaccggggcugguacugcgacaacgccggcagcgucuccuucuucccgcaggccgagaccugcaaggugcagagcaaccgcguguucugcgacaccaugaacucccugacgcugcccagcgagguaaaccucugcaacgucgacaucuucaaccccaaguacgacugcaagaucaugaccuccaagaccgacgugagcuccagcgugaucaccucccugggggccaucgucagcugcuacggcaagacgaagugcaccgccagcaacaagaaccgggggaucaucaagaccuucuccaacggcugcgacuacgugagcaacaagggcguggacaccguguccgucgggaacacccuguacugcgugaacaagcaggagggccagagccucuacgugaagggggagcccaucaucaacuucuacgacccgcuggucuuccccuccgacgaguucgacgcgagcaucucccaggugaacgagaagaucaaccagagccuggccuucauccgcaaguccgacgagcugcuccacaacgugaacgccggcaagagcacgaccaacaucaugaucaccaccaucaucaucgucaucaucgugauccugcugucccucaucgccguggggcugcugcucuacugcaaggcccggagcacgcccgucacccuguccaaggaccagcugagcggcaucaacaacaucgcguucuccaacugaggacuaguggaagcauuuuccuggcugauuaaaagaaauuacucagcuauggucaucuguuccuguuagaaggcuaugcagcauauuauauacuaugcgcauguuaugaaaugcauaauaaaaaauuuuaaaaaaucuaaaagaucuaaaaaaaaaaaaaaaaaaaaaaaaaaaaaaaaaaaaaaaaaaaaaaaaaaaaaaaaaaaaaaaaugcaucccccccccccccccccccccccccccccccaaaggcucuuuucagagccaccagaauu

SEQ ID NO: 1790 - RNA, 1960 nt, Artificial Sequence
  mRNA product Design d-4 comprising derived and/or modified sequence from HRSV(A2)__F_DSCav1_mut1 (opt1)
gggagagucccgcagucggcguccagcggcucugcuuguucgugugugugucguugcaggccuuauucaagcuuaccauggagcugcucauccugaaggccaacgccaucaccaccauccugacggcggugaccuucugcuucgccagcggccagaacaucaccgaggaguucuaccaguccacgugcagcgccgucuccaagggguaccucggcgcccugcgcaccgggugguacaccagcgugaucaccaucgagcuguccaacaucaaggagaacaagugcaacggcaccgacgccaaggugaagcucaucaagcaggagcuggacaaguacaagaacgcggucacggagcugcagcuccugaugcagagcacccccgccaccggguccggcagcgccaucugcuccggcguggccgugugcaagguccugcaccucgagggggaggugaacaagaucaagagcgcgcugcuguccaccaacaaggccguggucagccucuccaacggcgugagcgugcugacguucaagguccuggaccucaagaacuacaucgacaagcagcugcugccgauccucaacaagcaguccugcagcauccccaacaucgagaccgugaucgaguuccagcagaagaacaaccggcugcuggagaucacccgcgaguucuccgugaacgccggggucaccacgcccgugagcaccuacaugcucaccaacuccgagcugcugagccucaucaacgacaugcccaucaccaacgaccagaagaagcugaugagcaacaacgugcagaucguccggcagcaguccuacagcaucaugugcaucaucaaggaggaggugcuggccuacgugguccagcucccgcuguacggcgugaucgacacgcccugcuggaagcugcacaccagcccccucugcaccaccaacacgaaggagggguccaacaucugccugacccgcaccgaccggggcugguacugcgacaacgccggcuccgugagcuucuucccccaggcggagaccugcaagguccaguccaaccgcguguucugcgacacgaugaacagccugacccucccguccgaggucaaccugugcaacguggacaucuucaaccccaaguacgacugcaagaucaugaccagcaagaccgacguguccagcuccgucaucacgagccugggggccaucguguccugcuacggcaagaccaagugcaccgccagcaacaagaaccgggggaucaucaagaccuucuccaacggcugcgacuacgugagcaacaagggcgucgacacgguguccguggggaacacccucuacugcgucaacaagcaggagggccagagccuguacgugaagggggagcccaucaucaacuucuacgacccccugguguucccgagcgacgaguucgacgccuccaucagccaggucaacgagaagaucaaccagucccucgccuucauccgcaagagcgacgagcugcugcacaacgugaacgcgggcaaguccaccaccaacaucaugaucaccacgaucaucaucgugaucaucgucauccuccugagccugaucgccguggggcuccugcuguacugcaaggcccgguccacccccgugacccugagcaaggaccagcucuccggcaucaacaacaucgccuucagcaacugaggacuaguggaagcauuuuccuggcugauuaaaagaaauuacucagcuauggucaucuguuccuguuagaaggcuaugcagcauauuauauacuaugcgcauguuaugaaaugcauaauaaaaaauuuuaaaaaaucuaaaagaucuaaaaaaaaaaaaaaaaaaaaaaaaaaaaaaaaaaaaaaaaaaaaaaaaaaaaaaaaaaaaaaaaugcaucccccccccccccccccccccccccccccccaaaggcucuuuucagagccaccagaauu

SEQ ID NO: 1791 - RNA, 1960 nt, Artificial Sequence
  mRNA product Design d-4 comprising derived and/or modified sequence from HRSV(A2)__F_DSCav1_mut1 (opt2)
gggagagucccgcagucggcguccagcggcucugcuuguucgugugugugucguugcaggccuuauucaagcuuaccauggagcuccucauccucaaggccaacgccaucaccaccauccucaccgccgucaccuucugcuucgccuccggccagaacaucaccgaggaguucuaccaguccaccugcuccgccgucuccaagggcuaccucggcgcccuccgcaccggcugguacaccuccgucaucaccaucgagcucuccaacaucaaggagaacaagugcaacggcaccgacgccaaggucaagcucaucaagcaggagcucgacaaguacaagaacgccgucaccgagcuccagcuccucaugcaguccacccccgccaccggcuccggcuccgccaucugcuccggcgucgccgucugcaagguccuccaccucgagggcgaggucaacaagaucaaguccgcccuccucuccaccaacaaggccgucgucucccucuccaacggcgucuccguccucaccuucaagguccucgaccucaagaacuacaucgacaagcagcuccuccccauccucaacaagcaguccugcuccauccccaacaucgagaccgucaucgaguuccagcagaagaacaaccgccuccucgagaucacccgcgaguucuccgucaacgccggcgucaccacccccgucuccaccuacaugcucaccaacuccgagcuccucucccucaucaacgacaugcccaucaccaacgaccagaagaagcucauguccaacaacguccagaucguccgccagcaguccuacuccaucaugugcaucaucaaggaggagguccucgccuacgucguccagcucccccucuacggcgucaucgacacccccugcuggaagcuccacaccuccccccucugcaccaccaacaccaaggagggcuccaacaucugccucacccgcaccgaccgcggcugguacugcgacaacgccggcuccgucuccuucuucccccaggccgagaccugcaagguccaguccaaccgcgucuucugcgacaccaugaacucccucacccuccccuccgaggucaaccucugcaacgucgacaucuucaaccccaaguacgacugcaagaucaugaccuccaagaccgacgucuccuccuccgucaucaccucccucggcgccaucgucuccugcuacggcaagaccaagugcaccgccuccaacaagaaccgcggcaucaucaagaccuucuccaacggcugcgacuacgucuccaacaagggcgucgacaccgucuccgucggcaacacccucuacugcgucaacaagcaggagggccagucccucuacgucaagggcgagcccaucaucaacuucuacgacccccucgucuuccccuccgacgaguucgacgccuccaucucccaggucaacgagaagaucaaccagucccucgccuucauccgcaaguccgacgagcuccuccacaacgucaacgccggcaaguccaccaccaacaucaugaucaccaccaucaucaucgucaucaucgucauccuccucucccucaucgccgucggccuccuccucuacugcaaggcccgcuccacccccgucacccucuccaaggaccagcucuccggcaucaacaacaucgccuucuccaacugaggacuaguggaagcauuuuccuggcugauuaaaagaaauuacucagcuauggucaucuguuccuguuagaaggcuaugcagcauauuauauacuaugcgcauguuaugaaaugcauaauaaaaaauuuuaaaaaaucuaaaagaucuaaaaaaaaaaaaaaaaaaaaaaaaaaaaaaaaaaaaaaaaaaaaaaaaaaaaaaaaaaaaaaaaugcaucccccccccccccccccccccccccccccccaaaggcucuuuucagagccaccagaauu

SEQ ID NO: 1792 - RNA, 1960 nt, Artificial Sequence
  mRNA product Design d-4 comprising derived and/or modified sequence from HRSV(A2)__F_DSCav1_mut1 (opt3)
gggagagucccgcagucggcguccagcggcucugcuuguucgugugugugucguugcaggccuuauucaagcuuaccauggagcugcucauccuuaaggccaacgcuauuaccacaauacugacugcagugacguucugcuuugccagcggccagaauaucaccgaagaguucuaccaauccacauguucugcggucucaaaaggguauuugggagcuuuaagaacugguugguacaccaguguuauuacaaucgaacugagcaacauuaaggagaauaaaugcaacggcaccgacgccaaggugaaacuaaucaagcaggaacucgauaaguauaaaaaugcaguaacugagcugcagcuucugaugcaguccacacccgccaccgggucuggaucggcuauauguucaggcguggcagucugcaagguguugcaccucgagggugaaguuaacaaaaucaagagcgcccugcugaguacgaauaaagcuguggucucccucucuaacggggugagcguauuaacuuuuaagguucuggaccuuaagaauuacauugauaaacaauugcugccuauccuaaacaagcaguccuguucaauuccaaauaucgagaccgugauagaguuccagcagaaaaacaauaggcuccuggaaauuacacgggaguuuagugucaacgccggagugacuaccccggugagcacauauaugcuuaccaauucugaacuguugucccucaucaacgacaugcccauuacgaacgaucaaaagaaacugaugucaaauaacguccagaucguucgccagcagagcuacaguaucaugugcauuauaaaggaggaaguguuagcguauguagugcaacugccucucuacggcgucaucgacacuccauguuggaaacuucauacaucuccccugugcaccacuaauacaaaggagggcuccaacauuuguuugacccgaacggaucgugggugguacugcgacaaugcaggaagcgugucguucuuuccucaggccgaaaccuguaagguucagucuaacagaguguucugcgauacaaugaacucccuaacucugccaucagaggucaaucucugcaauguggacaucuuuaaccccaaauaugauuguaagauaaugaccaguaaaacagacguaagcuccucuguuauuacuagccugggugcuaucgugucaugcuacggcaagaccaaauguacagccaguaauaagaacagggggaucauuaagaccuucuccaauggaugcgauuaugucagcaacaaaggcguggacacugucucuguggguaauacgcuuuacuguguuaacaagcaagaggggcagucacuguaugugaaaggagaaccuaucauuaacuuuuacgacccauugguauucccgagugaugaguuugacgcaagcauaucccaggucaaugaaaagaucaaccagucucucgcuuucauucggaaaucggaugagcuguuacacaaugugaacgccggcaagagcacaaccaauaucaugaucacuaccauuauaaucguuauuaucgugauucugcuaucccucaucgcggucggccugcuuuuguauugcaaggcccgcucaacacccgugacccugaguaaagaccaacucucugggauaaacaauaucgcauucagcaacugaggacuaguggaagcauuuuccuggcugauuaaaagaaauuacucagcuauggucaucuguuccuguuagaaggcuaugcagcauauuauauacuaugcgcauguuaugaaaugcauaauaaaaaauuuuaaaaaaucuaaaagaucuaaaaaaaaaaaaaaaaaaaaaaaaaaaaaaaaaaaaaaaaaaaaaaaaaaaaaaaaaaaaaaaaugcaucccccccccccccccccccccccccccccccaaaggcucuuuucagagccaccagaauu

SEQ ID NO: 1793 - RNA, 1960 nt, Artificial Sequence
  mRNA product Design d-4 comprising derived and/or modified sequence from HRSV(A2)__F_DSCav1_mut1 (opt4)
gggagagucccgcagucggcguccagcggcucugcuuguucgugugugugucguugcaggccuuauucaagcuuaccauggagcugcugauccugaaggccaacgccaucaccaccauccugaccgccgugaccuucugcuucgccagcggccagaacaucaccgaggaguucuaccagagcaccugcagcgccgugagcaagggcuaccugggcgcccugagaaccggcugguacaccagcgugaucaccaucgagcugagcaacaucaaggagaacaagugcaacggcaccgacgccaaggugaagcugaucaagcaggagcuggacaaguacaagaacgccgugaccgagcugcagcugcugaugcagagcacccccgccaccggcagcggcagcgccaucugcagcggcguggccgugugcaaggugcugcaccuggagggcgaggugaacaagaucaagagcgcccugcugagcaccaacaaggccguggugagccugagcaacggcgugagcgugcugaccuucaaggugcuggaccugaagaacuacaucgacaagcagcugcugcccauccugaacaagcagagcugcagcauccccaacaucgagaccgugaucgaguuccagcagaagaacaacagacugcuggagaucaccagagaguucagcgugaacgccggcgugaccacccccgugagcaccuacaugcugaccaacagcgagcugcugagccugaucaacgacaugcccaucaccaacgaccagaagaagcugaugagcaacaacgugcagaucgugagacagcagagcuacagcaucaugugcaucaucaaggaggaggugcuggccuacguggugcagcugccccuguacggcgugaucgacacccccugcuggaagcugcacaccagcccccugugcaccaccaacaccaaggagggcagcaacaucugccugaccagaaccgacagaggcugguacugcgacaacgccggcagcgugagcuucuucccccaggccgagaccugcaaggugcagagcaacagaguguucugcgacaccaugaacagccugacccugcccagcgaggugaaccugugcaacguggacaucuucaaccccaaguacgacugcaagaucaugaccagcaagaccgacgugagcagcagcgugaucaccagccugggcgccaucgugagcugcuacggcaagaccaagugcaccgccagcaacaagaacagaggcaucaucaagaccuucagcaacggcugcgacuacgugagcaacaagggcguggacaccgugagcgugggcaacacccuguacugcgugaacaagcaggagggccagagccuguacgugaagggcgagcccaucaucaacuucuacgacccccugguguuccccagcgacgaguucgacgccagcaucagccaggugaacgagaagaucaaccagagccuggccuucaucagaaagagcgacgagcugcugcacaacgugaacgccggcaagagcaccaccaacaucaugaucaccaccaucaucaucgugaucaucgugauccugcugagccugaucgccgugggccugcugcuguacugcaaggccagaagcacccccgugacccugagcaaggaccagcugagcggcaucaacaacaucgccuucagcaacugaggacuaguggaagcauuuuccuggcugauuaaaagaaauuacucagcuauggucaucuguuccuguuagaaggcuaugcagcauauuauauacuaugcgcauguuaugaaaugcauaauaaaaaauuuuaaaaaaucuaaaagaucuaaaaaaaaaaaaaaaaaaaaaaaaaaaaaaaaaaaaaaaaaaaaaaaaaaaaaaaaaaaaaaaaugcaucccccccccccccccccccccccccccccccaaaggcucuuuucagagccaccagaauu

SEQ ID NO: 1794 - RNA, 1960 nt, Artificial Sequence
  mRNA product Design d-4 comprising derived and/or modified sequence from HRSV(A2)__F_DSCav1_mut1 (opt5)
gggagagucccgcagucggcguccagcggcucugcuuguucgugugugugucguugcaggccuuauucaagcuuaccauggagcugcucauccugaaggccaacgcuauuaccacaauccuuacggccgugaccuucugcuuugcgagcggccagaauauuacagaagaguucuaccaauccaccuguucugcugucagcaaaggguaucugggagcccucagaacaggcugguacaccuccguuaucacaauugaacugucuaacaucaaggagaauaaaugcaacgggaccgacgccaaggugaaacuuaucaagcaggaacuggauaaguauaaaaaugcugugacggagcuccagcugcugaugcagagcacccccgccacaggauccggcucugcuauuuguagcggggucgccgugugcaagguucuccaccuggagggagaagugaacaaaaucaaguccgcgcuucugagcaccaauaaagccgucgugucucucuccaacggcguuagcgugcugacauuuaagguccuugaccugaagaauuacauugauaaacaacuccugccuauccugaacaagcagucuuguuccauuccgaauaucgagaccgugauugaguuccagcagaaaaacaaucggcuccuggaaaucacgcgcgaguuuagcgugaacgcuggcgucacaacccccguuucuacauauaugcuuaccaauuccgaacugcucagccugaucaacgacaugccuauuaccaacgaucaaaagaaacuuauguccaauaacgugcagaucgugagacagcagucuuacagcauuaugugcaucauuaaggaggaaguccuggccuaugugguucaacucccccuguacggggugaucgacacaccuuguuggaaacugcauacgagcccccucugcaccacaaauaccaaggagggauccaacaucugucugacacggaccgaucgcggcugguacugcgacaaugcugggucugucuccuucuuuccucaggccgaaacguguaaggugcagagcaacagaguuuucugcgauacaaugaacucucuuacccugccgagcgaggugaaucucugcaaugucgacauuuuuaaccccaaauaugauuguaagaucaugaccuccaaaacagacgugucuagcuccgucauuaccagccugggagcgaucgugucuugcuacggcaagacaaaauguacggccuccaauaagaaccgggggauuaucaagaccuucagcaauggaugcgauuauguuucuaacaaaggcguggacacagucuccgugggcaauacccuuuacuguguuaacaagcaagaggggcagagccuguaugugaaaggagaaccuaucauuaacuuuuacgacccccucgucuucccuuccgaugaguuugacgcuucuaucagccaggugaaugaaaagauuaaccagucccuggccuucauccgcaaaucugaugagcugcuccacaaugugaacgcuggcaagagcacaaccaauauuaugaucacgaccauuaucaucguuauuaucgucauucugcuuucccugaucgccguggggcuccugcuguauugcaaggccagaagcacacccgugacccuuucuaaagaccaacucuccggaauuaacaauaucgcuuucagcaacugaggacuaguggaagcauuuuccuggcugauuaaaagaaauuacucagcuauggucaucuguuccuguuagaaggcuaugcagcauauuauauacuaugcgcauguuaugaaaugcauaauaaaaaauuuuaaaaaaucuaaaagaucuaaaaaaaaaaaaaaaaaaaaaaaaaaaaaaaaaaaaaaaaaaaaaaaaaaaaaaaaaaaaaaaaugcaucccccccccccccccccccccccccccccccaaaggcucuuuucagagccaccagaauu

SEQ ID NO: 1795 - RNA, 1960 nt, Artificial Sequence
  mRNA product Design d-4 comprising derived and/or modified sequence from HRSV(A2)__F_DSCav1_mut1 (opt6)
gggagagucccgcagucggcguccagcggcucugcuuguucgugugugugucguugcaggccuuauucaagcuuaccauggaacuauuaauacuaaaagcaaacgcuauaacaacaauacuaacagcagucacauucugcuuugcaucaggccaaaacaucacagaagaauuuuaccaaucaacaugcuccgccguaucgaaaggauaccuaggcgcauuaagaaccggaugguauacaucagucauaacaauugaacuaucuaacauaaaagaaaacaaauguaacggcacagaugccaaaguaaaacucaucaaacaagaauuagauaaauacaaaaacgcagucacugaacuacaacucuuaaugcaaucaacaccugcaacaggaucaggaucagcaauaugcucaggaguagccguauguaaaguacuacaccuagaaggagaagucaacaaaauaaaaucagcccuccuaaguacaaacaaagcugucguaucacuauccaaugguguuucaguacuaacuuucaaaguucuagaccuaaaaaacuacauagacaaacaacuacuaccaauacuaaauaaacaaaguuguucuauacccaacauagaaaccgucauagaauuucaacaaaaaaauaauagacuccuagaaauaacaagagaauuuucaguuaacgcagguguaacaaccccaguauccaccuauaugcuaacaaauucagaauuacuuucccuaaucaacgacaugcccauaacaaaugaccaaaaaaaauuaaugucaaacaacguccaaauaguucgucaacaaucauauucaauaaugugcauaauaaaagaagaagucuuagccuacguaguacaacuuccccuuuauggaguuaucgacacacccugcuggaaacuccacacuucaccacuauguacuacaaacacaaaagaaggauccaacaucugccucacaagaaccgaucgaggaugguacugugauaacgccggauccgucucauucuucccacaagcagaaacaugcaaaguacaaucaaacagaguauuuugcgacacaaugaacucccucacauuaccuucugaaguaaaccuauguaauguagacauauucaaccccaaauacgauugcaaaauaaugacaucaaagacagauguaucaucaagugucaucacaucccuaggagcaauugucucauguuaugguaaaacaaaaugcaccgcaucaaauaaaaacagaggcauaauaaaaaccuucucaaacgguugugacuacguauccaauaaaggcgucgacacaguaucaguagguaacacauuauauuguguaaacaaacaagaaggacagucccuauauguaaaaggagaaccaauaaucaacuucuacgacccacuuguuuucccuucugaugaauuugacgcaaguauaucacaaguaaaugaaaaaaucaaucaaucacuagccuuuauaagaaaaucagaugaauuauuacacaacguaaacgccggaaaaucaacaaccaacauaaugauaaccacaauaauaaucgucauaauagucauccuacuaucacucauagcaguuggacuccuacuauacugcaaagcacgaucaacaccaguaacauuauccaaagaccaacuaagugguaucaauaacaucgccuuuucaaacugaggacuaguggaagcauuuuccuggcugauuaaaagaaauuacucagcuauggucaucuguuccuguuagaaggcuaugcagcauauuauauacuaugcgcauguuaugaaaugcauaauaaaaaauuuuaaaaaaucuaaaagaucuaaaaaaaaaaaaaaaaaaaaaaaaaaaaaaaaaaaaaaaaaaaaaaaaaaaaaaaaaaaaaaaaugcaucccccccccccccccccccccccccccccccaaaggcucuuuucagagccaccagaauu

SEQ ID NO: 1796 - RNA, 1960 nt, Artificial Sequence
  mRNA product Design d-4 comprising derived and/or modified sequence from HRSV(A2)__F_DSCav1_mut1 (opt11)
gggagagucccgcagucggcguccagcggcucugcuuguucgugugugugucguugcaggccuuauucaagcuuaccauggaacuccuaauccucaaagccaacgcaaucaccacaauccucacugccgucaccuucugcuucgccuccggccaaaacauaacagaagaauuuuaccaaucaaccuguucagcggucuccaaaggcuaccucggcgcccuccgcaccggcugguacaccuccgugaucaccauagaacucuccaacaucaaggaaaacaaaugcaacggcaccgacgcgaaggucaaacuuauuaaacaagaacucgacaaauacaaaaacgcagucaccgaacuacaacuccuaaugcaguccacgccagccaccggcucuggcucagccauaugcuccgguguggccguaugcaaaguccuacaccucgaaggagaagucaacaaaauaaaauccgcccuacuguccacaaacaaggccguagucucccucucaaacggcgucucaguacucaccuucaaaguccuagaccucaagaacuacaucgacaaacaacuccuacccauacuaaacaaacaauccugcucaauccccaacaucgaaaccguaauagaauuucaacaaaaaaacaacagacuccuggagaucacccgggaauuuuccguaaacgccggagucacaacacccgucucaaccuacaugcuaacgaacucagagcuccucucacuuaucaacgacaugcccauaacaaacgaccaaaaaaaacucauguccaacaacgugcaaaucguccgacaacaauccuacuccaucaugugcaucauuaaagaagaaguccucgcauacguaguccagcucccccucuacggcgucauagacacccccugcuggaaacuacacacaucaccccucugcacaacaaacaccaaagaaggcuccaacaucugccucacccgcaccgaccgaggcugguacugcgauaacgccggcagcgucuccuucuucccccaagcagaaaccugcaagguccaauccaaccgaguuuucugcgacacuaugaacucgcucacccuccccuccgaagucaaccucugcaacgucgacauuuucaaccccaaauacgacugcaaaaucaugaccuccaagaccgacguauccuccuccgucaucaccucccuaggcgccauaguaaguugcuacggcaaaaccaagugcacagcaagcaacaaaaaccgaggaauaaucaaaaccuucuccaacggcugcgacuacguauccaacaagggcgucgacaccguauccguagggaacacccuuuacugcguaaacaaacaagaaggacaaucacucuacguaaaaggcgaacccauaaucaacuucuacgacccccucguauuucccuccgacgaauuugacgcaucaaucucacaggucaacgaaaaaauaaaccaaucgcuagcauucaucagaaaaucagacgaacuccuacacaacgucaacgcaggcaagagcaccaccaacaucaugaucaccaccaucaucaucgucauaaucgucauacuacucucacucauagcagucggccuccuccuauacuguaaagcaaggucgaccccagucacccuauccaaagaccaacuaagcggcaucaacaacaucgcguucucaaacuaaggacuaguggaagcauuuuccuggcugauuaaaagaaauuacucagcuauggucaucuguuccuguuagaaggcuaugcagcauauuauauacuaugcgcauguuaugaaaugcauaauaaaaaauuuuaaaaaaucuaaaagaucuaaaaaaaaaaaaaaaaaaaaaaaaaaaaaaaaaaaaaaaaaaaaaaaaaaaaaaaaaaaaaaaaugcaucccccccccccccccccccccccccccccccaaaggcucuuuucagagccaccagaauu

SEQ ID NO: 1797 - RNA, 2057 nt, Artificial Sequence
  mRNA product Design d-5 comprising derived and/or modified sequence from HRSV(A2)__F_DSCav1_mut1 (opt1)
gggagagggcgcuuggcuugcaaggacccugagcugcggcauugaagcacacccaacccaacucgacugaagucagccucacugaaccggaucugagaaucuucucucucugggcuugccagggcucuccgaaccuagcuagcauccucuucaauuccaacuagaaagcuuaccauggagcugcucauccugaaggccaacgccaucaccaccauccugacggcggugaccuucugcuucgccagcggccagaacaucaccgaggaguucuaccaguccacgugcagcgccgucuccaagggguaccucggcgcccugcggaccggcugguacaccuccgugaucaccaucgagcugagcaacaucaaggagaacaagugcaacgggaccgacgccaaggugaagcucaucaagcaggagcuggacaaguacaagaacgcggucacggagcugcagcuccugaugcaguccaccccggcaaccggcuccggcuccgccaucugcagcggcgucgccgugugcaaggugcugcaccucgagggggaggucaacaagaucaagagcgcccugcuguccaccaacaaggccguggugagccucuccaacggcgucagcgugcugaccuucaaggugcuggaccucaagaacuacaucgacaagcagcugcugcccauccugaacaagcagagcugcuccauccccaacaucgagacggugaucgaguuccagcagaagaacaaccggcuccuggagaucacccgcgaguucagcgugaacgccggggucaccacccccguguccacguacaugcugaccaacagcgagcuccugucccugaucaacgacaugccgaucaccaacgaccagaagaagcucaugagcaacaacgugcagaucguccggcagcaguccuacagcaucaugugcaucaucaaggaggaggugcuggcguacgugguccagcugccccucuacggcgugaucgacacccccugcuggaagcugcacacgagcccccugugcaccaccaacaccaaggagggguccaacaucugccucacgcgcaccgaccggggcugguacugcgacaacgccggcagcgucuccuucuucccgcaggccgagaccugcaaggugcagagcaaccgcguguucugcgacaccaugaacucccugacgcugcccagcgagguaaaccucugcaacgucgacaucuucaaccccaaguacgacugcaagaucaugaccuccaagaccgacgugagcuccagcgugaucaccucccugggggccaucgucagcugcuacggcaagacgaagugcaccgccagcaacaagaaccgggggaucaucaagaccuucuccaacggcugcgacuacgugagcaacaagggcguggacaccguguccgucgggaacacccuguacugcgugaacaagcaggagggccagagccucuacgugaagggggagcccaucaucaacuucuacgacccgcuggucuuccccuccgacgaguucgacgcgagcaucucccaggugaacgagaagaucaaccagagccuggccuucauccgcaaguccgacgagcugcuccacaacgugaacgccggcaagagcacgaccaacaucaugaucaccaccaucaucaucgucaucaucgugauccugcugucccucaucgccguggggcugcugcucuacugcaaggcccggagcacgcccgucacccuguccaaggaccagcugagcggcaucaacaacaucgcguucuccaacugaggacuaguggaagcauuuuccuggcugauuaaaagaaauuacucagcuauggucaucuguuccuguuagaaggcuaugcagcauauuauauacuaugcgcauguuaugaaaugcauaauaaaaaauuuuaaaaaaucuaaaagaucuaaaaaaaaaaaaaaaaaaaaaaaaaaaaaaaaaaaaaaaaaaaaaaaaaaaaaaaaaaaaaaaaugcaucccccccccccccccccccccccccccccccaaaggcucuuuucagagccaccagaauu

SEQ ID NO: 1798 - RNA, 2057 nt, Artificial Sequence
  mRNA product Design d-5 comprising derived and/or modified sequence from HRSV(A2)__F_DSCav1_mut1 (opt1)
gggagagggcgcuuggcuugcaaggacccugagcugcggcauugaagcacacccaacccaacucgacugaagucagccucacugaaccggaucugagaaucuucucucucugggcuugccagggcucuccgaaccuagcuagcauccucuucaauuccaacuagaaagcuuaccauggagcugcucauccugaaggccaacgccaucaccaccauccugacggcggugaccuucugcuucgccagcggccagaacaucaccgaggaguucuaccaguccacgugcagcgccgucuccaagggguaccucggcgcccugcgcaccgggugguacaccagcgugaucaccaucgagcuguccaacaucaaggagaacaagugcaacggcaccgacgccaaggugaagcucaucaagcaggagcuggacaaguacaagaacgcggucacggagcugcagcuccugaugcagagcacccccgccaccggguccggcagcgccaucugcuccggcguggccgugugcaagguccugcaccucgagggggaggugaacaagaucaagagcgcgcugcuguccaccaacaaggccguggucagccucuccaacggcgugagcgugcugacguucaagguccuggaccucaagaacuacaucgacaagcagcugcugccgauccucaacaagcaguccugcagcauccccaacaucgagaccgugaucgaguuccagcagaagaacaaccggcugcuggagaucacccgcgaguucuccgugaacgccggggucaccacgcccgugagcaccuacaugcucaccaacuccgagcugcugagccucaucaacgacaugcccaucaccaacgaccagaagaagcugaugagcaacaacgugcagaucguccggcagcaguccuacagcaucaugugcaucaucaaggaggaggugcuggccuacgugguccagcucccgcuguacggcgugaucgacacgcccugcuggaagcugcacaccagcccccucugcaccaccaacacgaaggagggguccaacaucugccugacccgcaccgaccggggcugguacugcgacaacgccggcuccgugagcuucuucccccaggcggagaccugcaagguccaguccaaccgcguguucugcgacacgaugaacagccugacccucccguccgaggucaaccugugcaacguggacaucuucaaccccaaguacgacugcaagaucaugaccagcaagaccgacguguccagcuccgucaucacgagccugggggccaucguguccugcuacggcaagaccaagugcaccgccagcaacaagaaccgggggaucaucaagaccuucuccaacggcugcgacuacgugagcaacaagggcgucgacacgguguccguggggaacacccucuacugcgucaacaagcaggagggccagagccuguacgugaagggggagcccaucaucaacuucuacgacccccugguguucccgagcgacgaguucgacgccuccaucagccaggucaacgagaagaucaaccagucccucgccuucauccgcaagagcgacgagcugcugcacaacgugaacgcgggcaaguccaccaccaacaucaugaucaccacgaucaucaucgugaucaucgucauccuccugagccugaucgccguggggcuccugcuguacugcaaggcccgguccacccccgugacccugagcaaggaccagcucuccggcaucaacaacaucgccuucagcaacugaggacuaguggaagcauuuuccuggcugauuaaaagaaauuacucagcuauggucaucuguuccuguuagaaggcuaugcagcauauuauauacuaugcgcauguuaugaaaugcauaauaaaaaauuuuaaaaaaucuaaaagaucuaaaaaaaaaaaaaaaaaaaaaaaaaaaaaaaaaaaaaaaaaaaaaaaaaaaaaaaaaaaaaaaaugcaucccccccccccccccccccccccccccccccaaaggcucuuuucagagccaccagaauu

SEQ ID NO: 1799 - RNA, 2057 nt, Artificial Sequence
  mRNA product Design d-5 comprising derived and/or modified sequence from HRSV(A2)__F_DSCav1_mut1 (opt2)
gggagagggcgcuuggcuugcaaggacccugagcugcggcauugaagcacacccaacccaacucgacugaagucagccucacugaaccggaucugagaaucuucucucucugggcuugccagggcucuccgaaccuagcuagcauccucuucaauuccaacuagaaagcuuaccauggagcuccucauccucaaggccaacgccaucaccaccauccucaccgccgucaccuucugcuucgccuccggccagaacaucaccgaggaguucuaccaguccaccugcuccgccgucuccaagggcuaccucggcgcccuccgcaccggcugguacaccuccgucaucaccaucgagcucuccaacaucaaggagaacaagugcaacggcaccgacgccaaggucaagcucaucaagcaggagcucgacaaguacaagaacgccgucaccgagcuccagcuccucaugcaguccacccccgccaccggcuccggcuccgccaucugcuccggcgucgccgucugcaagguccuccaccucgagggcgaggucaacaagaucaaguccgcccuccucuccaccaacaaggccgucgucucccucuccaacggcgucuccguccucaccuucaagguccucgaccucaagaacuacaucgacaagcagcuccuccccauccucaacaagcaguccugcuccauccccaacaucgagaccgucaucgaguuccagcagaagaacaaccgccuccucgagaucacccgcgaguucuccgucaacgccggcgucaccacccccgucuccaccuacaugcucaccaacuccgagcuccucucccucaucaacgacaugcccaucaccaacgaccagaagaagcucauguccaacaacguccagaucguccgccagcaguccuacuccaucaugugcaucaucaaggaggagguccucgccuacgucguccagcucccccucuacggcgucaucgacacccccugcuggaagcuccacaccuccccccucugcaccaccaacaccaaggagggcuccaacaucugccucacccgcaccgaccgcggcugguacugcgacaacgccggcuccgucuccuucuucccccaggccgagaccugcaagguccaguccaaccgcgucuucugcgacaccaugaacucccucacccuccccuccgaggucaaccucugcaacgucgacaucuucaaccccaaguacgacugcaagaucaugaccuccaagaccgacgucuccuccuccgucaucaccucccucggcgccaucgucuccugcuacggcaagaccaagugcaccgccuccaacaagaaccgcggcaucaucaagaccuucuccaacggcugcgacuacgucuccaacaagggcgucgacaccgucuccgucggcaacacccucuacugcgucaacaagcaggagggccagucccucuacgucaagggcgagcccaucaucaacuucuacgacccccucgucuuccccuccgacgaguucgacgccuccaucucccaggucaacgagaagaucaaccagucccucgccuucauccgcaaguccgacgagcuccuccacaacgucaacgccggcaaguccaccaccaacaucaugaucaccaccaucaucaucgucaucaucgucauccuccucucccucaucgccgucggccuccuccucuacugcaaggcccgcuccacccccgucacccucuccaaggaccagcucuccggcaucaacaacaucgccuucuccaacugaggacuaguggaagcauuuuccuggcugauuaaaagaaauuacucagcuauggucaucuguuccuguuagaaggcuaugcagcauauuauauacuaugcgcauguuaugaaaugcauaauaaaaaauuuuaaaaaaucuaaaagaucuaaaaaaaaaaaaaaaaaaaaaaaaaaaaaaaaaaaaaaaaaaaaaaaaaaaaaaaaaaaaaaaaugcaucccccccccccccccccccccccccccccccaaaggcucuuuucagagccaccagaauu

SEQ ID NO: 1800 - RNA, 2057 nt, Artificial Sequence
  mRNA product Design d-5 comprising derived and/or modified sequence from HRSV(A2)__F_DSCav1_mut1 (opt3)
gggagagggcgcuuggcuugcaaggacccugagcugcggcauugaagcacacccaacccaacucgacugaagucagccucacugaaccggaucugagaaucuucucucucugggcuugccagggcucuccgaaccuagcuagcauccucuucaauuccaacuagaaagcuuaccauggagcugcucauccuuaaggccaacgcuauuaccacaauacugacugcagugacguucugcuuugccagcggccagaauaucaccgaagaguucuaccaauccacauguucugcggucucaaaaggguauuugggagcuuuaagaacugguugguacaccaguguuauuacaaucgaacugagcaacauuaaggagaauaaaugcaacggcaccgacgccaaggugaaacuaaucaagcaggaacucgauaaguauaaaaaugcaguaacugagcugcagcuucugaugcaguccacacccgccaccgggucuggaucggcuauauguucaggcguggcagucugcaagguguugcaccucgagggugaaguuaacaaaaucaagagcgcccugcugaguacgaauaaagcuguggucucccucucuaacggggugagcguauuaacuuuuaagguucuggaccuuaagaauuacauugauaaacaauugcugccuauccuaaacaagcaguccuguucaauuccaaauaucgagaccgugauagaguuccagcagaaaaacaauaggcuccuggaaauuacacgggaguuuagugucaacgccggagugacuaccccggugagcacauauaugcuuaccaauucugaacuguugucccucaucaacgacaugcccauuacgaacgaucaaaagaaacugaugucaaauaacguccagaucguucgccagcagagcuacaguaucaugugcauuauaaaggaggaaguguuagcguauguagugcaacugccucucuacggcgucaucgacacuccauguuggaaacuucauacaucuccccugugcaccacuaauacaaaggagggcuccaacauuuguuugacccgaacggaucgugggugguacugcgacaaugcaggaagcgugucguucuuuccucaggccgaaaccuguaagguucagucuaacagaguguucugcgauacaaugaacucccuaacucugccaucagaggucaaucucugcaauguggacaucuuuaaccccaaauaugauuguaagauaaugaccaguaaaacagacguaagcuccucuguuauuacuagccugggugcuaucgugucaugcuacggcaagaccaaauguacagccaguaauaagaacagggggaucauuaagaccuucuccaauggaugcgauuaugucagcaacaaaggcguggacacugucucuguggguaauacgcuuuacuguguuaacaagcaagaggggcagucacuguaugugaaaggagaaccuaucauuaacuuuuacgacccauugguauucccgagugaugaguuugacgcaagcauaucccaggucaaugaaaagaucaaccagucucucgcuuucauucggaaaucggaugagcuguuacacaaugugaacgccggcaagagcacaaccaauaucaugaucacuaccauuauaaucguuauuaucgugauucugcuaucccucaucgcggucggccugcuuuuguauugcaaggcccgcucaacacccgugacccugaguaaagaccaacucucugggauaaacaauaucgcauucagcaacugaggacuaguggaagcauuuuccuggcugauuaaaagaaauuacucagcuauggucaucuguuccuguuagaaggcuaugcagcauauuauauacuaugcgcauguuaugaaaugcauaauaaaaaauuuuaaaaaaucuaaaagaucuaaaaaaaaaaaaaaaaaaaaaaaaaaaaaaaaaaaaaaaaaaaaaaaaaaaaaaaaaaaaaaaaugcaucccccccccccccccccccccccccccccccaaaggcucuuuucagagccaccagaauu

SEQ ID NO: 1801 - RNA, 2057 nt, Artificial Sequence
  mRNA product Design d-5 comprising derived and/or modified sequence from HRSV(A2)__F_DSCav1_mut1 (opt4)
gggagagggcgcuuggcuugcaaggacccugagcugcggcauugaagcacacccaacccaacucgacugaagucagccucacugaaccggaucugagaaucuucucucucugggcuugccagggcucuccgaaccuagcuagcauccucuucaauuccaacuagaaagcuuaccauggagcugcugauccugaaggccaacgccaucaccaccauccugaccgccgugaccuucugcuucgccagcggccagaacaucaccgaggaguucuaccagagcaccugcagcgccgugagcaagggcuaccugggcgcccugagaaccggcugguacaccagcgugaucaccaucgagcugagcaacaucaaggagaacaagugcaacggcaccgacgccaaggugaagcugaucaagcaggagcuggacaaguacaagaacgccgugaccgagcugcagcugcugaugcagagcacccccgccaccggcagcggcagcgccaucugcagcggcguggccgugugcaaggugcugcaccuggagggcgaggugaacaagaucaagagcgcccugcugagcaccaacaaggccguggugagccugagcaacggcgugagcgugcugaccuucaaggugcuggaccugaagaacuacaucgacaagcagcugcugcccauccugaacaagcagagcugcagcauccccaacaucgagaccgugaucgaguuccagcagaagaacaacagacugcuggagaucaccagagaguucagcgugaacgccggcgugaccacccccgugagcaccuacaugcugaccaacagcgagcugcugagccugaucaacgacaugcccaucaccaacgaccagaagaagcugaugagcaacaacgugcagaucgugagacagcagagcuacagcaucaugugcaucaucaaggaggaggugcuggccuacguggugcagcugccccuguacggcgugaucgacacccccugcuggaagcugcacaccagcccccugugcaccaccaacaccaaggagggcagcaacaucugccugaccagaaccgacagaggcugguacugcgacaacgccggcagcgugagcuucuucccccaggccgagaccugcaaggugcagagcaacagaguguucugcgacaccaugaacagccugacccugcccagcgaggugaaccugugcaacguggacaucuucaaccccaaguacgacugcaagaucaugaccagcaagaccgacgugagcagcagcgugaucaccagccugggcgccaucgugagcugcuacggcaagaccaagugcaccgccagcaacaagaacagaggcaucaucaagaccuucagcaacggcugcgacuacgugagcaacaagggcguggacaccgugagcgugggcaacacccuguacugcgugaacaagcaggagggccagagccuguacgugaagggcgagcccaucaucaacuucuacgacccccugguguuccccagcgacgaguucgacgccagcaucagccaggugaacgagaagaucaaccagagccuggccuucaucagaaagagcgacgagcugcugcacaacgugaacgccggcaagagcaccaccaacaucaugaucaccaccaucaucaucgugaucaucgugauccugcugagccugaucgccgugggccugcugcuguacugcaaggccagaagcacccccgugacccugagcaaggaccagcugagcggcaucaacaacaucgccuucagcaacugaggacuaguggaagcauuuuccuggcugauuaaaagaaauuacucagcuauggucaucuguuccuguuagaaggcuaugcagcauauuauauacuaugcgcauguuaugaaaugcauaauaaaaaauuuuaaaaaaucuaaaagaucuaaaaaaaaaaaaaaaaaaaaaaaaaaaaaaaaaaaaaaaaaaaaaaaaaaaaaaaaaaaaaaaaugcaucccccccccccccccccccccccccccccccaaaggcucuuuucagagccaccagaauu

SEQ ID NO: 1802 - RNA, 2057 nt, Artificial Sequence
  mRNA product Design d-5 comprising derived and/or modified sequence from HRSV(A2)__F_DSCav1_mut1 (opt5)
gggagagggcgcuuggcuugcaaggacccugagcugcggcauugaagcacacccaacccaacucgacugaagucagccucacugaaccggaucugagaaucuucucucucugggcuugccagggcucuccgaaccuagcuagcauccucuucaauuccaacuagaaagcuuaccauggagcugcucauccugaaggccaacgcuauuaccacaauccuuacggccgugaccuucugcuuugcgagcggccagaauauuacagaagaguucuaccaauccaccuguucugcugucagcaaaggguaucugggagcccucagaacaggcugguacaccuccguuaucacaauugaacugucuaacaucaaggagaauaaaugcaacgggaccgacgccaaggugaaacuuaucaagcaggaacuggauaaguauaaaaaugcugugacggagcuccagcugcugaugcagagcacccccgccacaggauccggcucugcuauuuguagcggggucgccgugugcaagguucuccaccuggagggagaagugaacaaaaucaaguccgcgcuucugagcaccaauaaagccgucgugucucucuccaacggcguuagcgugcugacauuuaagguccuugaccugaagaauuacauugauaaacaacuccugccuauccugaacaagcagucuuguuccauuccgaauaucgagaccgugauugaguuccagcagaaaaacaaucggcuccuggaaaucacgcgcgaguuuagcgugaacgcuggcgucacaacccccguuucuacauauaugcuuaccaauuccgaacugcucagccugaucaacgacaugccuauuaccaacgaucaaaagaaacuuauguccaauaacgugcagaucgugagacagcagucuuacagcauuaugugcaucauuaaggaggaaguccuggccuaugugguucaacucccccuguacggggugaucgacacaccuuguuggaaacugcauacgagcccccucugcaccacaaauaccaaggagggauccaacaucugucugacacggaccgaucgcggcugguacugcgacaaugcugggucugucuccuucuuuccucaggccgaaacguguaaggugcagagcaacagaguuuucugcgauacaaugaacucucuuacccugccgagcgaggugaaucucugcaaugucgacauuuuuaaccccaaauaugauuguaagaucaugaccuccaaaacagacgugucuagcuccgucauuaccagccugggagcgaucgugucuugcuacggcaagacaaaauguacggccuccaauaagaaccgggggauuaucaagaccuucagcaauggaugcgauuauguuucuaacaaaggcguggacacagucuccgugggcaauacccuuuacuguguuaacaagcaagaggggcagagccuguaugugaaaggagaaccuaucauuaacuuuuacgacccccucgucuucccuuccgaugaguuugacgcuucuaucagccaggugaaugaaaagauuaaccagucccuggccuucauccgcaaaucugaugagcugcuccacaaugugaacgcuggcaagagcacaaccaauauuaugaucacgaccauuaucaucguuauuaucgucauucugcuuucccugaucgccguggggcuccugcuguauugcaaggccagaagcacacccgugacccuuucuaaagaccaacucuccggaauuaacaauaucgcuuucagcaacugaggacuaguggaagcauuuuccuggcugauuaaaagaaauuacucagcuauggucaucuguuccuguuagaaggcuaugcagcauauuauauacuaugcgcauguuaugaaaugcauaauaaaaaauuuuaaaaaaucuaaaagaucuaaaaaaaaaaaaaaaaaaaaaaaaaaaaaaaaaaaaaaaaaaaaaaaaaaaaaaaaaaaaaaaaugcaucccccccccccccccccccccccccccccccaaaggcucuuuucagagccaccagaauu

SEQ ID NO: 1803 - RNA, 2057 nt, Artificial Sequence
  mRNA product Design d-5 comprising derived and/or modified sequence from HRSV(A2)__F_DSCav1_mut1 (opt6)
gggagagggcgcuuggcuugcaaggacccugagcugcggcauugaagcacacccaacccaacucgacugaagucagccucacugaaccggaucugagaaucuucucucucugggcuugccagggcucuccgaaccuagcuagcauccucuucaauuccaacuagaaagcuuaccauggaacuauuaauacuaaaagcaaacgcuauaacaacaauacuaacagcagucacauucugcuuugcaucaggccaaaacaucacagaagaauuuuaccaaucaacaugcuccgccguaucgaaaggauaccuaggcgcauuaagaaccggaugguauacaucagucauaacaauugaacuaucuaacauaaaagaaaacaaauguaacggcacagaugccaaaguaaaacucaucaaacaagaauuagauaaauacaaaaacgcagucacugaacuacaacucuuaaugcaaucaacaccugcaacaggaucaggaucagcaauaugcucaggaguagccguauguaaaguacuacaccuagaaggagaagucaacaaaauaaaaucagcccuccuaaguacaaacaaagcugucguaucacuauccaaugguguuucaguacuaacuuucaaaguucuagaccuaaaaaacuacauagacaaacaacuacuaccaauacuaaauaaacaaaguuguucuauacccaacauagaaaccgucauagaauuucaacaaaaaaauaauagacuccuagaaauaacaagagaauuuucaguuaacgcagguguaacaaccccaguauccaccuauaugcuaacaaauucagaauuacuuucccuaaucaacgacaugcccauaacaaaugaccaaaaaaaauuaaugucaaacaacguccaaauaguucgucaacaaucauauucaauaaugugcauaauaaaagaagaagucuuagccuacguaguacaacuuccccuuuauggaguuaucgacacacccugcuggaaacuccacacuucaccacuauguacuacaaacacaaaagaaggauccaacaucugccucacaagaaccgaucgaggaugguacugugauaacgccggauccgucucauucuucccacaagcagaaacaugcaaaguacaaucaaacagaguauuuugcgacacaaugaacucccucacauuaccuucugaaguaaaccuauguaauguagacauauucaaccccaaauacgauugcaaaauaaugacaucaaagacagauguaucaucaagugucaucacaucccuaggagcaauugucucauguuaugguaaaacaaaaugcaccgcaucaaauaaaaacagaggcauaauaaaaaccuucucaaacgguugugacuacguauccaauaaaggcgucgacacaguaucaguagguaacacauuauauuguguaaacaaacaagaaggacagucccuauauguaaaaggagaaccaauaaucaacuucuacgacccacuuguuuucccuucugaugaauuugacgcaaguauaucacaaguaaaugaaaaaaucaaucaaucacuagccuuuauaagaaaaucagaugaauuauuacacaacguaaacgccggaaaaucaacaaccaacauaaugauaaccacaauaauaaucgucauaauagucauccuacuaucacucauagcaguuggacuccuacuauacugcaaagcacgaucaacaccaguaacauuauccaaagaccaacuaagugguaucaauaacaucgccuuuucaaacugaggacuaguggaagcauuuuccuggcugauuaaaagaaauuacucagcuauggucaucuguuccuguuagaaggcuaugcagcauauuauauacuaugcgcauguuaugaaaugcauaauaaaaaauuuuaaaaaaucuaaaagaucuaaaaaaaaaaaaaaaaaaaaaaaaaaaaaaaaaaaaaaaaaaaaaaaaaaaaaaaaaaaaaaaaugcaucccccccccccccccccccccccccccccccaaaggcucuuuucagagccaccagaauu

SEQ ID NO: 1804 - RNA, 2057 nt, Artificial Sequence
  mRNA product Design d-5 comprising derived and/or modified sequence from HRSV(A2)__F_DSCav1_mut1 (opt11)
gggagagggcgcuuggcuugcaaggacccugagcugcggcauugaagcacacccaacccaacucgacugaagucagccucacugaaccggaucugagaaucuucucucucugggcuugccagggcucuccgaaccuagcuagcauccucuucaauuccaacuagaaagcuuaccauggaacuccuaauccucaaagccaacgcaaucaccacaauccucacugccgucaccuucugcuucgccuccggccaaaacauaacagaagaauuuuaccaaucaaccuguucagcggucuccaaaggcuaccucggcgcccuccgcaccggcugguacaccuccgugaucaccauagaacucuccaacaucaaggaaaacaaaugcaacggcaccgacgcgaaggucaaacuuauuaaacaagaacucgacaaauacaaaaacgcagucaccgaacuacaacuccuaaugcaguccacgccagccaccggcucuggcucagccauaugcuccgguguggccguaugcaaaguccuacaccucgaaggagaagucaacaaaauaaaauccgcccuacuguccacaaacaaggccguagucucccucucaaacggcgucucaguacucaccuucaaaguccuagaccucaagaacuacaucgacaaacaacuccuacccauacuaaacaaacaauccugcucaauccccaacaucgaaaccguaauagaauuucaacaaaaaaacaacagacuccuggagaucacccgggaauuuuccguaaacgccggagucacaacacccgucucaaccuacaugcuaacgaacucagagcuccucucacuuaucaacgacaugcccauaacaaacgaccaaaaaaaacucauguccaacaacgugcaaaucguccgacaacaauccuacuccaucaugugcaucauuaaagaagaaguccucgcauacguaguccagcucccccucuacggcgucauagacacccccugcuggaaacuacacacaucaccccucugcacaacaaacaccaaagaaggcuccaacaucugccucacccgcaccgaccgaggcugguacugcgauaacgccggcagcgucuccuucuucccccaagcagaaaccugcaagguccaauccaaccgaguuuucugcgacacuaugaacucgcucacccuccccuccgaagucaaccucugcaacgucgacauuuucaaccccaaauacgacugcaaaaucaugaccuccaagaccgacguauccuccuccgucaucaccucccuaggcgccauaguaaguugcuacggcaaaaccaagugcacagcaagcaacaaaaaccgaggaauaaucaaaaccuucuccaacggcugcgacuacguauccaacaagggcgucgacaccguauccguagggaacacccuuuacugcguaaacaaacaagaaggacaaucacucuacguaaaaggcgaacccauaaucaacuucuacgacccccucguauuucccuccgacgaauuugacgcaucaaucucacaggucaacgaaaaaauaaaccaaucgcuagcauucaucagaaaaucagacgaacuccuacacaacgucaacgcaggcaagagcaccaccaacaucaugaucaccaccaucaucaucgucauaaucgucauacuacucucacucauagcagucggccuccuccuauacuguaaagcaaggucgaccccagucacccuauccaaagaccaacuaagcggcaucaacaacaucgcguucucaaacuaaggacuaguggaagcauuuuccuggcugauuaaaagaaauuacucagcuauggucaucuguuccuguuagaaggcuaugcagcauauuauauacuaugcgcauguuaugaaaugcauaauaaaaaauuuuaaaaaaucuaaaagaucuaaaaaaaaaaaaaaaaaaaaaaaaaaaaaaaaaaaaaaaaaaaaaaaaaaaaaaaaaaaaaaaaugcaucccccccccccccccccccccccccccccccaaaggcucuuuucagagccaccagaauu

SEQ ID NO: 1805 - RNA, 1937 nt, Artificial Sequence
  mRNA product Design e-1 comprising derived and/or modified sequence from HRSV(A2)__F_DSCav1_mut1 (opt1)
gggagaauauaagcguuggcggagcgucgguuguagcacucugcgcgcccgcucuucugcugcuguuugucuacuuccuccugcuuccccgccgccgccgccgccaucaagcuuaccauggagcugcucauccugaaggccaacgccaucaccaccauccugacggcggugaccuucugcuucgccagcggccagaacaucaccgaggaguucuaccaguccacgugcagcgccgucuccaagggguaccucggcgcccugcggaccggcugguacaccuccgugaucaccaucgagcugagcaacaucaaggagaacaagugcaacgggaccgacgccaaggugaagcucaucaagcaggagcuggacaaguacaagaacgcggucacggagcugcagcuccugaugcaguccaccccggcaaccggcuccggcuccgccaucugcagcggcgucgccgugugcaaggugcugcaccucgagggggaggucaacaagaucaagagcgcccugcuguccaccaacaaggccguggugagccucuccaacggcgucagcgugcugaccuucaaggugcuggaccucaagaacuacaucgacaagcagcugcugcccauccugaacaagcagagcugcuccauccccaacaucgagacggugaucgaguuccagcagaagaacaaccggcuccuggagaucacccgcgaguucagcgugaacgccggggucaccacccccguguccacguacaugcugaccaacagcgagcuccugucccugaucaacgacaugccgaucaccaacgaccagaagaagcucaugagcaacaacgugcagaucguccggcagcaguccuacagcaucaugugcaucaucaaggaggaggugcuggcguacgugguccagcugccccucuacggcgugaucgacacccccugcuggaagcugcacacgagcccccugugcaccaccaacaccaaggagggguccaacaucugccucacgcgcaccgaccggggcugguacugcgacaacgccggcagcgucuccuucuucccgcaggccgagaccugcaaggugcagagcaaccgcguguucugcgacaccaugaacucccugacgcugcccagcgagguaaaccucugcaacgucgacaucuucaaccccaaguacgacugcaagaucaugaccuccaagaccgacgugagcuccagcgugaucaccucccugggggccaucgucagcugcuacggcaagacgaagugcaccgccagcaacaagaaccgggggaucaucaagaccuucuccaacggcugcgacuacgugagcaacaagggcguggacaccguguccgucgggaacacccuguacugcgugaacaagcaggagggccagagccucuacgugaagggggagcccaucaucaacuucuacgacccgcuggucuuccccuccgacgaguucgacgcgagcaucucccaggugaacgagaagaucaaccagagccuggccuucauccgcaaguccgacgagcugcuccacaacgugaacgccggcaagagcacgaccaacaucaugaucaccaccaucaucaucgucaucaucgugauccugcugucccucaucgccguggggcugcugcucuacugcaaggcccggagcacgcccgucacccuguccaaggaccagcugagcggcaucaacaacaucgcguucuccaacugaggacuaguguccaccugucccuccugggcugcuggauugucucguuuuccugccaaauaaacaggaucagcgcuuuacagaucuaaaaaaaaaaaaaaaaaaaaaaaaaaaaaaaaaaaaaaaaaaaaaaaaaaaaaaaaaaaaaaaaugcaucccccccccccccccccccccccccccccccaaaggcucuuuucagagccaccagaauu

SEQ ID NO: 1806 - RNA, 1937 nt, Artificial Sequence
  mRNA product Design e-1 comprising derived and/or modified sequence from HRSV(A2)__F_DSCav1_mut1 (opt1)
gggagaauauaagcguuggcggagcgucgguuguagcacucugcgcgcccgcucuucugcugcuguuugucuacuuccuccugcuuccccgccgccgccgccgccaucaagcuuaccauggagcugcucauccugaaggccaacgccaucaccaccauccugacggcggugaccuucugcuucgccagcggccagaacaucaccgaggaguucuaccaguccacgugcagcgccgucuccaagggguaccucggcgcccugcgcaccgggugguacaccagcgugaucaccaucgagcuguccaacaucaaggagaacaagugcaacggcaccgacgccaaggugaagcucaucaagcaggagcuggacaaguacaagaacgcggucacggagcugcagcuccugaugcagagcacccccgccaccggguccggcagcgccaucugcuccggcguggccgugugcaagguccugcaccucgagggggaggugaacaagaucaagagcgcgcugcuguccaccaacaaggccguggucagccucuccaacggcgugagcgugcugacguucaagguccuggaccucaagaacuacaucgacaagcagcugcugccgauccucaacaagcaguccugcagcauccccaacaucgagaccgugaucgaguuccagcagaagaacaaccggcugcuggagaucacccgcgaguucuccgugaacgccggggucaccacgcccgugagcaccuacaugcucaccaacuccgagcugcugagccucaucaacgacaugcccaucaccaacgaccagaagaagcugaugagcaacaacgugcagaucguccggcagcaguccuacagcaucaugugcaucaucaaggaggaggugcuggccuacgugguccagcucccgcuguacggcgugaucgacacgcccugcuggaagcugcacaccagcccccucugcaccaccaacacgaaggagggguccaacaucugccugacccgcaccgaccggggcugguacugcgacaacgccggcuccgugagcuucuucccccaggcggagaccugcaagguccaguccaaccgcguguucugcgacacgaugaacagccugacccucccguccgaggucaaccugugcaacguggacaucuucaaccccaaguacgacugcaagaucaugaccagcaagaccgacguguccagcuccgucaucacgagccugggggccaucguguccugcuacggcaagaccaagugcaccgccagcaacaagaaccgggggaucaucaagaccuucuccaacggcugcgacuacgugagcaacaagggcgucgacacgguguccguggggaacacccucuacugcgucaacaagcaggagggccagagccuguacgugaagggggagcccaucaucaacuucuacgacccccugguguucccgagcgacgaguucgacgccuccaucagccaggucaacgagaagaucaaccagucccucgccuucauccgcaagagcgacgagcugcugcacaacgugaacgcgggcaaguccaccaccaacaucaugaucaccacgaucaucaucgugaucaucgucauccuccugagccugaucgccguggggcuccugcuguacugcaaggcccgguccacccccgugacccugagcaaggaccagcucuccggcaucaacaacaucgccuucagcaacugaggacuaguguccaccugucccuccugggcugcuggauugucucguuuuccugccaaauaaacaggaucagcgcuuuacagaucuaaaaaaaaaaaaaaaaaaaaaaaaaaaaaaaaaaaaaaaaaaaaaaaaaaaaaaaaaaaaaaaaugcaucccccccccccccccccccccccccccccccaaaggcucuuuucagagccaccagaauu

SEQ ID NO: 1807 - RNA, 1937 nt, Artificial Sequence
  mRNA product Design e-1 comprising derived and/or modified sequence from HRSV(A2)__F_DSCav1_mut1 (opt2)
gggagaauauaagcguuggcggagcgucgguuguagcacucugcgcgcccgcucuucugcugcuguuugucuacuuccuccugcuuccccgccgccgccgccgccaucaagcuuaccauggagcuccucauccucaaggccaacgccaucaccaccauccucaccgccgucaccuucugcuucgccuccggccagaacaucaccgaggaguucuaccaguccaccugcuccgccgucuccaagggcuaccucggcgcccuccgcaccggcugguacaccuccgucaucaccaucgagcucuccaacaucaaggagaacaagugcaacggcaccgacgccaaggucaagcucaucaagcaggagcucgacaaguacaagaacgccgucaccgagcuccagcuccucaugcaguccacccccgccaccggcuccggcuccgccaucugcuccggcgucgccgucugcaagguccuccaccucgagggcgaggucaacaagaucaaguccgcccuccucuccaccaacaaggccgucgucucccucuccaacggcgucuccguccucaccuucaagguccucgaccucaagaacuacaucgacaagcagcuccuccccauccucaacaagcaguccugcuccauccccaacaucgagaccgucaucgaguuccagcagaagaacaaccgccuccucgagaucacccgcgaguucuccgucaacgccggcgucaccacccccgucuccaccuacaugcucaccaacuccgagcuccucucccucaucaacgacaugcccaucaccaacgaccagaagaagcucauguccaacaacguccagaucguccgccagcaguccuacuccaucaugugcaucaucaaggaggagguccucgccuacgucguccagcucccccucuacggcgucaucgacacccccugcuggaagcuccacaccuccccccucugcaccaccaacaccaaggagggcuccaacaucugccucacccgcaccgaccgcggcugguacugcgacaacgccggcuccgucuccuucuucccccaggccgagaccugcaagguccaguccaaccgcgucuucugcgacaccaugaacucccucacccuccccuccgaggucaaccucugcaacgucgacaucuucaaccccaaguacgacugcaagaucaugaccuccaagaccgacgucuccuccuccgucaucaccucccucggcgccaucgucuccugcuacggcaagaccaagugcaccgccuccaacaagaaccgcggcaucaucaagaccuucuccaacggcugcgacuacgucuccaacaagggcgucgacaccgucuccgucggcaacacccucuacugcgucaacaagcaggagggccagucccucuacgucaagggcgagcccaucaucaacuucuacgacccccucgucuuccccuccgacgaguucgacgccuccaucucccaggucaacgagaagaucaaccagucccucgccuucauccgcaaguccgacgagcuccuccacaacgucaacgccggcaaguccaccaccaacaucaugaucaccaccaucaucaucgucaucaucgucauccuccucucccucaucgccgucggccuccuccucuacugcaaggcccgcuccacccccgucacccucuccaaggaccagcucuccggcaucaacaacaucgccuucuccaacugaggacuaguguccaccugucccuccugggcugcuggauugucucguuuuccugccaaauaaacaggaucagcgcuuuacagaucuaaaaaaaaaaaaaaaaaaaaaaaaaaaaaaaaaaaaaaaaaaaaaaaaaaaaaaaaaaaaaaaaugcaucccccccccccccccccccccccccccccccaaaggcucuuuucagagccaccagaauu

SEQ ID NO: 1808 - RNA, 1937 nt, Artificial Sequence
  mRNA product Design e-1 comprising derived and/or modified sequence from HRSV(A2)__F_DSCav1_mut1 (opt3)
gggagaauauaagcguuggcggagcgucgguuguagcacucugcgcgcccgcucuucugcugcuguuugucuacuuccuccugcuuccccgccgccgccgccgccaucaagcuuaccauggagcugcucauccuuaaggccaacgcuauuaccacaauacugacugcagugacguucugcuuugccagcggccagaauaucaccgaagaguucuaccaauccacauguucugcggucucaaaaggguauuugggagcuuuaagaacugguugguacaccaguguuauuacaaucgaacugagcaacauuaaggagaauaaaugcaacggcaccgacgccaaggugaaacuaaucaagcaggaacucgauaaguauaaaaaugcaguaacugagcugcagcuucugaugcaguccacacccgccaccgggucuggaucggcuauauguucaggcguggcagucugcaagguguugcaccucgagggugaaguuaacaaaaucaagagcgcccugcugaguacgaauaaagcuguggucucccucucuaacggggugagcguauuaacuuuuaagguucuggaccuuaagaauuacauugauaaacaauugcugccuauccuaaacaagcaguccuguucaauuccaaauaucgagaccgugauagaguuccagcagaaaaacaauaggcuccuggaaauuacacgggaguuuagugucaacgccggagugacuaccccggugagcacauauaugcuuaccaauucugaacuguugucccucaucaacgacaugcccauuacgaacgaucaaaagaaacugaugucaaauaacguccagaucguucgccagcagagcuacaguaucaugugcauuauaaaggaggaaguguuagcguauguagugcaacugccucucuacggcgucaucgacacuccauguuggaaacuucauacaucuccccugugcaccacuaauacaaaggagggcuccaacauuuguuugacccgaacggaucgugggugguacugcgacaaugcaggaagcgugucguucuuuccucaggccgaaaccuguaagguucagucuaacagaguguucugcgauacaaugaacucccuaacucugccaucagaggucaaucucugcaauguggacaucuuuaaccccaaauaugauuguaagauaaugaccaguaaaacagacguaagcuccucuguuauuacuagccugggugcuaucgugucaugcuacggcaagaccaaauguacagccaguaauaagaacagggggaucauuaagaccuucuccaauggaugcgauuaugucagcaacaaaggcguggacacugucucuguggguaauacgcuuuacuguguuaacaagcaagaggggcagucacuguaugugaaaggagaaccuaucauuaacuuuuacgacccauugguauucccgagugaugaguuugacgcaagcauaucccaggucaaugaaaagaucaaccagucucucgcuuucauucggaaaucggaugagcuguuacacaaugugaacgccggcaagagcacaaccaauaucaugaucacuaccauuauaaucguuauuaucgugauucugcuaucccucaucgcggucggccugcuuuuguauugcaaggcccgcucaacacccgugacccugaguaaagaccaacucucugggauaaacaauaucgcauucagcaacugaggacuaguguccaccugucccuccugggcugcuggauugucucguuuuccugccaaauaaacaggaucagcgcuuuacagaucuaaaaaaaaaaaaaaaaaaaaaaaaaaaaaaaaaaaaaaaaaaaaaaaaaaaaaaaaaaaaaaaaugcaucccccccccccccccccccccccccccccccaaaggcucuuuucagagccaccagaauu

SEQ ID NO: 1809 - RNA, 1937 nt, Artificial Sequence
  mRNA product Design e-1 comprising derived and/or modified sequence from HRSV(A2)__F_DSCav1_mut1 (opt4)
gggagaauauaagcguuggcggagcgucgguuguagcacucugcgcgcccgcucuucugcugcuguuugucuacuuccuccugcuuccccgccgccgccgccgccaucaagcuuaccauggagcugcugauccugaaggccaacgccaucaccaccauccugaccgccgugaccuucugcuucgccagcggccagaacaucaccgaggaguucuaccagagcaccugcagcgccgugagcaagggcuaccugggcgcccugagaaccggcugguacaccagcgugaucaccaucgagcugagcaacaucaaggagaacaagugcaacggcaccgacgccaaggugaagcugaucaagcaggagcuggacaaguacaagaacgccgugaccgagcugcagcugcugaugcagagcacccccgccaccggcagcggcagcgccaucugcagcggcguggccgugugcaaggugcugcaccuggagggcgaggugaacaagaucaagagcgcccugcugagcaccaacaaggccguggugagccugagcaacggcgugagcgugcugaccuucaaggugcuggaccugaagaacuacaucgacaagcagcugcugcccauccugaacaagcagagcugcagcauccccaacaucgagaccgugaucgaguuccagcagaagaacaacagacugcuggagaucaccagagaguucagcgugaacgccggcgugaccacccccgugagcaccuacaugcugaccaacagcgagcugcugagccugaucaacgacaugcccaucaccaacgaccagaagaagcugaugagcaacaacgugcagaucgugagacagcagagcuacagcaucaugugcaucaucaaggaggaggugcuggccuacguggugcagcugccccuguacggcgugaucgacacccccugcuggaagcugcacaccagcccccugugcaccaccaacaccaaggagggcagcaacaucugccugaccagaaccgacagaggcugguacugcgacaacgccggcagcgugagcuucuucccccaggccgagaccugcaaggugcagagcaacagaguguucugcgacaccaugaacagccugacccugcccagcgaggugaaccugugcaacguggacaucuucaaccccaaguacgacugcaagaucaugaccagcaagaccgacgugagcagcagcgugaucaccagccugggcgccaucgugagcugcuacggcaagaccaagugcaccgccagcaacaagaacagaggcaucaucaagaccuucagcaacggcugcgacuacgugagcaacaagggcguggacaccgugagcgugggcaacacccuguacugcgugaacaagcaggagggccagagccuguacgugaagggcgagcccaucaucaacuucuacgacccccugguguuccccagcgacgaguucgacgccagcaucagccaggugaacgagaagaucaaccagagccuggccuucaucagaaagagcgacgagcugcugcacaacgugaacgccggcaagagcaccaccaacaucaugaucaccaccaucaucaucgugaucaucgugauccugcugagccugaucgccgugggccugcugcuguacugcaaggccagaagcacccccgugacccugagcaaggaccagcugagcggcaucaacaacaucgccuucagcaacugaggacuaguguccaccugucccuccugggcugcuggauugucucguuuuccugccaaauaaacaggaucagcgcuuuacagaucuaaaaaaaaaaaaaaaaaaaaaaaaaaaaaaaaaaaaaaaaaaaaaaaaaaaaaaaaaaaaaaaaugcaucccccccccccccccccccccccccccccccaaaggcucuuuucagagccaccagaauu

SEQ ID NO: 1810 - RNA, 1937 nt, Artificial Sequence
  mRNA product Design e-1 comprising derived and/or modified sequence from HRSV(A2)__F_DSCav1_mut1 (opt5)
gggagaauauaagcguuggcggagcgucgguuguagcacucugcgcgcccgcucuucugcugcuguuugucuacuuccuccugcuuccccgccgccgccgccgccaucaagcuuaccauggagcugcucauccugaaggccaacgcuauuaccacaauccuuacggccgugaccuucugcuuugcgagcggccagaauauuacagaagaguucuaccaauccaccuguucugcugucagcaaaggguaucugggagcccucagaacaggcugguacaccuccguuaucacaauugaacugucuaacaucaaggagaauaaaugcaacgggaccgacgccaaggugaaacuuaucaagcaggaacuggauaaguauaaaaaugcugugacggagcuccagcugcugaugcagagcacccccgccacaggauccggcucugcuauuuguagcggggucgccgugugcaagguucuccaccuggagggagaagugaacaaaaucaaguccgcgcuucugagcaccaauaaagccgucgugucucucuccaacggcguuagcgugcugacauuuaagguccuugaccugaagaauuacauugauaaacaacuccugccuauccugaacaagcagucuuguuccauuccgaauaucgagaccgugauugaguuccagcagaaaaacaaucggcuccuggaaaucacgcgcgaguuuagcgugaacgcuggcgucacaacccccguuucuacauauaugcuuaccaauuccgaacugcucagccugaucaacgacaugccuauuaccaacgaucaaaagaaacuuauguccaauaacgugcagaucgugagacagcagucuuacagcauuaugugcaucauuaaggaggaaguccuggccuaugugguucaacucccccuguacggggugaucgacacaccuuguuggaaacugcauacgagcccccucugcaccacaaauaccaaggagggauccaacaucugucugacacggaccgaucgcggcugguacugcgacaaugcugggucugucuccuucuuuccucaggccgaaacguguaaggugcagagcaacagaguuuucugcgauacaaugaacucucuuacccugccgagcgaggugaaucucugcaaugucgacauuuuuaaccccaaauaugauuguaagaucaugaccuccaaaacagacgugucuagcuccgucauuaccagccugggagcgaucgugucuugcuacggcaagacaaaauguacggccuccaauaagaaccgggggauuaucaagaccuucagcaauggaugcgauuauguuucuaacaaaggcguggacacagucuccgugggcaauacccuuuacuguguuaacaagcaagaggggcagagccuguaugugaaaggagaaccuaucauuaacuuuuacgacccccucgucuucccuuccgaugaguuugacgcuucuaucagccaggugaaugaaaagauuaaccagucccuggccuucauccgcaaaucugaugagcugcuccacaaugugaacgcuggcaagagcacaaccaauauuaugaucacgaccauuaucaucguuauuaucgucauucugcuuucccugaucgccguggggcuccugcuguauugcaaggccagaagcacacccgugacccuuucuaaagaccaacucuccggaauuaacaauaucgcuuucagcaacugaggacuaguguccaccugucccuccugggcugcuggauugucucguuuuccugccaaauaaacaggaucagcgcuuuacagaucuaaaaaaaaaaaaaaaaaaaaaaaaaaaaaaaaaaaaaaaaaaaaaaaaaaaaaaaaaaaaaaaaugcaucccccccccccccccccccccccccccccccaaaggcucuuuucagagccaccagaauu

SEQ ID NO: 1811 - RNA, 1937 nt, Artificial Sequence
  mRNA product Design e-1 comprising derived and/or modified sequence from HRSV(A2)__F_DSCav1_mut1 (opt6)
gggagaauauaagcguuggcggagcgucgguuguagcacucugcgcgcccgcucuucugcugcuguuugucuacuuccuccugcuuccccgccgccgccgccgccaucaagcuuaccauggaacuauuaauacuaaaagcaaacgcuauaacaacaauacuaacagcagucacauucugcuuugcaucaggccaaaacaucacagaagaauuuuaccaaucaacaugcuccgccguaucgaaaggauaccuaggcgcauuaagaaccggaugguauacaucagucauaacaauugaacuaucuaacauaaaagaaaacaaauguaacggcacagaugccaaaguaaaacucaucaaacaagaauuagauaaauacaaaaacgcagucacugaacuacaacucuuaaugcaaucaacaccugcaacaggaucaggaucagcaauaugcucaggaguagccguauguaaaguacuacaccuagaaggagaagucaacaaaauaaaaucagcccuccuaaguacaaacaaagcugucguaucacuauccaaugguguuucaguacuaacuuucaaaguucuagaccuaaaaaacuacauagacaaacaacuacuaccaauacuaaauaaacaaaguuguucuauacccaacauagaaaccgucauagaauuucaacaaaaaaauaauagacuccuagaaauaacaagagaauuuucaguuaacgcagguguaacaaccccaguauccaccuauaugcuaacaaauucagaauuacuuucccuaaucaacgacaugcccauaacaaaugaccaaaaaaaauuaaugucaaacaacguccaaauaguucgucaacaaucauauucaauaaugugcauaauaaaagaagaagucuuagccuacguaguacaacuuccccuuuauggaguuaucgacacacccugcuggaaacuccacacuucaccacuauguacuacaaacacaaaagaaggauccaacaucugccucacaagaaccgaucgaggaugguacugugauaacgccggauccgucucauucuucccacaagcagaaacaugcaaaguacaaucaaacagaguauuuugcgacacaaugaacucccucacauuaccuucugaaguaaaccuauguaauguagacauauucaaccccaaauacgauugcaaaauaaugacaucaaagacagauguaucaucaagugucaucacaucccuaggagcaauugucucauguuaugguaaaacaaaaugcaccgcaucaaauaaaaacagaggcauaauaaaaaccuucucaaacgguugugacuacguauccaauaaaggcgucgacacaguaucaguagguaacacauuauauuguguaaacaaacaagaaggacagucccuauauguaaaaggagaaccaauaaucaacuucuacgacccacuuguuuucccuucugaugaauuugacgcaaguauaucacaaguaaaugaaaaaaucaaucaaucacuagccuuuauaagaaaaucagaugaauuauuacacaacguaaacgccggaaaaucaacaaccaacauaaugauaaccacaauaauaaucgucauaauagucauccuacuaucacucauagcaguuggacuccuacuauacugcaaagcacgaucaacaccaguaacauuauccaaagaccaacuaagugguaucaauaacaucgccuuuucaaacugaggacuaguguccaccugucccuccugggcugcuggauugucucguuuuccugccaaauaaacaggaucagcgcuuuacagaucuaaaaaaaaaaaaaaaaaaaaaaaaaaaaaaaaaaaaaaaaaaaaaaaaaaaaaaaaaaaaaaaaugcaucccccccccccccccccccccccccccccccaaaggcucuuuucagagccaccagaauu

SEQ ID NO: 1812 - RNA, 1937 nt, Artificial Sequence
  mRNA product Design e-1 comprising derived and/or modified sequence from HRSV(A2)__F_DSCav1_mut1 (opt11)
gggagaauauaagcguuggcggagcgucgguuguagcacucugcgcgcccgcucuucugcugcuguuugucuacuuccuccugcuuccccgccgccgccgccgccaucaagcuuaccauggaacuccuaauccucaaagccaacgcaaucaccacaauccucacugccgucaccuucugcuucgccuccggccaaaacauaacagaagaauuuuaccaaucaaccuguucagcggucuccaaaggcuaccucggcgcccuccgcaccggcugguacaccuccgugaucaccauagaacucuccaacaucaaggaaaacaaaugcaacggcaccgacgcgaaggucaaacuuauuaaacaagaacucgacaaauacaaaaacgcagucaccgaacuacaacuccuaaugcaguccacgccagccaccggcucuggcucagccauaugcuccgguguggccguaugcaaaguccuacaccucgaaggagaagucaacaaaauaaaauccgcccuacuguccacaaacaaggccguagucucccucucaaacggcgucucaguacucaccuucaaaguccuagaccucaagaacuacaucgacaaacaacuccuacccauacuaaacaaacaauccugcucaauccccaacaucgaaaccguaauagaauuucaacaaaaaaacaacagacuccuggagaucacccgggaauuuuccguaaacgccggagucacaacacccgucucaaccuacaugcuaacgaacucagagcuccucucacuuaucaacgacaugcccauaacaaacgaccaaaaaaaacucauguccaacaacgugcaaaucguccgacaacaauccuacuccaucaugugcaucauuaaagaagaaguccucgcauacguaguccagcucccccucuacggcgucauagacacccccugcuggaaacuacacacaucaccccucugcacaacaaacaccaaagaaggcuccaacaucugccucacccgcaccgaccgaggcugguacugcgauaacgccggcagcgucuccuucuucccccaagcagaaaccugcaagguccaauccaaccgaguuuucugcgacacuaugaacucgcucacccuccccuccgaagucaaccucugcaacgucgacauuuucaaccccaaauacgacugcaaaaucaugaccuccaagaccgacguauccuccuccgucaucaccucccuaggcgccauaguaaguugcuacggcaaaaccaagugcacagcaagcaacaaaaaccgaggaauaaucaaaaccuucuccaacggcugcgacuacguauccaacaagggcgucgacaccguauccguagggaacacccuuuacugcguaaacaaacaagaaggacaaucacucuacguaaaaggcgaacccauaaucaacuucuacgacccccucguauuucccuccgacgaauuugacgcaucaaucucacaggucaacgaaaaaauaaaccaaucgcuagcauucaucagaaaaucagacgaacuccuacacaacgucaacgcaggcaagagcaccaccaacaucaugaucaccaccaucaucaucgucauaaucgucauacuacucucacucauagcagucggccuccuccuauacuguaaagcaaggucgaccccagucacccuauccaaagaccaacuaagcggcaucaacaacaucgcguucucaaacuaaggacuaguguccaccugucccuccugggcugcuggauugucucguuuuccugccaaauaaacaggaucagcgcuuuacagaucuaaaaaaaaaaaaaaaaaaaaaaaaaaaaaaaaaaaaaaaaaaaaaaaaaaaaaaaaaaaaaaaaugcaucccccccccccccccccccccccccccccccaaaggcucuuuucagagccaccagaauu

SEQ ID NO: 1813 - RNA, 1919 nt, Artificial Sequence
  mRNA product Design e-2 comprising derived and/or modified sequence from HRSV(A2)__F_DSCav1_mut1 (opt1)
gggagacccgugacccggaaguuguacggcuacgcgacuuucccucccacaaacccucgcgcccuuccuuuccuacuugggcccggcagaaagcuuaccauggagcugcucauccugaaggccaacgccaucaccaccauccugacggcggugaccuucugcuucgccagcggccagaacaucaccgaggaguucuaccaguccacgugcagcgccgucuccaagggguaccucggcgcccugcggaccggcugguacaccuccgugaucaccaucgagcugagcaacaucaaggagaacaagugcaacgggaccgacgccaaggugaagcucaucaagcaggagcuggacaaguacaagaacgcggucacggagcugcagcuccugaugcaguccaccccggcaaccggcuccggcuccgccaucugcagcggcgucgccgugugcaaggugcugcaccucgagggggaggucaacaagaucaagagcgcccugcuguccaccaacaaggccguggugagccucuccaacggcgucagcgugcugaccuucaaggugcuggaccucaagaacuacaucgacaagcagcugcugcccauccugaacaagcagagcugcuccauccccaacaucgagacggugaucgaguuccagcagaagaacaaccggcuccuggagaucacccgcgaguucagcgugaacgccggggucaccacccccguguccacguacaugcugaccaacagcgagcuccugucccugaucaacgacaugccgaucaccaacgaccagaagaagcucaugagcaacaacgugcagaucguccggcagcaguccuacagcaucaugugcaucaucaaggaggaggugcuggcguacgugguccagcugccccucuacggcgugaucgacacccccugcuggaagcugcacacgagcccccugugcaccaccaacaccaaggagggguccaacaucugccucacgcgcaccgaccggggcugguacugcgacaacgccggcagcgucuccuucuucccgcaggccgagaccugcaaggugcagagcaaccgcguguucugcgacaccaugaacucccugacgcugcccagcgagguaaaccucugcaacgucgacaucuucaaccccaaguacgacugcaagaucaugaccuccaagaccgacgugagcuccagcgugaucaccucccugggggccaucgucagcugcuacggcaagacgaagugcaccgccagcaacaagaaccgggggaucaucaagaccuucuccaacggcugcgacuacgugagcaacaagggcguggacaccguguccgucgggaacacccuguacugcgugaacaagcaggagggccagagccucuacgugaagggggagcccaucaucaacuucuacgacccgcuggucuuccccuccgacgaguucgacgcgagcaucucccaggugaacgagaagaucaaccagagccuggccuucauccgcaaguccgacgagcugcuccacaacgugaacgccggcaagagcacgaccaacaucaugaucaccaccaucaucaucgucaucaucgugauccugcugucccucaucgccguggggcugcugcucuacugcaaggcccggagcacgcccgucacccuguccaaggaccagcugagcggcaucaacaacaucgcguucuccaacugaggacuaguguccaccugucccuccugggcugcuggauugucucguuuuccugccaaauaaacaggaucagcgcuuuacagaucuaaaaaaaaaaaaaaaaaaaaaaaaaaaaaaaaaaaaaaaaaaaaaaaaaaaaaaaaaaaaaaaaugcaucccccccccccccccccccccccccccccccaaaggcucuuuucagagccaccagaauu

SEQ ID NO: 1814 - RNA, 1919 nt, Artificial Sequence
  mRNA product Design e-2 comprising derived and/or modified sequence from HRSV(A2)__F_DSCav1_mut1 (opt1)
gggagacccgugacccggaaguuguacggcuacgcgacuuucccucccacaaacccucgcgcccuuccuuuccuacuugggcccggcagaaagcuuaccauggagcugcucauccugaaggccaacgccaucaccaccauccugacggcggugaccuucugcuucgccagcggccagaacaucaccgaggaguucuaccaguccacgugcagcgccgucuccaagggguaccucggcgcccugcgcaccgggugguacaccagcgugaucaccaucgagcuguccaacaucaaggagaacaagugcaacggcaccgacgccaaggugaagcucaucaagcaggagcuggacaaguacaagaacgcggucacggagcugcagcuccugaugcagagcacccccgccaccggguccggcagcgccaucugcuccggcguggccgugugcaagguccugcaccucgagggggaggugaacaagaucaagagcgcgcugcuguccaccaacaaggccguggucagccucuccaacggcgugagcgugcugacguucaagguccuggaccucaagaacuacaucgacaagcagcugcugccgauccucaacaagcaguccugcagcauccccaacaucgagaccgugaucgaguuccagcagaagaacaaccggcugcuggagaucacccgcgaguucuccgugaacgccggggucaccacgcccgugagcaccuacaugcucaccaacuccgagcugcugagccucaucaacgacaugcccaucaccaacgaccagaagaagcugaugagcaacaacgugcagaucguccggcagcaguccuacagcaucaugugcaucaucaaggaggaggugcuggccuacgugguccagcucccgcuguacggcgugaucgacacgcccugcuggaagcugcacaccagcccccucugcaccaccaacacgaaggagggguccaacaucugccugacccgcaccgaccggggcugguacugcgacaacgccggcuccgugagcuucuucccccaggcggagaccugcaagguccaguccaaccgcguguucugcgacacgaugaacagccugacccucccguccgaggucaaccugugcaacguggacaucuucaaccccaaguacgacugcaagaucaugaccagcaagaccgacguguccagcuccgucaucacgagccugggggccaucguguccugcuacggcaagaccaagugcaccgccagcaacaagaaccgggggaucaucaagaccuucuccaacggcugcgacuacgugagcaacaagggcgucgacacgguguccguggggaacacccucuacugcgucaacaagcaggagggccagagccuguacgugaagggggagcccaucaucaacuucuacgacccccugguguucccgagcgacgaguucgacgccuccaucagccaggucaacgagaagaucaaccagucccucgccuucauccgcaagagcgacgagcugcugcacaacgugaacgcgggcaaguccaccaccaacaucaugaucaccacgaucaucaucgugaucaucgucauccuccugagccugaucgccguggggcuccugcuguacugcaaggcccgguccacccccgugacccugagcaaggaccagcucuccggcaucaacaacaucgccuucagcaacugaggacuaguguccaccugucccuccugggcugcuggauugucucguuuuccugccaaauaaacaggaucagcgcuuuacagaucuaaaaaaaaaaaaaaaaaaaaaaaaaaaaaaaaaaaaaaaaaaaaaaaaaaaaaaaaaaaaaaaaugcaucccccccccccccccccccccccccccccccaaaggcucuuuucagagccaccagaauu

SEQ ID NO: 1815 - RNA, 1919 nt, Artificial Sequence
  mRNA product Design e-2 comprising derived and/or modified sequence from HRSV(A2)__F_DSCav1_mut1 (opt2)
gggagacccgugacccggaaguuguacggcuacgcgacuuucccucccacaaacccucgcgcccuuccuuuccuacuugggcccggcagaaagcuuaccauggagcuccucauccucaaggccaacgccaucaccaccauccucaccgccgucaccuucugcuucgccuccggccagaacaucaccgaggaguucuaccaguccaccugcuccgccgucuccaagggcuaccucggcgcccuccgcaccggcugguacaccuccgucaucaccaucgagcucuccaacaucaaggagaacaagugcaacggcaccgacgccaaggucaagcucaucaagcaggagcucgacaaguacaagaacgccgucaccgagcuccagcuccucaugcaguccacccccgccaccggcuccggcuccgccaucugcuccggcgucgccgucugcaagguccuccaccucgagggcgaggucaacaagaucaaguccgcccuccucuccaccaacaaggccgucgucucccucuccaacggcgucuccguccucaccuucaagguccucgaccucaagaacuacaucgacaagcagcuccuccccauccucaacaagcaguccugcuccauccccaacaucgagaccgucaucgaguuccagcagaagaacaaccgccuccucgagaucacccgcgaguucuccgucaacgccggcgucaccacccccgucuccaccuacaugcucaccaacuccgagcuccucucccucaucaacgacaugcccaucaccaacgaccagaagaagcucauguccaacaacguccagaucguccgccagcaguccuacuccaucaugugcaucaucaaggaggagguccucgccuacgucguccagcucccccucuacggcgucaucgacacccccugcuggaagcuccacaccuccccccucugcaccaccaacaccaaggagggcuccaacaucugccucacccgcaccgaccgcggcugguacugcgacaacgccggcuccgucuccuucuucccccaggccgagaccugcaagguccaguccaaccgcgucuucugcgacaccaugaacucccucacccuccccuccgaggucaaccucugcaacgucgacaucuucaaccccaaguacgacugcaagaucaugaccuccaagaccgacgucuccuccuccgucaucaccucccucggcgccaucgucuccugcuacggcaagaccaagugcaccgccuccaacaagaaccgcggcaucaucaagaccuucuccaacggcugcgacuacgucuccaacaagggcgucgacaccgucuccgucggcaacacccucuacugcgucaacaagcaggagggccagucccucuacgucaagggcgagcccaucaucaacuucuacgacccccucgucuuccccuccgacgaguucgacgccuccaucucccaggucaacgagaagaucaaccagucccucgccuucauccgcaaguccgacgagcuccuccacaacgucaacgccggcaaguccaccaccaacaucaugaucaccaccaucaucaucgucaucaucgucauccuccucucccucaucgccgucggccuccuccucuacugcaaggcccgcuccacccccgucacccucuccaaggaccagcucuccggcaucaacaacaucgccuucuccaacugaggacuaguguccaccugucccuccugggcugcuggauugucucguuuuccugccaaauaaacaggaucagcgcuuuacagaucuaaaaaaaaaaaaaaaaaaaaaaaaaaaaaaaaaaaaaaaaaaaaaaaaaaaaaaaaaaaaaaaaugcaucccccccccccccccccccccccccccccccaaaggcucuuuucagagccaccagaauu

SEQ ID NO: 1816 - RNA, 1919 nt, Artificial Sequence
  mRNA product Design e-2 comprising derived and/or modified sequence from HRSV(A2)__F_DSCav1_mut1 (opt3)
gggagacccgugacccggaaguuguacggcuacgcgacuuucccucccacaaacccucgcgcccuuccuuuccuacuugggcccggcagaaagcuuaccauggagcugcucauccuuaaggccaacgcuauuaccacaauacugacugcagugacguucugcuuugccagcggccagaauaucaccgaagaguucuaccaauccacauguucugcggucucaaaaggguauuugggagcuuuaagaacugguugguacaccaguguuauuacaaucgaacugagcaacauuaaggagaauaaaugcaacggcaccgacgccaaggugaaacuaaucaagcaggaacucgauaaguauaaaaaugcaguaacugagcugcagcuucugaugcaguccacacccgccaccgggucuggaucggcuauauguucaggcguggcagucugcaagguguugcaccucgagggugaaguuaacaaaaucaagagcgcccugcugaguacgaauaaagcuguggucucccucucuaacggggugagcguauuaacuuuuaagguucuggaccuuaagaauuacauugauaaacaauugcugccuauccuaaacaagcaguccuguucaauuccaaauaucgagaccgugauagaguuccagcagaaaaacaauaggcuccuggaaauuacacgggaguuuagugucaacgccggagugacuaccccggugagcacauauaugcuuaccaauucugaacuguugucccucaucaacgacaugcccauuacgaacgaucaaaagaaacugaugucaaauaacguccagaucguucgccagcagagcuacaguaucaugugcauuauaaaggaggaaguguuagcguauguagugcaacugccucucuacggcgucaucgacacuccauguuggaaacuucauacaucuccccugugcaccacuaauacaaaggagggcuccaacauuuguuugacccgaacggaucgugggugguacugcgacaaugcaggaagcgugucguucuuuccucaggccgaaaccuguaagguucagucuaacagaguguucugcgauacaaugaacucccuaacucugccaucagaggucaaucucugcaauguggacaucuuuaaccccaaauaugauuguaagauaaugaccaguaaaacagacguaagcuccucuguuauuacuagccugggugcuaucgugucaugcuacggcaagaccaaauguacagccaguaauaagaacagggggaucauuaagaccuucuccaauggaugcgauuaugucagcaacaaaggcguggacacugucucuguggguaauacgcuuuacuguguuaacaagcaagaggggcagucacuguaugugaaaggagaaccuaucauuaacuuuuacgacccauugguauucccgagugaugaguuugacgcaagcauaucccaggucaaugaaaagaucaaccagucucucgcuuucauucggaaaucggaugagcuguuacacaaugugaacgccggcaagagcacaaccaauaucaugaucacuaccauuauaaucguuauuaucgugauucugcuaucccucaucgcggucggccugcuuuuguauugcaaggcccgcucaacacccgugacccugaguaaagaccaacucucugggauaaacaauaucgcauucagcaacugaggacuaguguccaccugucccuccugggcugcuggauugucucguuuuccugccaaauaaacaggaucagcgcuuuacagaucuaaaaaaaaaaaaaaaaaaaaaaaaaaaaaaaaaaaaaaaaaaaaaaaaaaaaaaaaaaaaaaaaugcaucccccccccccccccccccccccccccccccaaaggcucuuuucagagccaccagaauu

SEQ ID NO: 1817 - RNA, 1919 nt, Artificial Sequence
  mRNA product Design e-2 comprising derived and/or modified sequence from HRSV(A2)__F_DSCav1_mut1 (opt4)
gggagacccgugacccggaaguuguacggcuacgcgacuuucccucccacaaacccucgcgcccuuccuuuccuacuugggcccggcagaaagcuuaccauggagcugcugauccugaaggccaacgccaucaccaccauccugaccgccgugaccuucugcuucgccagcggccagaacaucaccgaggaguucuaccagagcaccugcagcgccgugagcaagggcuaccugggcgcccugagaaccggcugguacaccagcgugaucaccaucgagcugagcaacaucaaggagaacaagugcaacggcaccgacgccaaggugaagcugaucaagcaggagcuggacaaguacaagaacgccgugaccgagcugcagcugcugaugcagagcacccccgccaccggcagcggcagcgccaucugcagcggcguggccgugugcaaggugcugcaccuggagggcgaggugaacaagaucaagagcgcccugcugagcaccaacaaggccguggugagccugagcaacggcgugagcgugcugaccuucaaggugcuggaccugaagaacuacaucgacaagcagcugcugcccauccugaacaagcagagcugcagcauccccaacaucgagaccgugaucgaguuccagcagaagaacaacagacugcuggagaucaccagagaguucagcgugaacgccggcgugaccacccccgugagcaccuacaugcugaccaacagcgagcugcugagccugaucaacgacaugcccaucaccaacgaccagaagaagcugaugagcaacaacgugcagaucgugagacagcagagcuacagcaucaugugcaucaucaaggaggaggugcuggccuacguggugcagcugccccuguacggcgugaucgacacccccugcuggaagcugcacaccagcccccugugcaccaccaacaccaaggagggcagcaacaucugccugaccagaaccgacagaggcugguacugcgacaacgccggcagcgugagcuucuucccccaggccgagaccugcaaggugcagagcaacagaguguucugcgacaccaugaacagccugacccugcccagcgaggugaaccugugcaacguggacaucuucaaccccaaguacgacugcaagaucaugaccagcaagaccgacgugagcagcagcgugaucaccagccugggcgccaucgugagcugcuacggcaagaccaagugcaccgccagcaacaagaacagaggcaucaucaagaccuucagcaacggcugcgacuacgugagcaacaagggcguggacaccgugagcgugggcaacacccuguacugcgugaacaagcaggagggccagagccuguacgugaagggcgagcccaucaucaacuucuacgacccccugguguuccccagcgacgaguucgacgccagcaucagccaggugaacgagaagaucaaccagagccuggccuucaucagaaagagcgacgagcugcugcacaacgugaacgccggcaagagcaccaccaacaucaugaucaccaccaucaucaucgugaucaucgugauccugcugagccugaucgccgugggccugcugcuguacugcaaggccagaagcacccccgugacccugagcaaggaccagcugagcggcaucaacaacaucgccuucagcaacugaggacuaguguccaccugucccuccugggcugcuggauugucucguuuuccugccaaauaaacaggaucagcgcuuuacagaucuaaaaaaaaaaaaaaaaaaaaaaaaaaaaaaaaaaaaaaaaaaaaaaaaaaaaaaaaaaaaaaaaugcaucccccccccccccccccccccccccccccccaaaggcucuuuucagagccaccagaauu

SEQ ID NO: 1818 - RNA, 1919 nt, Artificial Sequence
  mRNA product Design e-2 comprising derived and/or modified sequence from HRSV(A2)__F_DSCav1_mut1 (opt5)
gggagacccgugacccggaaguuguacggcuacgcgacuuucccucccacaaacccucgcgcccuuccuuuccuacuugggcccggcagaaagcuuaccauggagcugcucauccugaaggccaacgcuauuaccacaauccuuacggccgugaccuucugcuuugcgagcggccagaauauuacagaagaguucuaccaauccaccuguucugcugucagcaaaggguaucugggagcccucagaacaggcugguacaccuccguuaucacaauugaacugucuaacaucaaggagaauaaaugcaacgggaccgacgccaaggugaaacuuaucaagcaggaacuggauaaguauaaaaaugcugugacggagcuccagcugcugaugcagagcacccccgccacaggauccggcucugcuauuuguagcggggucgccgugugcaagguucuccaccuggagggagaagugaacaaaaucaaguccgcgcuucugagcaccaauaaagccgucgugucucucuccaacggcguuagcgugcugacauuuaagguccuugaccugaagaauuacauugauaaacaacuccugccuauccugaacaagcagucuuguuccauuccgaauaucgagaccgugauugaguuccagcagaaaaacaaucggcuccuggaaaucacgcgcgaguuuagcgugaacgcuggcgucacaacccccguuucuacauauaugcuuaccaauuccgaacugcucagccugaucaacgacaugccuauuaccaacgaucaaaagaaacuuauguccaauaacgugcagaucgugagacagcagucuuacagcauuaugugcaucauuaaggaggaaguccuggccuaugugguucaacucccccuguacggggugaucgacacaccuuguuggaaacugcauacgagcccccucugcaccacaaauaccaaggagggauccaacaucugucugacacggaccgaucgcggcugguacugcgacaaugcugggucugucuccuucuuuccucaggccgaaacguguaaggugcagagcaacagaguuuucugcgauacaaugaacucucuuacccugccgagcgaggugaaucucugcaaugucgacauuuuuaaccccaaauaugauuguaagaucaugaccuccaaaacagacgugucuagcuccgucauuaccagccugggagcgaucgugucuugcuacggcaagacaaaauguacggccuccaauaagaaccgggggauuaucaagaccuucagcaauggaugcgauuauguuucuaacaaaggcguggacacagucuccgugggcaauacccuuuacuguguuaacaagcaagaggggcagagccuguaugugaaaggagaaccuaucauuaacuuuuacgacccccucgucuucccuuccgaugaguuugacgcuucuaucagccaggugaaugaaaagauuaaccagucccuggccuucauccgcaaaucugaugagcugcuccacaaugugaacgcuggcaagagcacaaccaauauuaugaucacgaccauuaucaucguuauuaucgucauucugcuuucccugaucgccguggggcuccugcuguauugcaaggccagaagcacacccgugacccuuucuaaagaccaacucuccggaauuaacaauaucgcuuucagcaacugaggacuaguguccaccugucccuccugggcugcuggauugucucguuuuccugccaaauaaacaggaucagcgcuuuacagaucuaaaaaaaaaaaaaaaaaaaaaaaaaaaaaaaaaaaaaaaaaaaaaaaaaaaaaaaaaaaaaaaaugcaucccccccccccccccccccccccccccccccaaaggcucuuuucagagccaccagaauu

SEQ ID NO: 1819 - RNA, 1919 nt, Artificial Sequence
  mRNA product Design e-2 comprising derived and/or modified sequence from HRSV(A2)__F_DSCav1_mut1 (opt6)
gggagacccgugacccggaaguuguacggcuacgcgacuuucccucccacaaacccucgcgcccuuccuuuccuacuugggcccggcagaaagcuuaccauggaacuauuaauacuaaaagcaaacgcuauaacaacaauacuaacagcagucacauucugcuuugcaucaggccaaaacaucacagaagaauuuuaccaaucaacaugcuccgccguaucgaaaggauaccuaggcgcauuaagaaccggaugguauacaucagucauaacaauugaacuaucuaacauaaaagaaaacaaauguaacggcacagaugccaaaguaaaacucaucaaacaagaauuagauaaauacaaaaacgcagucacugaacuacaacucuuaaugcaaucaacaccugcaacaggaucaggaucagcaauaugcucaggaguagccguauguaaaguacuacaccuagaaggagaagucaacaaaauaaaaucagcccuccuaaguacaaacaaagcugucguaucacuauccaaugguguuucaguacuaacuuucaaaguucuagaccuaaaaaacuacauagacaaacaacuacuaccaauacuaaauaaacaaaguuguucuauacccaacauagaaaccgucauagaauuucaacaaaaaaauaauagacuccuagaaauaacaagagaauuuucaguuaacgcagguguaacaaccccaguauccaccuauaugcuaacaaauucagaauuacuuucccuaaucaacgacaugcccauaacaaaugaccaaaaaaaauuaaugucaaacaacguccaaauaguucgucaacaaucauauucaauaaugugcauaauaaaagaagaagucuuagccuacguaguacaacuuccccuuuauggaguuaucgacacacccugcuggaaacuccacacuucaccacuauguacuacaaacacaaaagaaggauccaacaucugccucacaagaaccgaucgaggaugguacugugauaacgccggauccgucucauucuucccacaagcagaaacaugcaaaguacaaucaaacagaguauuuugcgacacaaugaacucccucacauuaccuucugaaguaaaccuauguaauguagacauauucaaccccaaauacgauugcaaaauaaugacaucaaagacagauguaucaucaagugucaucacaucccuaggagcaauugucucauguuaugguaaaacaaaaugcaccgcaucaaauaaaaacagaggcauaauaaaaaccuucucaaacgguugugacuacguauccaauaaaggcgucgacacaguaucaguagguaacacauuauauuguguaaacaaacaagaaggacagucccuauauguaaaaggagaaccaauaaucaacuucuacgacccacuuguuuucccuucugaugaauuugacgcaaguauaucacaaguaaaugaaaaaaucaaucaaucacuagccuuuauaagaaaaucagaugaauuauuacacaacguaaacgccggaaaaucaacaaccaacauaaugauaaccacaauaauaaucgucauaauagucauccuacuaucacucauagcaguuggacuccuacuauacugcaaagcacgaucaacaccaguaacauuauccaaagaccaacuaagugguaucaauaacaucgccuuuucaaacugaggacuaguguccaccugucccuccugggcugcuggauugucucguuuuccugccaaauaaacaggaucagcgcuuuacagaucuaaaaaaaaaaaaaaaaaaaaaaaaaaaaaaaaaaaaaaaaaaaaaaaaaaaaaaaaaaaaaaaaugcaucccccccccccccccccccccccccccccccaaaggcucuuuucagagccaccagaauu

SEQ ID NO: 1820 - RNA, 1919 nt, Artificial Sequence
  mRNA product Design e-2 comprising derived and/or modified sequence from HRSV(A2)__F_DSCav1_mut1 (opt11)
gggagacccgugacccggaaguuguacggcuacgcgacuuucccucccacaaacccucgcgcccuuccuuuccuacuugggcccggcagaaagcuuaccauggaacuccuaauccucaaagccaacgcaaucaccacaauccucacugccgucaccuucugcuucgccuccggccaaaacauaacagaagaauuuuaccaaucaaccuguucagcggucuccaaaggcuaccucggcgcccuccgcaccggcugguacaccuccgugaucaccauagaacucuccaacaucaaggaaaacaaaugcaacggcaccgacgcgaaggucaaacuuauuaaacaagaacucgacaaauacaaaaacgcagucaccgaacuacaacuccuaaugcaguccacgccagccaccggcucuggcucagccauaugcuccgguguggccguaugcaaaguccuacaccucgaaggagaagucaacaaaauaaaauccgcccuacuguccacaaacaaggccguagucucccucucaaacggcgucucaguacucaccuucaaaguccuagaccucaagaacuacaucgacaaacaacuccuacccauacuaaacaaacaauccugcucaauccccaacaucgaaaccguaauagaauuucaacaaaaaaacaacagacuccuggagaucacccgggaauuuuccguaaacgccggagucacaacacccgucucaaccuacaugcuaacgaacucagagcuccucucacuuaucaacgacaugcccauaacaaacgaccaaaaaaaacucauguccaacaacgugcaaaucguccgacaacaauccuacuccaucaugugcaucauuaaagaagaaguccucgcauacguaguccagcucccccucuacggcgucauagacacccccugcuggaaacuacacacaucaccccucugcacaacaaacaccaaagaaggcuccaacaucugccucacccgcaccgaccgaggcugguacugcgauaacgccggcagcgucuccuucuucccccaagcagaaaccugcaagguccaauccaaccgaguuuucugcgacacuaugaacucgcucacccuccccuccgaagucaaccucugcaacgucgacauuuucaaccccaaauacgacugcaaaaucaugaccuccaagaccgacguauccuccuccgucaucaccucccuaggcgccauaguaaguugcuacggcaaaaccaagugcacagcaagcaacaaaaaccgaggaauaaucaaaaccuucuccaacggcugcgacuacguauccaacaagggcgucgacaccguauccguagggaacacccuuuacugcguaaacaaacaagaaggacaaucacucuacguaaaaggcgaacccauaaucaacuucuacgacccccucguauuucccuccgacgaauuugacgcaucaaucucacaggucaacgaaaaaauaaaccaaucgcuagcauucaucagaaaaucagacgaacuccuacacaacgucaacgcaggcaagagcaccaccaacaucaugaucaccaccaucaucaucgucauaaucgucauacuacucucacucauagcagucggccuccuccuauacuguaaagcaaggucgaccccagucacccuauccaaagaccaacuaagcggcaucaacaacaucgcguucucaaacuaaggacuaguguccaccugucccuccugggcugcuggauugucucguuuuccugccaaauaaacaggaucagcgcuuuacagaucuaaaaaaaaaaaaaaaaaaaaaaaaaaaaaaaaaaaaaaaaaaaaaaaaaaaaaaaaaaaaaaaaugcaucccccccccccccccccccccccccccccccaaaggcucuuuucagagccaccagaauu

SEQ ID NO: 1821 - RNA, 1889 nt, Artificial Sequence
  mRNA product Design e-3 comprising derived and/or modified sequence from HRSV(A2)__F_DSCav1_mut1 (opt1)
gggagacuuucccauucuguagcagaauuugguguugccuguggucuuggucccgcggagaagcuuaccauggagcugcucauccugaaggccaacgccaucaccaccauccugacggcggugaccuucugcuucgccagcggccagaacaucaccgaggaguucuaccaguccacgugcagcgccgucuccaagggguaccucggcgcccugcggaccggcugguacaccuccgugaucaccaucgagcugagcaacaucaaggagaacaagugcaacgggaccgacgccaaggugaagcucaucaagcaggagcuggacaaguacaagaacgcggucacggagcugcagcuccugaugcaguccaccccggcaaccggcuccggcuccgccaucugcagcggcgucgccgugugcaaggugcugcaccucgagggggaggucaacaagaucaagagcgcccugcuguccaccaacaaggccguggugagccucuccaacggcgucagcgugcugaccuucaaggugcuggaccucaagaacuacaucgacaagcagcugcugcccauccugaacaagcagagcugcuccauccccaacaucgagacggugaucgaguuccagcagaagaacaaccggcuccuggagaucacccgcgaguucagcgugaacgccggggucaccacccccguguccacguacaugcugaccaacagcgagcuccugucccugaucaacgacaugccgaucaccaacgaccagaagaagcucaugagcaacaacgugcagaucguccggcagcaguccuacagcaucaugugcaucaucaaggaggaggugcuggcguacgugguccagcugccccucuacggcgugaucgacacccccugcuggaagcugcacacgagcccccugugcaccaccaacaccaaggagggguccaacaucugccucacgcgcaccgaccggggcugguacugcgacaacgccggcagcgucuccuucuucccgcaggccgagaccugcaaggugcagagcaaccgcguguucugcgacaccaugaacucccugacgcugcccagcgagguaaaccucugcaacgucgacaucuucaaccccaaguacgacugcaagaucaugaccuccaagaccgacgugagcuccagcgugaucaccucccugggggccaucgucagcugcuacggcaagacgaagugcaccgccagcaacaagaaccgggggaucaucaagaccuucuccaacggcugcgacuacgugagcaacaagggcguggacaccguguccgucgggaacacccuguacugcgugaacaagcaggagggccagagccucuacgugaagggggagcccaucaucaacuucuacgacccgcuggucuuccccuccgacgaguucgacgcgagcaucucccaggugaacgagaagaucaaccagagccuggccuucauccgcaaguccgacgagcugcuccacaacgugaacgccggcaagagcacgaccaacaucaugaucaccaccaucaucaucgucaucaucgugauccugcugucccucaucgccguggggcugcugcucuacugcaaggcccggagcacgcccgucacccuguccaaggaccagcugagcggcaucaacaacaucgcguucuccaacugaggacuaguguccaccugucccuccugggcugcuggauugucucguuuuccugccaaauaaacaggaucagcgcuuuacagaucuaaaaaaaaaaaaaaaaaaaaaaaaaaaaaaaaaaaaaaaaaaaaaaaaaaaaaaaaaaaaaaaaugcaucccccccccccccccccccccccccccccccaaaggcucuuuucagagccaccagaauu

SEQ ID NO: 1822 - RNA, 1889 nt, Artificial Sequence
  mRNA product Design e-3 comprising derived and/or modified sequence from HRSV(A2)__F_DSCav1_mut1 (opt1)
gggagacuuucccauucuguagcagaauuugguguugccuguggucuuggucccgcggagaagcuuaccauggagcugcucauccugaaggccaacgccaucaccaccauccugacggcggugaccuucugcuucgccagcggccagaacaucaccgaggaguucuaccaguccacgugcagcgccgucuccaagggguaccucggcgcccugcgcaccgggugguacaccagcgugaucaccaucgagcuguccaacaucaaggagaacaagugcaacggcaccgacgccaaggugaagcucaucaagcaggagcuggacaaguacaagaacgcggucacggagcugcagcuccugaugcagagcacccccgccaccggguccggcagcgccaucugcuccggcguggccgugugcaagguccugcaccucgagggggaggugaacaagaucaagagcgcgcugcuguccaccaacaaggccguggucagccucuccaacggcgugagcgugcugacguucaagguccuggaccucaagaacuacaucgacaagcagcugcugccgauccucaacaagcaguccugcagcauccccaacaucgagaccgugaucgaguuccagcagaagaacaaccggcugcuggagaucacccgcgaguucuccgugaacgccggggucaccacgcccgugagcaccuacaugcucaccaacuccgagcugcugagccucaucaacgacaugcccaucaccaacgaccagaagaagcugaugagcaacaacgugcagaucguccggcagcaguccuacagcaucaugugcaucaucaaggaggaggugcuggccuacgugguccagcucccgcuguacggcgugaucgacacgcccugcuggaagcugcacaccagcccccucugcaccaccaacacgaaggagggguccaacaucugccugacccgcaccgaccggggcugguacugcgacaacgccggcuccgugagcuucuucccccaggcggagaccugcaagguccaguccaaccgcguguucugcgacacgaugaacagccugacccucccguccgaggucaaccugugcaacguggacaucuucaaccccaaguacgacugcaagaucaugaccagcaagaccgacguguccagcuccgucaucacgagccugggggccaucguguccugcuacggcaagaccaagugcaccgccagcaacaagaaccgggggaucaucaagaccuucuccaacggcugcgacuacgugagcaacaagggcgucgacacgguguccguggggaacacccucuacugcgucaacaagcaggagggccagagccuguacgugaagggggagcccaucaucaacuucuacgacccccugguguucccgagcgacgaguucgacgccuccaucagccaggucaacgagaagaucaaccagucccucgccuucauccgcaagagcgacgagcugcugcacaacgugaacgcgggcaaguccaccaccaacaucaugaucaccacgaucaucaucgugaucaucgucauccuccugagccugaucgccguggggcuccugcuguacugcaaggcccgguccacccccgugacccugagcaaggaccagcucuccggcaucaacaacaucgccuucagcaacugaggacuaguguccaccugucccuccugggcugcuggauugucucguuuuccugccaaauaaacaggaucagcgcuuuacagaucuaaaaaaaaaaaaaaaaaaaaaaaaaaaaaaaaaaaaaaaaaaaaaaaaaaaaaaaaaaaaaaaaugcaucccccccccccccccccccccccccccccccaaaggcucuuuucagagccaccagaauu

SEQ ID NO: 1823 - RNA, 1889 nt, Artificial Sequence
  mRNA product Design e-3 comprising derived and/or modified sequence from HRSV(A2)__F_DSCav1_mut1 (opt2)
gggagacuuucccauucuguagcagaauuugguguugccuguggucuuggucccgcggagaagcuuaccauggagcuccucauccucaaggccaacgccaucaccaccauccucaccgccgucaccuucugcuucgccuccggccagaacaucaccgaggaguucuaccaguccaccugcuccgccgucuccaagggcuaccucggcgcccuccgcaccggcugguacaccuccgucaucaccaucgagcucuccaacaucaaggagaacaagugcaacggcaccgacgccaaggucaagcucaucaagcaggagcucgacaaguacaagaacgccgucaccgagcuccagcuccucaugcaguccacccccgccaccggcuccggcuccgccaucugcuccggcgucgccgucugcaagguccuccaccucgagggcgaggucaacaagaucaaguccgcccuccucuccaccaacaaggccgucgucucccucuccaacggcgucuccguccucaccuucaagguccucgaccucaagaacuacaucgacaagcagcuccuccccauccucaacaagcaguccugcuccauccccaacaucgagaccgucaucgaguuccagcagaagaacaaccgccuccucgagaucacccgcgaguucuccgucaacgccggcgucaccacccccgucuccaccuacaugcucaccaacuccgagcuccucucccucaucaacgacaugcccaucaccaacgaccagaagaagcucauguccaacaacguccagaucguccgccagcaguccuacuccaucaugugcaucaucaaggaggagguccucgccuacgucguccagcucccccucuacggcgucaucgacacccccugcuggaagcuccacaccuccccccucugcaccaccaacaccaaggagggcuccaacaucugccucacccgcaccgaccgcggcugguacugcgacaacgccggcuccgucuccuucuucccccaggccgagaccugcaagguccaguccaaccgcgucuucugcgacaccaugaacucccucacccuccccuccgaggucaaccucugcaacgucgacaucuucaaccccaaguacgacugcaagaucaugaccuccaagaccgacgucuccuccuccgucaucaccucccucggcgccaucgucuccugcuacggcaagaccaagugcaccgccuccaacaagaaccgcggcaucaucaagaccuucuccaacggcugcgacuacgucuccaacaagggcgucgacaccgucuccgucggcaacacccucuacugcgucaacaagcaggagggccagucccucuacgucaagggcgagcccaucaucaacuucuacgacccccucgucuuccccuccgacgaguucgacgccuccaucucccaggucaacgagaagaucaaccagucccucgccuucauccgcaaguccgacgagcuccuccacaacgucaacgccggcaaguccaccaccaacaucaugaucaccaccaucaucaucgucaucaucgucauccuccucucccucaucgccgucggccuccuccucuacugcaaggcccgcuccacccccgucacccucuccaaggaccagcucuccggcaucaacaacaucgccuucuccaacugaggacuaguguccaccugucccuccugggcugcuggauugucucguuuuccugccaaauaaacaggaucagcgcuuuacagaucuaaaaaaaaaaaaaaaaaaaaaaaaaaaaaaaaaaaaaaaaaaaaaaaaaaaaaaaaaaaaaaaaugcaucccccccccccccccccccccccccccccccaaaggcucuuuucagagccaccagaauu

SEQ ID NO: 1824 - RNA, 1889 nt, Artificial Sequence
  mRNA product Design e-3 comprising derived and/or modified sequence from HRSV(A2)__F_DSCav1_mut1 (opt3)
gggagacuuucccauucuguagcagaauuugguguugccuguggucuuggucccgcggagaagcuuaccauggagcugcucauccuuaaggccaacgcuauuaccacaauacugacugcagugacguucugcuuugccagcggccagaauaucaccgaagaguucuaccaauccacauguucugcggucucaaaaggguauuugggagcuuuaagaacugguugguacaccaguguuauuacaaucgaacugagcaacauuaaggagaauaaaugcaacggcaccgacgccaaggugaaacuaaucaagcaggaacucgauaaguauaaaaaugcaguaacugagcugcagcuucugaugcaguccacacccgccaccgggucuggaucggcuauauguucaggcguggcagucugcaagguguugcaccucgagggugaaguuaacaaaaucaagagcgcccugcugaguacgaauaaagcuguggucucccucucuaacggggugagcguauuaacuuuuaagguucuggaccuuaagaauuacauugauaaacaauugcugccuauccuaaacaagcaguccuguucaauuccaaauaucgagaccgugauagaguuccagcagaaaaacaauaggcuccuggaaauuacacgggaguuuagugucaacgccggagugacuaccccggugagcacauauaugcuuaccaauucugaacuguugucccucaucaacgacaugcccauuacgaacgaucaaaagaaacugaugucaaauaacguccagaucguucgccagcagagcuacaguaucaugugcauuauaaaggaggaaguguuagcguauguagugcaacugccucucuacggcgucaucgacacuccauguuggaaacuucauacaucuccccugugcaccacuaauacaaaggagggcuccaacauuuguuugacccgaacggaucgugggugguacugcgacaaugcaggaagcgugucguucuuuccucaggccgaaaccuguaagguucagucuaacagaguguucugcgauacaaugaacucccuaacucugccaucagaggucaaucucugcaauguggacaucuuuaaccccaaauaugauuguaagauaaugaccaguaaaacagacguaagcuccucuguuauuacuagccugggugcuaucgugucaugcuacggcaagaccaaauguacagccaguaauaagaacagggggaucauuaagaccuucuccaauggaugcgauuaugucagcaacaaaggcguggacacugucucuguggguaauacgcuuuacuguguuaacaagcaagaggggcagucacuguaugugaaaggagaaccuaucauuaacuuuuacgacccauugguauucccgagugaugaguuugacgcaagcauaucccaggucaaugaaaagaucaaccagucucucgcuuucauucggaaaucggaugagcuguuacacaaugugaacgccggcaagagcacaaccaauaucaugaucacuaccauuauaaucguuauuaucgugauucugcuaucccucaucgcggucggccugcuuuuguauugcaaggcccgcucaacacccgugacccugaguaaagaccaacucucugggauaaacaauaucgcauucagcaacugaggacuaguguccaccugucccuccugggcugcuggauugucucguuuuccugccaaauaaacaggaucagcgcuuuacagaucuaaaaaaaaaaaaaaaaaaaaaaaaaaaaaaaaaaaaaaaaaaaaaaaaaaaaaaaaaaaaaaaaugcaucccccccccccccccccccccccccccccccaaaggcucuuuucagagccaccagaauu

SEQ ID NO: 1825 - RNA, 1889 nt, Artificial Sequence
  mRNA product Design e-3 comprising derived and/or modified sequence from HRSV(A2)__F_DSCav1_mut1 (opt4)
gggagacuuucccauucuguagcagaauuugguguugccuguggucuuggucccgcggagaagcuuaccauggagcugcugauccugaaggccaacgccaucaccaccauccugaccgccgugaccuucugcuucgccagcggccagaacaucaccgaggaguucuaccagagcaccugcagcgccgugagcaagggcuaccugggcgcccugagaaccggcugguacaccagcgugaucaccaucgagcugagcaacaucaaggagaacaagugcaacggcaccgacgccaaggugaagcugaucaagcaggagcuggacaaguacaagaacgccgugaccgagcugcagcugcugaugcagagcacccccgccaccggcagcggcagcgccaucugcagcggcguggccgugugcaaggugcugcaccuggagggcgaggugaacaagaucaagagcgcccugcugagcaccaacaaggccguggugagccugagcaacggcgugagcgugcugaccuucaaggugcuggaccugaagaacuacaucgacaagcagcugcugcccauccugaacaagcagagcugcagcauccccaacaucgagaccgugaucgaguuccagcagaagaacaacagacugcuggagaucaccagagaguucagcgugaacgccggcgugaccacccccgugagcaccuacaugcugaccaacagcgagcugcugagccugaucaacgacaugcccaucaccaacgaccagaagaagcugaugagcaacaacgugcagaucgugagacagcagagcuacagcaucaugugcaucaucaaggaggaggugcuggccuacguggugcagcugccccuguacggcgugaucgacacccccugcuggaagcugcacaccagcccccugugcaccaccaacaccaaggagggcagcaacaucugccugaccagaaccgacagaggcugguacugcgacaacgccggcagcgugagcuucuucccccaggccgagaccugcaaggugcagagcaacagaguguucugcgacaccaugaacagccugacccugcccagcgaggugaaccugugcaacguggacaucuucaaccccaaguacgacugcaagaucaugaccagcaagaccgacgugagcagcagcgugaucaccagccugggcgccaucgugagcugcuacggcaagaccaagugcaccgccagcaacaagaacagaggcaucaucaagaccuucagcaacggcugcgacuacgugagcaacaagggcguggacaccgugagcgugggcaacacccuguacugcgugaacaagcaggagggccagagccuguacgugaagggcgagcccaucaucaacuucuacgacccccugguguuccccagcgacgaguucgacgccagcaucagccaggugaacgagaagaucaaccagagccuggccuucaucagaaagagcgacgagcugcugcacaacgugaacgccggcaagagcaccaccaacaucaugaucaccaccaucaucaucgugaucaucgugauccugcugagccugaucgccgugggccugcugcuguacugcaaggccagaagcacccccgugacccugagcaaggaccagcugagcggcaucaacaacaucgccuucagcaacugaggacuaguguccaccugucccuccugggcugcuggauugucucguuuuccugccaaauaaacaggaucagcgcuuuacagaucuaaaaaaaaaaaaaaaaaaaaaaaaaaaaaaaaaaaaaaaaaaaaaaaaaaaaaaaaaaaaaaaaugcaucccccccccccccccccccccccccccccccaaaggcucuuuucagagccaccagaauu

SEQ ID NO: 1826 - RNA, 1889 nt, Artificial Sequence
  mRNA product Design e-3 comprising derived and/or modified sequence from HRSV(A2)__F_DSCav1_mut1 (opt5)
gggagacuuucccauucuguagcagaauuugguguugccuguggucuuggucccgcggagaagcuuaccauggagcugcucauccugaaggccaacgcuauuaccacaauccuuacggccgugaccuucugcuuugcgagcggccagaauauuacagaagaguucuaccaauccaccuguucugcugucagcaaaggguaucugggagcccucagaacaggcugguacaccuccguuaucacaauugaacugucuaacaucaaggagaauaaaugcaacgggaccgacgccaaggugaaacuuaucaagcaggaacuggauaaguauaaaaaugcugugacggagcuccagcugcugaugcagagcacccccgccacaggauccggcucugcuauuuguagcggggucgccgugugcaagguucuccaccuggagggagaagugaacaaaaucaaguccgcgcuucugagcaccaauaaagccgucgugucucucuccaacggcguuagcgugcugacauuuaagguccuugaccugaagaauuacauugauaaacaacuccugccuauccugaacaagcagucuuguuccauuccgaauaucgagaccgugauugaguuccagcagaaaaacaaucggcuccuggaaaucacgcgcgaguuuagcgugaacgcuggcgucacaacccccguuucuacauauaugcuuaccaauuccgaacugcucagccugaucaacgacaugccuauuaccaacgaucaaaagaaacuuauguccaauaacgugcagaucgugagacagcagucuuacagcauuaugugcaucauuaaggaggaaguccuggccuaugugguucaacucccccuguacggggugaucgacacaccuuguuggaaacugcauacgagcccccucugcaccacaaauaccaaggagggauccaacaucugucugacacggaccgaucgcggcugguacugcgacaaugcugggucugucuccuucuuuccucaggccgaaacguguaaggugcagagcaacagaguuuucugcgauacaaugaacucucuuacccugccgagcgaggugaaucucugcaaugucgacauuuuuaaccccaaauaugauuguaagaucaugaccuccaaaacagacgugucuagcuccgucauuaccagccugggagcgaucgugucuugcuacggcaagacaaaauguacggccuccaauaagaaccgggggauuaucaagaccuucagcaauggaugcgauuauguuucuaacaaaggcguggacacagucuccgugggcaauacccuuuacuguguuaacaagcaagaggggcagagccuguaugugaaaggagaaccuaucauuaacuuuuacgacccccucgucuucccuuccgaugaguuugacgcuucuaucagccaggugaaugaaaagauuaaccagucccuggccuucauccgcaaaucugaugagcugcuccacaaugugaacgcuggcaagagcacaaccaauauuaugaucacgaccauuaucaucguuauuaucgucauucugcuuucccugaucgccguggggcuccugcuguauugcaaggccagaagcacacccgugacccuuucuaaagaccaacucuccggaauuaacaauaucgcuuucagcaacugaggacuaguguccaccugucccuccugggcugcuggauugucucguuuuccugccaaauaaacaggaucagcgcuuuacagaucuaaaaaaaaaaaaaaaaaaaaaaaaaaaaaaaaaaaaaaaaaaaaaaaaaaaaaaaaaaaaaaaaugcaucccccccccccccccccccccccccccccccaaaggcucuuuucagagccaccagaauu

SEQ ID NO: 1827 - RNA, 1889 nt, Artificial Sequence
  mRNA product Design e-3 comprising derived and/or modified sequence from HRSV(A2)__F_DSCav1_mut1 (opt6)
gggagacuuucccauucuguagcagaauuugguguugccuguggucuuggucccgcggagaagcuuaccauggaacuauuaauacuaaaagcaaacgcuauaacaacaauacuaacagcagucacauucugcuuugcaucaggccaaaacaucacagaagaauuuuaccaaucaacaugcuccgccguaucgaaaggauaccuaggcgcauuaagaaccggaugguauacaucagucauaacaauugaacuaucuaacauaaaagaaaacaaauguaacggcacagaugccaaaguaaaacucaucaaacaagaauuagauaaauacaaaaacgcagucacugaacuacaacucuuaaugcaaucaacaccugcaacaggaucaggaucagcaauaugcucaggaguagccguauguaaaguacuacaccuagaaggagaagucaacaaaauaaaaucagcccuccuaaguacaaacaaagcugucguaucacuauccaaugguguuucaguacuaacuuucaaaguucuagaccuaaaaaacuacauagacaaacaacuacuaccaauacuaaauaaacaaaguuguucuauacccaacauagaaaccgucauagaauuucaacaaaaaaauaauagacuccuagaaauaacaagagaauuuucaguuaacgcagguguaacaaccccaguauccaccuauaugcuaacaaauucagaauuacuuucccuaaucaacgacaugcccauaacaaaugaccaaaaaaaauuaaugucaaacaacguccaaauaguucgucaacaaucauauucaauaaugugcauaauaaaagaagaagucuuagccuacguaguacaacuuccccuuuauggaguuaucgacacacccugcuggaaacuccacacuucaccacuauguacuacaaacacaaaagaaggauccaacaucugccucacaagaaccgaucgaggaugguacugugauaacgccggauccgucucauucuucccacaagcagaaacaugcaaaguacaaucaaacagaguauuuugcgacacaaugaacucccucacauuaccuucugaaguaaaccuauguaauguagacauauucaaccccaaauacgauugcaaaauaaugacaucaaagacagauguaucaucaagugucaucacaucccuaggagcaauugucucauguuaugguaaaacaaaaugcaccgcaucaaauaaaaacagaggcauaauaaaaaccuucucaaacgguugugacuacguauccaauaaaggcgucgacacaguaucaguagguaacacauuauauuguguaaacaaacaagaaggacagucccuauauguaaaaggagaaccaauaaucaacuucuacgacccacuuguuuucccuucugaugaauuugacgcaaguauaucacaaguaaaugaaaaaaucaaucaaucacuagccuuuauaagaaaaucagaugaauuauuacacaacguaaacgccggaaaaucaacaaccaacauaaugauaaccacaauaauaaucgucauaauagucauccuacuaucacucauagcaguuggacuccuacuauacugcaaagcacgaucaacaccaguaacauuauccaaagaccaacuaagugguaucaauaacaucgccuuuucaaacugaggacuaguguccaccugucccuccugggcugcuggauugucucguuuuccugccaaauaaacaggaucagcgcuuuacagaucuaaaaaaaaaaaaaaaaaaaaaaaaaaaaaaaaaaaaaaaaaaaaaaaaaaaaaaaaaaaaaaaaugcaucccccccccccccccccccccccccccccccaaaggcucuuuucagagccaccagaauu

SEQ ID NO: 1828 - RNA, 1889 nt, Artificial Sequence
  mRNA product Design e-3 comprising derived and/or modified sequence from HRSV(A2)__F_DSCav1_mut1 (opt11)
gggagacuuucccauucuguagcagaauuugguguugccuguggucuuggucccgcggagaagcuuaccauggaacuccuaauccucaaagccaacgcaaucaccacaauccucacugccgucaccuucugcuucgccuccggccaaaacauaacagaagaauuuuaccaaucaaccuguucagcggucuccaaaggcuaccucggcgcccuccgcaccggcugguacaccuccgugaucaccauagaacucuccaacaucaaggaaaacaaaugcaacggcaccgacgcgaaggucaaacuuauuaaacaagaacucgacaaauacaaaaacgcagucaccgaacuacaacuccuaaugcaguccacgccagccaccggcucuggcucagccauaugcuccgguguggccguaugcaaaguccuacaccucgaaggagaagucaacaaaauaaaauccgcccuacuguccacaaacaaggccguagucucccucucaaacggcgucucaguacucaccuucaaaguccuagaccucaagaacuacaucgacaaacaacuccuacccauacuaaacaaacaauccugcucaauccccaacaucgaaaccguaauagaauuucaacaaaaaaacaacagacuccuggagaucacccgggaauuuuccguaaacgccggagucacaacacccgucucaaccuacaugcuaacgaacucagagcuccucucacuuaucaacgacaugcccauaacaaacgaccaaaaaaaacucauguccaacaacgugcaaaucguccgacaacaauccuacuccaucaugugcaucauuaaagaagaaguccucgcauacguaguccagcucccccucuacggcgucauagacacccccugcuggaaacuacacacaucaccccucugcacaacaaacaccaaagaaggcuccaacaucugccucacccgcaccgaccgaggcugguacugcgauaacgccggcagcgucuccuucuucccccaagcagaaaccugcaagguccaauccaaccgaguuuucugcgacacuaugaacucgcucacccuccccuccgaagucaaccucugcaacgucgacauuuucaaccccaaauacgacugcaaaaucaugaccuccaagaccgacguauccuccuccgucaucaccucccuaggcgccauaguaaguugcuacggcaaaaccaagugcacagcaagcaacaaaaaccgaggaauaaucaaaaccuucuccaacggcugcgacuacguauccaacaagggcgucgacaccguauccguagggaacacccuuuacugcguaaacaaacaagaaggacaaucacucuacguaaaaggcgaacccauaaucaacuucuacgacccccucguauuucccuccgacgaauuugacgcaucaaucucacaggucaacgaaaaaauaaaccaaucgcuagcauucaucagaaaaucagacgaacuccuacacaacgucaacgcaggcaagagcaccaccaacaucaugaucaccaccaucaucaucgucauaaucgucauacuacucucacucauagcagucggccuccuccuauacuguaaagcaaggucgaccccagucacccuauccaaagaccaacuaagcggcaucaacaacaucgcguucucaaacuaaggacuaguguccaccugucccuccugggcugcuggauugucucguuuuccugccaaauaaacaggaucagcgcuuuacagaucuaaaaaaaaaaaaaaaaaaaaaaaaaaaaaaaaaaaaaaaaaaaaaaaaaaaaaaaaaaaaaaaaugcaucccccccccccccccccccccccccccccccaaaggcucuuuucagagccaccagaauu

SEQ ID NO: 1829 - RNA, 1943 nt, Artificial Sequence
  mRNA product Design e-4 comprising derived and/or modified sequence from HRSV(A2)__F_DSCav1_mut1 (opt1)
gggagacuccugucgggcggaaguaggaggaguagaguuuaaaaacaguacucuuuuuccgguucgggacguaguugaagcaacgacaagccggauaaccgcucuugagacaggaagcuuaccauggagcugcucauccugaaggccaacgccaucaccaccauccugacggcggugaccuucugcuucgccagcggccagaacaucaccgaggaguucuaccaguccacgugcagcgccgucuccaagggguaccucggcgcccugcggaccggcugguacaccuccgugaucaccaucgagcugagcaacaucaaggagaacaagugcaacgggaccgacgccaaggugaagcucaucaagcaggagcuggacaaguacaagaacgcggucacggagcugcagcuccugaugcaguccaccccggcaaccggcuccggcuccgccaucugcagcggcgucgccgugugcaaggugcugcaccucgagggggaggucaacaagaucaagagcgcccugcuguccaccaacaaggccguggugagccucuccaacggcgucagcgugcugaccuucaaggugcuggaccucaagaacuacaucgacaagcagcugcugcccauccugaacaagcagagcugcuccauccccaacaucgagacggugaucgaguuccagcagaagaacaaccggcuccuggagaucacccgcgaguucagcgugaacgccggggucaccacccccguguccacguacaugcugaccaacagcgagcuccugucccugaucaacgacaugccgaucaccaacgaccagaagaagcucaugagcaacaacgugcagaucguccggcagcaguccuacagcaucaugugcaucaucaaggaggaggugcuggcguacgugguccagcugccccucuacggcgugaucgacacccccugcuggaagcugcacacgagcccccugugcaccaccaacaccaaggagggguccaacaucugccucacgcgcaccgaccggggcugguacugcgacaacgccggcagcgucuccuucuucccgcaggccgagaccugcaaggugcagagcaaccgcguguucugcgacaccaugaacucccugacgcugcccagcgagguaaaccucugcaacgucgacaucuucaaccccaaguacgacugcaagaucaugaccuccaagaccgacgugagcuccagcgugaucaccucccugggggccaucgucagcugcuacggcaagacgaagugcaccgccagcaacaagaaccgggggaucaucaagaccuucuccaacggcugcgacuacgugagcaacaagggcguggacaccguguccgucgggaacacccuguacugcgugaacaagcaggagggccagagccucuacgugaagggggagcccaucaucaacuucuacgacccgcuggucuuccccuccgacgaguucgacgcgagcaucucccaggugaacgagaagaucaaccagagccuggccuucauccgcaaguccgacgagcugcuccacaacgugaacgccggcaagagcacgaccaacaucaugaucaccaccaucaucaucgucaucaucgugauccugcugucccucaucgccguggggcugcugcucuacugcaaggcccggagcacgcccgucacccuguccaaggaccagcugagcggcaucaacaacaucgcguucuccaacugaggacuaguguccaccugucccuccugggcugcuggauugucucguuuuccugccaaauaaacaggaucagcgcuuuacagaucuaaaaaaaaaaaaaaaaaaaaaaaaaaaaaaaaaaaaaaaaaaaaaaaaaaaaaaaaaaaaaaaaugcaucccccccccccccccccccccccccccccccaaaggcucuuuucagagccaccagaauu

SEQ ID NO: 1830 - RNA, 1943 nt, Artificial Sequence
  mRNA product Design e-4 comprising derived and/or modified sequence from HRSV(A2)__F_DSCav1_mut1 (opt1)
gggagacuccugucgggcggaaguaggaggaguagaguuuaaaaacaguacucuuuuuccgguucgggacguaguugaagcaacgacaagccggauaaccgcucuugagacaggaagcuuaccauggagcugcucauccugaaggccaacgccaucaccaccauccugacggcggugaccuucugcuucgccagcggccagaacaucaccgaggaguucuaccaguccacgugcagcgccgucuccaagggguaccucggcgcccugcgcaccgggugguacaccagcgugaucaccaucgagcuguccaacaucaaggagaacaagugcaacggcaccgacgccaaggugaagcucaucaagcaggagcuggacaaguacaagaacgcggucacggagcugcagcuccugaugcagagcacccccgccaccggguccggcagcgccaucugcuccggcguggccgugugcaagguccugcaccucgagggggaggugaacaagaucaagagcgcgcugcuguccaccaacaaggccguggucagccucuccaacggcgugagcgugcugacguucaagguccuggaccucaagaacuacaucgacaagcagcugcugccgauccucaacaagcaguccugcagcauccccaacaucgagaccgugaucgaguuccagcagaagaacaaccggcugcuggagaucacccgcgaguucuccgugaacgccggggucaccacgcccgugagcaccuacaugcucaccaacuccgagcugcugagccucaucaacgacaugcccaucaccaacgaccagaagaagcugaugagcaacaacgugcagaucguccggcagcaguccuacagcaucaugugcaucaucaaggaggaggugcuggccuacgugguccagcucccgcuguacggcgugaucgacacgcccugcuggaagcugcacaccagcccccucugcaccaccaacacgaaggagggguccaacaucugccugacccgcaccgaccggggcugguacugcgacaacgccggcuccgugagcuucuucccccaggcggagaccugcaagguccaguccaaccgcguguucugcgacacgaugaacagccugacccucccguccgaggucaaccugugcaacguggacaucuucaaccccaaguacgacugcaagaucaugaccagcaagaccgacguguccagcuccgucaucacgagccugggggccaucguguccugcuacggcaagaccaagugcaccgccagcaacaagaaccgggggaucaucaagaccuucuccaacggcugcgacuacgugagcaacaagggcgucgacacgguguccguggggaacacccucuacugcgucaacaagcaggagggccagagccuguacgugaagggggagcccaucaucaacuucuacgacccccugguguucccgagcgacgaguucgacgccuccaucagccaggucaacgagaagaucaaccagucccucgccuucauccgcaagagcgacgagcugcugcacaacgugaacgcgggcaaguccaccaccaacaucaugaucaccacgaucaucaucgugaucaucgucauccuccugagccugaucgccguggggcuccugcuguacugcaaggcccgguccacccccgugacccugagcaaggaccagcucuccggcaucaacaacaucgccuucagcaacugaggacuaguguccaccugucccuccugggcugcuggauugucucguuuuccugccaaauaaacaggaucagcgcuuuacagaucuaaaaaaaaaaaaaaaaaaaaaaaaaaaaaaaaaaaaaaaaaaaaaaaaaaaaaaaaaaaaaaaaugcaucccccccccccccccccccccccccccccccaaaggcucuuuucagagccaccagaauu

SEQ ID NO: 1831 - RNA, 1943 nt, Artificial Sequence
  mRNA product Design e-4 comprising derived and/or modified sequence from HRSV(A2)__F_DSCav1_mut1 (opt2)
gggagacuccugucgggcggaaguaggaggaguagaguuuaaaaacaguacucuuuuuccgguucgggacguaguugaagcaacgacaagccggauaaccgcucuugagacaggaagcuuaccauggagcuccucauccucaaggccaacgccaucaccaccauccucaccgccgucaccuucugcuucgccuccggccagaacaucaccgaggaguucuaccaguccaccugcuccgccgucuccaagggcuaccucggcgcccuccgcaccggcugguacaccuccgucaucaccaucgagcucuccaacaucaaggagaacaagugcaacggcaccgacgccaaggucaagcucaucaagcaggagcucgacaaguacaagaacgccgucaccgagcuccagcuccucaugcaguccacccccgccaccggcuccggcuccgccaucugcuccggcgucgccgucugcaagguccuccaccucgagggcgaggucaacaagaucaaguccgcccuccucuccaccaacaaggccgucgucucccucuccaacggcgucuccguccucaccuucaagguccucgaccucaagaacuacaucgacaagcagcuccuccccauccucaacaagcaguccugcuccauccccaacaucgagaccgucaucgaguuccagcagaagaacaaccgccuccucgagaucacccgcgaguucuccgucaacgccggcgucaccacccccgucuccaccuacaugcucaccaacuccgagcuccucucccucaucaacgacaugcccaucaccaacgaccagaagaagcucauguccaacaacguccagaucguccgccagcaguccuacuccaucaugugcaucaucaaggaggagguccucgccuacgucguccagcucccccucuacggcgucaucgacacccccugcuggaagcuccacaccuccccccucugcaccaccaacaccaaggagggcuccaacaucugccucacccgcaccgaccgcggcugguacugcgacaacgccggcuccgucuccuucuucccccaggccgagaccugcaagguccaguccaaccgcgucuucugcgacaccaugaacucccucacccuccccuccgaggucaaccucugcaacgucgacaucuucaaccccaaguacgacugcaagaucaugaccuccaagaccgacgucuccuccuccgucaucaccucccucggcgccaucgucuccugcuacggcaagaccaagugcaccgccuccaacaagaaccgcggcaucaucaagaccuucuccaacggcugcgacuacgucuccaacaagggcgucgacaccgucuccgucggcaacacccucuacugcgucaacaagcaggagggccagucccucuacgucaagggcgagcccaucaucaacuucuacgacccccucgucuuccccuccgacgaguucgacgccuccaucucccaggucaacgagaagaucaaccagucccucgccuucauccgcaaguccgacgagcuccuccacaacgucaacgccggcaaguccaccaccaacaucaugaucaccaccaucaucaucgucaucaucgucauccuccucucccucaucgccgucggccuccuccucuacugcaaggcccgcuccacccccgucacccucuccaaggaccagcucuccggcaucaacaacaucgccuucuccaacugaggacuaguguccaccugucccuccugggcugcuggauugucucguuuuccugccaaauaaacaggaucagcgcuuuacagaucuaaaaaaaaaaaaaaaaaaaaaaaaaaaaaaaaaaaaaaaaaaaaaaaaaaaaaaaaaaaaaaaaugcaucccccccccccccccccccccccccccccccaaaggcucuuuucagagccaccagaauu

SEQ ID NO: 1832 - RNA, 1943 nt, Artificial Sequence
  mRNA product Design e-4 comprising derived and/or modified sequence from HRSV(A2)__F_DSCav1_mut1 (opt3)
gggagacuccugucgggcggaaguaggaggaguagaguuuaaaaacaguacucuuuuuccgguucgggacguaguugaagcaacgacaagccggauaaccgcucuugagacaggaagcuuaccauggagcugcucauccuuaaggccaacgcuauuaccacaauacugacugcagugacguucugcuuugccagcggccagaauaucaccgaagaguucuaccaauccacauguucugcggucucaaaaggguauuugggagcuuuaagaacugguugguacaccaguguuauuacaaucgaacugagcaacauuaaggagaauaaaugcaacggcaccgacgccaaggugaaacuaaucaagcaggaacucgauaaguauaaaaaugcaguaacugagcugcagcuucugaugcaguccacacccgccaccgggucuggaucggcuauauguucaggcguggcagucugcaagguguugcaccucgagggugaaguuaacaaaaucaagagcgcccugcugaguacgaauaaagcuguggucucccucucuaacggggugagcguauuaacuuuuaagguucuggaccuuaagaauuacauugauaaacaauugcugccuauccuaaacaagcaguccuguucaauuccaaauaucgagaccgugauagaguuccagcagaaaaacaauaggcuccuggaaauuacacgggaguuuagugucaacgccggagugacuaccccggugagcacauauaugcuuaccaauucugaacuguugucccucaucaacgacaugcccauuacgaacgaucaaaagaaacugaugucaaauaacguccagaucguucgccagcagagcuacaguaucaugugcauuauaaaggaggaaguguuagcguauguagugcaacugccucucuacggcgucaucgacacuccauguuggaaacuucauacaucuccccugugcaccacuaauacaaaggagggcuccaacauuuguuugacccgaacggaucgugggugguacugcgacaaugcaggaagcgugucguucuuuccucaggccgaaaccuguaagguucagucuaacagaguguucugcgauacaaugaacucccuaacucugccaucagaggucaaucucugcaauguggacaucuuuaaccccaaauaugauuguaagauaaugaccaguaaaacagacguaagcuccucuguuauuacuagccugggugcuaucgugucaugcuacggcaagaccaaauguacagccaguaauaagaacagggggaucauuaagaccuucuccaauggaugcgauuaugucagcaacaaaggcguggacacugucucuguggguaauacgcuuuacuguguuaacaagcaagaggggcagucacuguaugugaaaggagaaccuaucauuaacuuuuacgacccauugguauucccgagugaugaguuugacgcaagcauaucccaggucaaugaaaagaucaaccagucucucgcuuucauucggaaaucggaugagcuguuacacaaugugaacgccggcaagagcacaaccaauaucaugaucacuaccauuauaaucguuauuaucgugauucugcuaucccucaucgcggucggccugcuuuuguauugcaaggcccgcucaacacccgugacccugaguaaagaccaacucucugggauaaacaauaucgcauucagcaacugaggacuaguguccaccugucccuccugggcugcuggauugucucguuuuccugccaaauaaacaggaucagcgcuuuacagaucuaaaaaaaaaaaaaaaaaaaaaaaaaaaaaaaaaaaaaaaaaaaaaaaaaaaaaaaaaaaaaaaaugcaucccccccccccccccccccccccccccccccaaaggcucuuuucagagccaccagaauu

SEQ ID NO: 1833 - RNA, 1943 nt, Artificial Sequence
  mRNA product Design e-4 comprising derived and/or modified sequence from HRSV(A2)__F_DSCav1_mut1 (opt4)
gggagacuccugucgggcggaaguaggaggaguagaguuuaaaaacaguacucuuuuuccgguucgggacguaguugaagcaacgacaagccggauaaccgcucuugagacaggaagcuuaccauggagcugcugauccugaaggccaacgccaucaccaccauccugaccgccgugaccuucugcuucgccagcggccagaacaucaccgaggaguucuaccagagcaccugcagcgccgugagcaagggcuaccugggcgcccugagaaccggcugguacaccagcgugaucaccaucgagcugagcaacaucaaggagaacaagugcaacggcaccgacgccaaggugaagcugaucaagcaggagcuggacaaguacaagaacgccgugaccgagcugcagcugcugaugcagagcacccccgccaccggcagcggcagcgccaucugcagcggcguggccgugugcaaggugcugcaccuggagggcgaggugaacaagaucaagagcgcccugcugagcaccaacaaggccguggugagccugagcaacggcgugagcgugcugaccuucaaggugcuggaccugaagaacuacaucgacaagcagcugcugcccauccugaacaagcagagcugcagcauccccaacaucgagaccgugaucgaguuccagcagaagaacaacagacugcuggagaucaccagagaguucagcgugaacgccggcgugaccacccccgugagcaccuacaugcugaccaacagcgagcugcugagccugaucaacgacaugcccaucaccaacgaccagaagaagcugaugagcaacaacgugcagaucgugagacagcagagcuacagcaucaugugcaucaucaaggaggaggugcuggccuacguggugcagcugccccuguacggcgugaucgacacccccugcuggaagcugcacaccagcccccugugcaccaccaacaccaaggagggcagcaacaucugccugaccagaaccgacagaggcugguacugcgacaacgccggcagcgugagcuucuucccccaggccgagaccugcaaggugcagagcaacagaguguucugcgacaccaugaacagccugacccugcccagcgaggugaaccugugcaacguggacaucuucaaccccaaguacgacugcaagaucaugaccagcaagaccgacgugagcagcagcgugaucaccagccugggcgccaucgugagcugcuacggcaagaccaagugcaccgccagcaacaagaacagaggcaucaucaagaccuucagcaacggcugcgacuacgugagcaacaagggcguggacaccgugagcgugggcaacacccuguacugcgugaacaagcaggagggccagagccuguacgugaagggcgagcccaucaucaacuucuacgacccccugguguuccccagcgacgaguucgacgccagcaucagccaggugaacgagaagaucaaccagagccuggccuucaucagaaagagcgacgagcugcugcacaacgugaacgccggcaagagcaccaccaacaucaugaucaccaccaucaucaucgugaucaucgugauccugcugagccugaucgccgugggccugcugcuguacugcaaggccagaagcacccccgugacccugagcaaggaccagcugagcggcaucaacaacaucgccuucagcaacugaggacuaguguccaccugucccuccugggcugcuggauugucucguuuuccugccaaauaaacaggaucagcgcuuuacagaucuaaaaaaaaaaaaaaaaaaaaaaaaaaaaaaaaaaaaaaaaaaaaaaaaaaaaaaaaaaaaaaaaugcaucccccccccccccccccccccccccccccccaaaggcucuuuucagagccaccagaauu

SEQ ID NO: 1834 - RNA, 1943 nt, Artificial Sequence
  mRNA product Design e-4 comprising derived and/or modified sequence from HRSV(A2)__F_DSCav1_mut1 (opt5)
gggagacuccugucgggcggaaguaggaggaguagaguuuaaaaacaguacucuuuuuccgguucgggacguaguugaagcaacgacaagccggauaaccgcucuugagacaggaagcuuaccauggagcugcucauccugaaggccaacgcuauuaccacaauccuuacggccgugaccuucugcuuugcgagcggccagaauauuacagaagaguucuaccaauccaccuguucugcugucagcaaaggguaucugggagcccucagaacaggcugguacaccuccguuaucacaauugaacugucuaacaucaaggagaauaaaugcaacgggaccgacgccaaggugaaacuuaucaagcaggaacuggauaaguauaaaaaugcugugacggagcuccagcugcugaugcagagcacccccgccacaggauccggcucugcuauuuguagcggggucgccgugugcaagguucuccaccuggagggagaagugaacaaaaucaaguccgcgcuucugagcaccaauaaagccgucgugucucucuccaacggcguuagcgugcugacauuuaagguccuugaccugaagaauuacauugauaaacaacuccugccuauccugaacaagcagucuuguuccauuccgaauaucgagaccgugauugaguuccagcagaaaaacaaucggcuccuggaaaucacgcgcgaguuuagcgugaacgcuggcgucacaacccccguuucuacauauaugcuuaccaauuccgaacugcucagccugaucaacgacaugccuauuaccaacgaucaaaagaaacuuauguccaauaacgugcagaucgugagacagcagucuuacagcauuaugugcaucauuaaggaggaaguccuggccuaugugguucaacucccccuguacggggugaucgacacaccuuguuggaaacugcauacgagcccccucugcaccacaaauaccaaggagggauccaacaucugucugacacggaccgaucgcggcugguacugcgacaaugcugggucugucuccuucuuuccucaggccgaaacguguaaggugcagagcaacagaguuuucugcgauacaaugaacucucuuacccugccgagcgaggugaaucucugcaaugucgacauuuuuaaccccaaauaugauuguaagaucaugaccuccaaaacagacgugucuagcuccgucauuaccagccugggagcgaucgugucuugcuacggcaagacaaaauguacggccuccaauaagaaccgggggauuaucaagaccuucagcaauggaugcgauuauguuucuaacaaaggcguggacacagucuccgugggcaauacccuuuacuguguuaacaagcaagaggggcagagccuguaugugaaaggagaaccuaucauuaacuuuuacgacccccucgucuucccuuccgaugaguuugacgcuucuaucagccaggugaaugaaaagauuaaccagucccuggccuucauccgcaaaucugaugagcugcuccacaaugugaacgcuggcaagagcacaaccaauauuaugaucacgaccauuaucaucguuauuaucgucauucugcuuucccugaucgccguggggcuccugcuguauugcaaggccagaagcacacccgugacccuuucuaaagaccaacucuccggaauuaacaauaucgcuuucagcaacugaggacuaguguccaccugucccuccugggcugcuggauugucucguuuuccugccaaauaaacaggaucagcgcuuuacagaucuaaaaaaaaaaaaaaaaaaaaaaaaaaaaaaaaaaaaaaaaaaaaaaaaaaaaaaaaaaaaaaaaugcaucccccccccccccccccccccccccccccccaaaggcucuuuucagagccaccagaauu

SEQ ID NO: 1835 - RNA, 1943 nt, Artificial Sequence
  mRNA product Design e-4 comprising derived and/or modified sequence from HRSV(A2)__F_DSCav1_mut1 (opt6)
gggagacuccugucgggcggaaguaggaggaguagaguuuaaaaacaguacucuuuuuccgguucgggacguaguugaagcaacgacaagccggauaaccgcucuugagacaggaagcuuaccauggaacuauuaauacuaaaagcaaacgcuauaacaacaauacuaacagcagucacauucugcuuugcaucaggccaaaacaucacagaagaauuuuaccaaucaacaugcuccgccguaucgaaaggauaccuaggcgcauuaagaaccggaugguauacaucagucauaacaauugaacuaucuaacauaaaagaaaacaaauguaacggcacagaugccaaaguaaaacucaucaaacaagaauuagauaaauacaaaaacgcagucacugaacuacaacucuuaaugcaaucaacaccugcaacaggaucaggaucagcaauaugcucaggaguagccguauguaaaguacuacaccuagaaggagaagucaacaaaauaaaaucagcccuccuaaguacaaacaaagcugucguaucacuauccaaugguguuucaguacuaacuuucaaaguucuagaccuaaaaaacuacauagacaaacaacuacuaccaauacuaaauaaacaaaguuguucuauacccaacauagaaaccgucauagaauuucaacaaaaaaauaauagacuccuagaaauaacaagagaauuuucaguuaacgcagguguaacaaccccaguauccaccuauaugcuaacaaauucagaauuacuuucccuaaucaacgacaugcccauaacaaaugaccaaaaaaaauuaaugucaaacaacguccaaauaguucgucaacaaucauauucaauaaugugcauaauaaaagaagaagucuuagccuacguaguacaacuuccccuuuauggaguuaucgacacacccugcuggaaacuccacacuucaccacuauguacuacaaacacaaaagaaggauccaacaucugccucacaagaaccgaucgaggaugguacugugauaacgccggauccgucucauucuucccacaagcagaaacaugcaaaguacaaucaaacagaguauuuugcgacacaaugaacucccucacauuaccuucugaaguaaaccuauguaauguagacauauucaaccccaaauacgauugcaaaauaaugacaucaaagacagauguaucaucaagugucaucacaucccuaggagcaauugucucauguuaugguaaaacaaaaugcaccgcaucaaauaaaaacagaggcauaauaaaaaccuucucaaacgguugugacuacguauccaauaaaggcgucgacacaguaucaguagguaacacauuauauuguguaaacaaacaagaaggacagucccuauauguaaaaggagaaccaauaaucaacuucuacgacccacuuguuuucccuucugaugaauuugacgcaaguauaucacaaguaaaugaaaaaaucaaucaaucacuagccuuuauaagaaaaucagaugaauuauuacacaacguaaacgccggaaaaucaacaaccaacauaaugauaaccacaauaauaaucgucauaauagucauccuacuaucacucauagcaguuggacuccuacuauacugcaaagcacgaucaacaccaguaacauuauccaaagaccaacuaagugguaucaauaacaucgccuuuucaaacugaggacuaguguccaccugucccuccugggcugcuggauugucucguuuuccugccaaauaaacaggaucagcgcuuuacagaucuaaaaaaaaaaaaaaaaaaaaaaaaaaaaaaaaaaaaaaaaaaaaaaaaaaaaaaaaaaaaaaaaugcaucccccccccccccccccccccccccccccccaaaggcucuuuucagagccaccagaauu

SEQ ID NO: 1836 - RNA, 1943 nt, Artificial Sequence
  mRNA product Design e-4 comprising derived and/or modified sequence from HRSV(A2)__F_DSCav1_mut1 (opt11)
gggagacuccugucgggcggaaguaggaggaguagaguuuaaaaacaguacucuuuuuccgguucgggacguaguugaagcaacgacaagccggauaaccgcucuugagacaggaagcuuaccauggaacuccuaauccucaaagccaacgcaaucaccacaauccucacugccgucaccuucugcuucgccuccggccaaaacauaacagaagaauuuuaccaaucaaccuguucagcggucuccaaaggcuaccucggcgcccuccgcaccggcugguacaccuccgugaucaccauagaacucuccaacaucaaggaaaacaaaugcaacggcaccgacgcgaaggucaaacuuauuaaacaagaacucgacaaauacaaaaacgcagucaccgaacuacaacuccuaaugcaguccacgccagccaccggcucuggcucagccauaugcuccgguguggccguaugcaaaguccuacaccucgaaggagaagucaacaaaauaaaauccgcccuacuguccacaaacaaggccguagucucccucucaaacggcgucucaguacucaccuucaaaguccuagaccucaagaacuacaucgacaaacaacuccuacccauacuaaacaaacaauccugcucaauccccaacaucgaaaccguaauagaauuucaacaaaaaaacaacagacuccuggagaucacccgggaauuuuccguaaacgccggagucacaacacccgucucaaccuacaugcuaacgaacucagagcuccucucacuuaucaacgacaugcccauaacaaacgaccaaaaaaaacucauguccaacaacgugcaaaucguccgacaacaauccuacuccaucaugugcaucauuaaagaagaaguccucgcauacguaguccagcucccccucuacggcgucauagacacccccugcuggaaacuacacacaucaccccucugcacaacaaacaccaaagaaggcuccaacaucugccucacccgcaccgaccgaggcugguacugcgauaacgccggcagcgucuccuucuucccccaagcagaaaccugcaagguccaauccaaccgaguuuucugcgacacuaugaacucgcucacccuccccuccgaagucaaccucugcaacgucgacauuuucaaccccaaauacgacugcaaaaucaugaccuccaagaccgacguauccuccuccgucaucaccucccuaggcgccauaguaaguugcuacggcaaaaccaagugcacagcaagcaacaaaaaccgaggaauaaucaaaaccuucuccaacggcugcgacuacguauccaacaagggcgucgacaccguauccguagggaacacccuuuacugcguaaacaaacaagaaggacaaucacucuacguaaaaggcgaacccauaaucaacuucuacgacccccucguauuucccuccgacgaauuugacgcaucaaucucacaggucaacgaaaaaauaaaccaaucgcuagcauucaucagaaaaucagacgaacuccuacacaacgucaacgcaggcaagagcaccaccaacaucaugaucaccaccaucaucaucgucauaaucgucauacuacucucacucauagcagucggccuccuccuauacuguaaagcaaggucgaccccagucacccuauccaaagaccaacuaagcggcaucaacaacaucgcguucucaaacuaaggacuaguguccaccugucccuccugggcugcuggauugucucguuuuccugccaaauaaacaggaucagcgcuuuacagaucuaaaaaaaaaaaaaaaaaaaaaaaaaaaaaaaaaaaaaaaaaaaaaaaaaaaaaaaaaaaaaaaaugcaucccccccccccccccccccccccccccccccaaaggcucuuuucagagccaccagaauu

SEQ ID NO: 1837 - RNA, 1910 nt, Artificial Sequence
  mRNA product Design e-5 comprising derived and/or modified sequence from HRSV(A2)__F_DSCav1_mut1 (opt1)
gggagagcggcucggccauuuugucccagucaguccggaggcugcggcugcagaaguaccgccugcggaguaacugcaaagaagcuuaccauggagcugcucauccugaaggccaacgccaucaccaccauccugacggcggugaccuucugcuucgccagcggccagaacaucaccgaggaguucuaccaguccacgugcagcgccgucuccaagggguaccucggcgcccugcggaccggcugguacaccuccgugaucaccaucgagcugagcaacaucaaggagaacaagugcaacgggaccgacgccaaggugaagcucaucaagcaggagcuggacaaguacaagaacgcggucacggagcugcagcuccugaugcaguccaccccggcaaccggcuccggcuccgccaucugcagcggcgucgccgugugcaaggugcugcaccucgagggggaggucaacaagaucaagagcgcccugcuguccaccaacaaggccguggugagccucuccaacggcgucagcgugcugaccuucaaggugcuggaccucaagaacuacaucgacaagcagcugcugcccauccugaacaagcagagcugcuccauccccaacaucgagacggugaucgaguuccagcagaagaacaaccggcuccuggagaucacccgcgaguucagcgugaacgccggggucaccacccccguguccacguacaugcugaccaacagcgagcuccugucccugaucaacgacaugccgaucaccaacgaccagaagaagcucaugagcaacaacgugcagaucguccggcagcaguccuacagcaucaugugcaucaucaaggaggaggugcuggcguacgugguccagcugccccucuacggcgugaucgacacccccugcuggaagcugcacacgagcccccugugcaccaccaacaccaaggagggguccaacaucugccucacgcgcaccgaccggggcugguacugcgacaacgccggcagcgucuccuucuucccgcaggccgagaccugcaaggugcagagcaaccgcguguucugcgacaccaugaacucccugacgcugcccagcgagguaaaccucugcaacgucgacaucuucaaccccaaguacgacugcaagaucaugaccuccaagaccgacgugagcuccagcgugaucaccucccugggggccaucgucagcugcuacggcaagacgaagugcaccgccagcaacaagaaccgggggaucaucaagaccuucuccaacggcugcgacuacgugagcaacaagggcguggacaccguguccgucgggaacacccuguacugcgugaacaagcaggagggccagagccucuacgugaagggggagcccaucaucaacuucuacgacccgcuggucuuccccuccgacgaguucgacgcgagcaucucccaggugaacgagaagaucaaccagagccuggccuucauccgcaaguccgacgagcugcuccacaacgugaacgccggcaagagcacgaccaacaucaugaucaccaccaucaucaucgucaucaucgugauccugcugucccucaucgccguggggcugcugcucuacugcaaggcccggagcacgcccgucacccuguccaaggaccagcugagcggcaucaacaacaucgcguucuccaacugaggacuaguguccaccugucccuccugggcugcuggauugucucguuuuccugccaaauaaacaggaucagcgcuuuacagaucuaaaaaaaaaaaaaaaaaaaaaaaaaaaaaaaaaaaaaaaaaaaaaaaaaaaaaaaaaaaaaaaaugcaucccccccccccccccccccccccccccccccaaaggcucuuuucagagccaccagaauu

SEQ ID NO: 1838 - RNA, 1910 nt, Artificial Sequence
  mRNA product Design e-5 comprising derived and/or modified sequence from HRSV(A2)__F_DSCav1_mut1 (opt1)
gggagagcggcucggccauuuugucccagucaguccggaggcugcggcugcagaaguaccgccugcggaguaacugcaaagaagcuuaccauggagcugcucauccugaaggccaacgccaucaccaccauccugacggcggugaccuucugcuucgccagcggccagaacaucaccgaggaguucuaccaguccacgugcagcgccgucuccaagggguaccucggcgcccugcgcaccgggugguacaccagcgugaucaccaucgagcuguccaacaucaaggagaacaagugcaacggcaccgacgccaaggugaagcucaucaagcaggagcuggacaaguacaagaacgcggucacggagcugcagcuccugaugcagagcacccccgccaccggguccggcagcgccaucugcuccggcguggccgugugcaagguccugcaccucgagggggaggugaacaagaucaagagcgcgcugcuguccaccaacaaggccguggucagccucuccaacggcgugagcgugcugacguucaagguccuggaccucaagaacuacaucgacaagcagcugcugccgauccucaacaagcaguccugcagcauccccaacaucgagaccgugaucgaguuccagcagaagaacaaccggcugcuggagaucacccgcgaguucuccgugaacgccggggucaccacgcccgugagcaccuacaugcucaccaacuccgagcugcugagccucaucaacgacaugcccaucaccaacgaccagaagaagcugaugagcaacaacgugcagaucguccggcagcaguccuacagcaucaugugcaucaucaaggaggaggugcuggccuacgugguccagcucccgcuguacggcgugaucgacacgcccugcuggaagcugcacaccagcccccucugcaccaccaacacgaaggagggguccaacaucugccugacccgcaccgaccggggcugguacugcgacaacgccggcuccgugagcuucuucccccaggcggagaccugcaagguccaguccaaccgcguguucugcgacacgaugaacagccugacccucccguccgaggucaaccugugcaacguggacaucuucaaccccaaguacgacugcaagaucaugaccagcaagaccgacguguccagcuccgucaucacgagccugggggccaucguguccugcuacggcaagaccaagugcaccgccagcaacaagaaccgggggaucaucaagaccuucuccaacggcugcgacuacgugagcaacaagggcgucgacacgguguccguggggaacacccucuacugcgucaacaagcaggagggccagagccuguacgugaagggggagcccaucaucaacuucuacgacccccugguguucccgagcgacgaguucgacgccuccaucagccaggucaacgagaagaucaaccagucccucgccuucauccgcaagagcgacgagcugcugcacaacgugaacgcgggcaaguccaccaccaacaucaugaucaccacgaucaucaucgugaucaucgucauccuccugagccugaucgccguggggcuccugcuguacugcaaggcccgguccacccccgugacccugagcaaggaccagcucuccggcaucaacaacaucgccuucagcaacugaggacuaguguccaccugucccuccugggcugcuggauugucucguuuuccugccaaauaaacaggaucagcgcuuuacagaucuaaaaaaaaaaaaaaaaaaaaaaaaaaaaaaaaaaaaaaaaaaaaaaaaaaaaaaaaaaaaaaaaugcaucccccccccccccccccccccccccccccccaaaggcucuuuucagagccaccagaauu

SEQ ID NO: 1839 - RNA, 1910 nt, Artificial Sequence
  mRNA product Design e-5 comprising derived and/or modified sequence from HRSV(A2)__F_DSCav1_mut1 (opt2)
gggagagcggcucggccauuuugucccagucaguccggaggcugcggcugcagaaguaccgccugcggaguaacugcaaagaagcuuaccauggagcuccucauccucaaggccaacgccaucaccaccauccucaccgccgucaccuucugcuucgccuccggccagaacaucaccgaggaguucuaccaguccaccugcuccgccgucuccaagggcuaccucggcgcccuccgcaccggcugguacaccuccgucaucaccaucgagcucuccaacaucaaggagaacaagugcaacggcaccgacgccaaggucaagcucaucaagcaggagcucgacaaguacaagaacgccgucaccgagcuccagcuccucaugcaguccacccccgccaccggcuccggcuccgccaucugcuccggcgucgccgucugcaagguccuccaccucgagggcgaggucaacaagaucaaguccgcccuccucuccaccaacaaggccgucgucucccucuccaacggcgucuccguccucaccuucaagguccucgaccucaagaacuacaucgacaagcagcuccuccccauccucaacaagcaguccugcuccauccccaacaucgagaccgucaucgaguuccagcagaagaacaaccgccuccucgagaucacccgcgaguucuccgucaacgccggcgucaccacccccgucuccaccuacaugcucaccaacuccgagcuccucucccucaucaacgacaugcccaucaccaacgaccagaagaagcucauguccaacaacguccagaucguccgccagcaguccuacuccaucaugugcaucaucaaggaggagguccucgccuacgucguccagcucccccucuacggcgucaucgacacccccugcuggaagcuccacaccuccccccucugcaccaccaacaccaaggagggcuccaacaucugccucacccgcaccgaccgcggcugguacugcgacaacgccggcuccgucuccuucuucccccaggccgagaccugcaagguccaguccaaccgcgucuucugcgacaccaugaacucccucacccuccccuccgaggucaaccucugcaacgucgacaucuucaaccccaaguacgacugcaagaucaugaccuccaagaccgacgucuccuccuccgucaucaccucccucggcgccaucgucuccugcuacggcaagaccaagugcaccgccuccaacaagaaccgcggcaucaucaagaccuucuccaacggcugcgacuacgucuccaacaagggcgucgacaccgucuccgucggcaacacccucuacugcgucaacaagcaggagggccagucccucuacgucaagggcgagcccaucaucaacuucuacgacccccucgucuuccccuccgacgaguucgacgccuccaucucccaggucaacgagaagaucaaccagucccucgccuucauccgcaaguccgacgagcuccuccacaacgucaacgccggcaaguccaccaccaacaucaugaucaccaccaucaucaucgucaucaucgucauccuccucucccucaucgccgucggccuccuccucuacugcaaggcccgcuccacccccgucacccucuccaaggaccagcucuccggcaucaacaacaucgccuucuccaacugaggacuaguguccaccugucccuccugggcugcuggauugucucguuuuccugccaaauaaacaggaucagcgcuuuacagaucuaaaaaaaaaaaaaaaaaaaaaaaaaaaaaaaaaaaaaaaaaaaaaaaaaaaaaaaaaaaaaaaaugcaucccccccccccccccccccccccccccccccaaaggcucuuuucagagccaccagaauu

SEQ ID NO: 1840 - RNA, 1910 nt, Artificial Sequence
  mRNA product Design e-5 comprising derived and/or modified sequence from HRSV(A2)__F_DSCav1_mut1 (opt3)
gggagagcggcucggccauuuugucccagucaguccggaggcugcggcugcagaaguaccgccugcggaguaacugcaaagaagcuuaccauggagcugcucauccuuaaggccaacgcuauuaccacaauacugacugcagugacguucugcuuugccagcggccagaauaucaccgaagaguucuaccaauccacauguucugcggucucaaaaggguauuugggagcuuuaagaacugguugguacaccaguguuauuacaaucgaacugagcaacauuaaggagaauaaaugcaacggcaccgacgccaaggugaaacuaaucaagcaggaacucgauaaguauaaaaaugcaguaacugagcugcagcuucugaugcaguccacacccgccaccgggucuggaucggcuauauguucaggcguggcagucugcaagguguugcaccucgagggugaaguuaacaaaaucaagagcgcccugcugaguacgaauaaagcuguggucucccucucuaacggggugagcguauuaacuuuuaagguucuggaccuuaagaauuacauugauaaacaauugcugccuauccuaaacaagcaguccuguucaauuccaaauaucgagaccgugauagaguuccagcagaaaaacaauaggcuccuggaaauuacacgggaguuuagugucaacgccggagugacuaccccggugagcacauauaugcuuaccaauucugaacuguugucccucaucaacgacaugcccauuacgaacgaucaaaagaaacugaugucaaauaacguccagaucguucgccagcagagcuacaguaucaugugcauuauaaaggaggaaguguuagcguauguagugcaacugccucucuacggcgucaucgacacuccauguuggaaacuucauacaucuccccugugcaccacuaauacaaaggagggcuccaacauuuguuugacccgaacggaucgugggugguacugcgacaaugcaggaagcgugucguucuuuccucaggccgaaaccuguaagguucagucuaacagaguguucugcgauacaaugaacucccuaacucugccaucagaggucaaucucugcaauguggacaucuuuaaccccaaauaugauuguaagauaaugaccaguaaaacagacguaagcuccucuguuauuacuagccugggugcuaucgugucaugcuacggcaagaccaaauguacagccaguaauaagaacagggggaucauuaagaccuucuccaauggaugcgauuaugucagcaacaaaggcguggacacugucucuguggguaauacgcuuuacuguguuaacaagcaagaggggcagucacuguaugugaaaggagaaccuaucauuaacuuuuacgacccauugguauucccgagugaugaguuugacgcaagcauaucccaggucaaugaaaagaucaaccagucucucgcuuucauucggaaaucggaugagcuguuacacaaugugaacgccggcaagagcacaaccaauaucaugaucacuaccauuauaaucguuauuaucgugauucugcuaucccucaucgcggucggccugcuuuuguauugcaaggcccgcucaacacccgugacccugaguaaagaccaacucucugggauaaacaauaucgcauucagcaacugaggacuaguguccaccugucccuccugggcugcuggauugucucguuuuccugccaaauaaacaggaucagcgcuuuacagaucuaaaaaaaaaaaaaaaaaaaaaaaaaaaaaaaaaaaaaaaaaaaaaaaaaaaaaaaaaaaaaaaaugcaucccccccccccccccccccccccccccccccaaaggcucuuuucagagccaccagaauu

SEQ ID NO: 1841 - RNA, 1910 nt, Artificial Sequence
  mRNA product Design e-5 comprising derived and/or modified sequence from HRSV(A2)__F_DSCav1_mut1 (opt4)
gggagagcggcucggccauuuugucccagucaguccggaggcugcggcugcagaaguaccgccugcggaguaacugcaaagaagcuuaccauggagcugcugauccugaaggccaacgccaucaccaccauccugaccgccgugaccuucugcuucgccagcggccagaacaucaccgaggaguucuaccagagcaccugcagcgccgugagcaagggcuaccugggcgcccugagaaccggcugguacaccagcgugaucaccaucgagcugagcaacaucaaggagaacaagugcaacggcaccgacgccaaggugaagcugaucaagcaggagcuggacaaguacaagaacgccgugaccgagcugcagcugcugaugcagagcacccccgccaccggcagcggcagcgccaucugcagcggcguggccgugugcaaggugcugcaccuggagggcgaggugaacaagaucaagagcgcccugcugagcaccaacaaggccguggugagccugagcaacggcgugagcgugcugaccuucaaggugcuggaccugaagaacuacaucgacaagcagcugcugcccauccugaacaagcagagcugcagcauccccaacaucgagaccgugaucgaguuccagcagaagaacaacagacugcuggagaucaccagagaguucagcgugaacgccggcgugaccacccccgugagcaccuacaugcugaccaacagcgagcugcugagccugaucaacgacaugcccaucaccaacgaccagaagaagcugaugagcaacaacgugcagaucgugagacagcagagcuacagcaucaugugcaucaucaaggaggaggugcuggccuacguggugcagcugccccuguacggcgugaucgacacccccugcuggaagcugcacaccagcccccugugcaccaccaacaccaaggagggcagcaacaucugccugaccagaaccgacagaggcugguacugcgacaacgccggcagcgugagcuucuucccccaggccgagaccugcaaggugcagagcaacagaguguucugcgacaccaugaacagccugacccugcccagcgaggugaaccugugcaacguggacaucuucaaccccaaguacgacugcaagaucaugaccagcaagaccgacgugagcagcagcgugaucaccagccugggcgccaucgugagcugcuacggcaagaccaagugcaccgccagcaacaagaacagaggcaucaucaagaccuucagcaacggcugcgacuacgugagcaacaagggcguggacaccgugagcgugggcaacacccuguacugcgugaacaagcaggagggccagagccuguacgugaagggcgagcccaucaucaacuucuacgacccccugguguuccccagcgacgaguucgacgccagcaucagccaggugaacgagaagaucaaccagagccuggccuucaucagaaagagcgacgagcugcugcacaacgugaacgccggcaagagcaccaccaacaucaugaucaccaccaucaucaucgugaucaucgugauccugcugagccugaucgccgugggccugcugcuguacugcaaggccagaagcacccccgugacccugagcaaggaccagcugagcggcaucaacaacaucgccuucagcaacugaggacuaguguccaccugucccuccugggcugcuggauugucucguuuuccugccaaauaaacaggaucagcgcuuuacagaucuaaaaaaaaaaaaaaaaaaaaaaaaaaaaaaaaaaaaaaaaaaaaaaaaaaaaaaaaaaaaaaaaugcaucccccccccccccccccccccccccccccccaaaggcucuuuucagagccaccagaauu

SEQ ID NO: 1842 - RNA, 1910 nt, Artificial Sequence
  mRNA product Design e-5 comprising derived and/or modified sequence from HRSV(A2)__F_DSCav1_mut1 (opt5)
gggagagcggcucggccauuuugucccagucaguccggaggcugcggcugcagaaguaccgccugcggaguaacugcaaagaagcuuaccauggagcugcucauccugaaggccaacgcuauuaccacaauccuuacggccgugaccuucugcuuugcgagcggccagaauauuacagaagaguucuaccaauccaccuguucugcugucagcaaaggguaucugggagcccucagaacaggcugguacaccuccguuaucacaauugaacugucuaacaucaaggagaauaaaugcaacgggaccgacgccaaggugaaacuuaucaagcaggaacuggauaaguauaaaaaugcugugacggagcuccagcugcugaugcagagcacccccgccacaggauccggcucugcuauuuguagcggggucgccgugugcaagguucuccaccuggagggagaagugaacaaaaucaaguccgcgcuucugagcaccaauaaagccgucgugucucucuccaacggcguuagcgugcugacauuuaagguccuugaccugaagaauuacauugauaaacaacuccugccuauccugaacaagcagucuuguuccauuccgaauaucgagaccgugauugaguuccagcagaaaaacaaucggcuccuggaaaucacgcgcgaguuuagcgugaacgcuggcgucacaacccccguuucuacauauaugcuuaccaauuccgaacugcucagccugaucaacgacaugccuauuaccaacgaucaaaagaaacuuauguccaauaacgugcagaucgugagacagcagucuuacagcauuaugugcaucauuaaggaggaaguccuggccuaugugguucaacucccccuguacggggugaucgacacaccuuguuggaaacugcauacgagcccccucugcaccacaaauaccaaggagggauccaacaucugucugacacggaccgaucgcggcugguacugcgacaaugcugggucugucuccuucuuuccucaggccgaaacguguaaggugcagagcaacagaguuuucugcgauacaaugaacucucuuacccugccgagcgaggugaaucucugcaaugucgacauuuuuaaccccaaauaugauuguaagaucaugaccuccaaaacagacgugucuagcuccgucauuaccagccugggagcgaucgugucuugcuacggcaagacaaaauguacggccuccaauaagaaccgggggauuaucaagaccuucagcaauggaugcgauuauguuucuaacaaaggcguggacacagucuccgugggcaauacccuuuacuguguuaacaagcaagaggggcagagccuguaugugaaaggagaaccuaucauuaacuuuuacgacccccucgucuucccuuccgaugaguuugacgcuucuaucagccaggugaaugaaaagauuaaccagucccuggccuucauccgcaaaucugaugagcugcuccacaaugugaacgcuggcaagagcacaaccaauauuaugaucacgaccauuaucaucguuauuaucgucauucugcuuucccugaucgccguggggcuccugcuguauugcaaggccagaagcacacccgugacccuuucuaaagaccaacucuccggaauuaacaauaucgcuuucagcaacugaggacuaguguccaccugucccuccugggcugcuggauugucucguuuuccugccaaauaaacaggaucagcgcuuuacagaucuaaaaaaaaaaaaaaaaaaaaaaaaaaaaaaaaaaaaaaaaaaaaaaaaaaaaaaaaaaaaaaaaugcaucccccccccccccccccccccccccccccccaaaggcucuuuucagagccaccagaauu

SEQ ID NO: 1843 - RNA, 1910 nt, Artificial Sequence
  mRNA product Design e-5 comprising derived and/or modified sequence from HRSV(A2)__F_DSCav1_mut1 (opt6)
gggagagcggcucggccauuuugucccagucaguccggaggcugcggcugcagaaguaccgccugcggaguaacugcaaagaagcuuaccauggaacuauuaauacuaaaagcaaacgcuauaacaacaauacuaacagcagucacauucugcuuugcaucaggccaaaacaucacagaagaauuuuaccaaucaacaugcuccgccguaucgaaaggauaccuaggcgcauuaagaaccggaugguauacaucagucauaacaauugaacuaucuaacauaaaagaaaacaaauguaacggcacagaugccaaaguaaaacucaucaaacaagaauuagauaaauacaaaaacgcagucacugaacuacaacucuuaaugcaaucaacaccugcaacaggaucaggaucagcaauaugcucaggaguagccguauguaaaguacuacaccuagaaggagaagucaacaaaauaaaaucagcccuccuaaguacaaacaaagcugucguaucacuauccaaugguguuucaguacuaacuuucaaaguucuagaccuaaaaaacuacauagacaaacaacuacuaccaauacuaaauaaacaaaguuguucuauacccaacauagaaaccgucauagaauuucaacaaaaaaauaauagacuccuagaaauaacaagagaauuuucaguuaacgcagguguaacaaccccaguauccaccuauaugcuaacaaauucagaauuacuuucccuaaucaacgacaugcccauaacaaaugaccaaaaaaaauuaaugucaaacaacguccaaauaguucgucaacaaucauauucaauaaugugcauaauaaaagaagaagucuuagccuacguaguacaacuuccccuuuauggaguuaucgacacacccugcuggaaacuccacacuucaccacuauguacuacaaacacaaaagaaggauccaacaucugccucacaagaaccgaucgaggaugguacugugauaacgccggauccgucucauucuucccacaagcagaaacaugcaaaguacaaucaaacagaguauuuugcgacacaaugaacucccucacauuaccuucugaaguaaaccuauguaauguagacauauucaaccccaaauacgauugcaaaauaaugacaucaaagacagauguaucaucaagugucaucacaucccuaggagcaauugucucauguuaugguaaaacaaaaugcaccgcaucaaauaaaaacagaggcauaauaaaaaccuucucaaacgguugugacuacguauccaauaaaggcgucgacacaguaucaguagguaacacauuauauuguguaaacaaacaagaaggacagucccuauauguaaaaggagaaccaauaaucaacuucuacgacccacuuguuuucccuucugaugaauuugacgcaaguauaucacaaguaaaugaaaaaaucaaucaaucacuagccuuuauaagaaaaucagaugaauuauuacacaacguaaacgccggaaaaucaacaaccaacauaaugauaaccacaauaauaaucgucauaauagucauccuacuaucacucauagcaguuggacuccuacuauacugcaaagcacgaucaacaccaguaacauuauccaaagaccaacuaagugguaucaauaacaucgccuuuucaaacugaggacuaguguccaccugucccuccugggcugcuggauugucucguuuuccugccaaauaaacaggaucagcgcuuuacagaucuaaaaaaaaaaaaaaaaaaaaaaaaaaaaaaaaaaaaaaaaaaaaaaaaaaaaaaaaaaaaaaaaugcaucccccccccccccccccccccccccccccccaaaggcucuuuucagagccaccagaauu

SEQ ID NO: 1844 - RNA, 1910 nt, Artificial Sequence
  mRNA product Design e-5 comprising derived and/or modified sequence from HRSV(A2)__F_DSCav1_mut1 (opt11)
gggagagcggcucggccauuuugucccagucaguccggaggcugcggcugcagaaguaccgccugcggaguaacugcaaagaagcuuaccauggaacuccuaauccucaaagccaacgcaaucaccacaauccucacugccgucaccuucugcuucgccuccggccaaaacauaacagaagaauuuuaccaaucaaccuguucagcggucuccaaaggcuaccucggcgcccuccgcaccggcugguacaccuccgugaucaccauagaacucuccaacaucaaggaaaacaaaugcaacggcaccgacgcgaaggucaaacuuauuaaacaagaacucgacaaauacaaaaacgcagucaccgaacuacaacuccuaaugcaguccacgccagccaccggcucuggcucagccauaugcuccgguguggccguaugcaaaguccuacaccucgaaggagaagucaacaaaauaaaauccgcccuacuguccacaaacaaggccguagucucccucucaaacggcgucucaguacucaccuucaaaguccuagaccucaagaacuacaucgacaaacaacuccuacccauacuaaacaaacaauccugcucaauccccaacaucgaaaccguaauagaauuucaacaaaaaaacaacagacuccuggagaucacccgggaauuuuccguaaacgccggagucacaacacccgucucaaccuacaugcuaacgaacucagagcuccucucacuuaucaacgacaugcccauaacaaacgaccaaaaaaaacucauguccaacaacgugcaaaucguccgacaacaauccuacuccaucaugugcaucauuaaagaagaaguccucgcauacguaguccagcucccccucuacggcgucauagacacccccugcuggaaacuacacacaucaccccucugcacaacaaacaccaaagaaggcuccaacaucugccucacccgcaccgaccgaggcugguacugcgauaacgccggcagcgucuccuucuucccccaagcagaaaccugcaagguccaauccaaccgaguuuucugcgacacuaugaacucgcucacccuccccuccgaagucaaccucugcaacgucgacauuuucaaccccaaauacgacugcaaaaucaugaccuccaagaccgacguauccuccuccgucaucaccucccuaggcgccauaguaaguugcuacggcaaaaccaagugcacagcaagcaacaaaaaccgaggaauaaucaaaaccuucuccaacggcugcgacuacguauccaacaagggcgucgacaccguauccguagggaacacccuuuacugcguaaacaaacaagaaggacaaucacucuacguaaaaggcgaacccauaaucaacuucuacgacccccucguauuucccuccgacgaauuugacgcaucaaucucacaggucaacgaaaaaauaaaccaaucgcuagcauucaucagaaaaucagacgaacuccuacacaacgucaacgcaggcaagagcaccaccaacaucaugaucaccaccaucaucaucgucauaaucgucauacuacucucacucauagcagucggccuccuccuauacuguaaagcaaggucgaccccagucacccuauccaaagaccaacuaagcggcaucaacaacaucgcguucucaaacuaaggacuaguguccaccugucccuccugggcugcuggauugucucguuuuccugccaaauaaacaggaucagcgcuuuacagaucuaaaaaaaaaaaaaaaaaaaaaaaaaaaaaaaaaaaaaaaaaaaaaaaaaaaaaaaaaaaaaaaaugcaucccccccccccccccccccccccccccccccaaaggcucuuuucagagccaccagaauu

SEQ ID NO: 1845 - RNA, 1977 nt, Artificial Sequence
  mRNA product Design e-6 comprising derived and/or modified sequence from HRSV(A2)__F_DSCav1_mut1 (opt1)
gggagagcggcucggccauuuugucccagucaguccggaggcugcggcugcagaaguaccgccugcggaguaacugcaaagaagcuuaccauggagcugcucauccugaaggccaacgccaucaccaccauccugacggcggugaccuucugcuucgccagcggccagaacaucaccgaggaguucuaccaguccacgugcagcgccgucuccaagggguaccucggcgcccugcggaccggcugguacaccuccgugaucaccaucgagcugagcaacaucaaggagaacaagugcaacgggaccgacgccaaggugaagcucaucaagcaggagcuggacaaguacaagaacgcggucacggagcugcagcuccugaugcaguccaccccggcaaccggcuccggcuccgccaucugcagcggcgucgccgugugcaaggugcugcaccucgagggggaggucaacaagaucaagagcgcccugcuguccaccaacaaggccguggugagccucuccaacggcgucagcgugcugaccuucaaggugcuggaccucaagaacuacaucgacaagcagcugcugcccauccugaacaagcagagcugcuccauccccaacaucgagacggugaucgaguuccagcagaagaacaaccggcuccuggagaucacccgcgaguucagcgugaacgccggggucaccacccccguguccacguacaugcugaccaacagcgagcuccugucccugaucaacgacaugccgaucaccaacgaccagaagaagcucaugagcaacaacgugcagaucguccggcagcaguccuacagcaucaugugcaucaucaaggaggaggugcuggcguacgugguccagcugccccucuacggcgugaucgacacccccugcuggaagcugcacacgagcccccugugcaccaccaacaccaaggagggguccaacaucugccucacgcgcaccgaccggggcugguacugcgacaacgccggcagcgucuccuucuucccgcaggccgagaccugcaaggugcagagcaaccgcguguucugcgacaccaugaacucccugacgcugcccagcgagguaaaccucugcaacgucgacaucuucaaccccaaguacgacugcaagaucaugaccuccaagaccgacgugagcuccagcgugaucaccucccugggggccaucgucagcugcuacggcaagacgaagugcaccgccagcaacaagaaccgggggaucaucaagaccuucuccaacggcugcgacuacgugagcaacaagggcguggacaccguguccgucgggaacacccuguacugcgugaacaagcaggagggccagagccucuacgugaagggggagcccaucaucaacuucuacgacccgcuggucuuccccuccgacgaguucgacgcgagcaucucccaggugaacgagaagaucaaccagagccuggccuucauccgcaaguccgacgagcugcuccacaacgugaacgccggcaagagcacgaccaacaucaugaucaccaccaucaucaucgucaucaucgugauccugcugucccucaucgccguggggcugcugcucuacugcaaggcccggagcacgcccgucacccuguccaaggaccagcugagcggcaucaacaacaucgcguucuccaacugaggacuaguacuggcugcaucucccuuuccucuguccuccauccuucucccaggauggugaagggggaccugguacccagugauccccaccccaggauccuaaaucaugacuuaccugcuaauaaaaacucauuggaaaagugagaagaucuaaaaaaaaaaaaaaaaaaaaaaaaaaaaaaaaaaaaaaaaaaaaaaaaaaaaaaaaaaaaaaaaugcaucccccccccccccccccccccccccccccccaaaggcucuuuucagagccaccagaauu

SEQ ID NO: 1846 - RNA, 1977 nt, Artificial Sequence
  mRNA product Design e-6 comprising derived and/or modified sequence from HRSV(A2)__F_DSCav1_mut1 (opt1)
gggagagcggcucggccauuuugucccagucaguccggaggcugcggcugcagaaguaccgccugcggaguaacugcaaagaagcuuaccauggagcugcucauccugaaggccaacgccaucaccaccauccugacggcggugaccuucugcuucgccagcggccagaacaucaccgaggaguucuaccaguccacgugcagcgccgucuccaagggguaccucggcgcccugcgcaccgggugguacaccagcgugaucaccaucgagcuguccaacaucaaggagaacaagugcaacggcaccgacgccaaggugaagcucaucaagcaggagcuggacaaguacaagaacgcggucacggagcugcagcuccugaugcagagcacccccgccaccggguccggcagcgccaucugcuccggcguggccgugugcaagguccugcaccucgagggggaggugaacaagaucaagagcgcgcugcuguccaccaacaaggccguggucagccucuccaacggcgugagcgugcugacguucaagguccuggaccucaagaacuacaucgacaagcagcugcugccgauccucaacaagcaguccugcagcauccccaacaucgagaccgugaucgaguuccagcagaagaacaaccggcugcuggagaucacccgcgaguucuccgugaacgccggggucaccacgcccgugagcaccuacaugcucaccaacuccgagcugcugagccucaucaacgacaugcccaucaccaacgaccagaagaagcugaugagcaacaacgugcagaucguccggcagcaguccuacagcaucaugugcaucaucaaggaggaggugcuggccuacgugguccagcucccgcuguacggcgugaucgacacgcccugcuggaagcugcacaccagcccccucugcaccaccaacacgaaggagggguccaacaucugccugacccgcaccgaccggggcugguacugcgacaacgccggcuccgugagcuucuucccccaggcggagaccugcaagguccaguccaaccgcguguucugcgacacgaugaacagccugacccucccguccgaggucaaccugugcaacguggacaucuucaaccccaaguacgacugcaagaucaugaccagcaagaccgacguguccagcuccgucaucacgagccugggggccaucguguccugcuacggcaagaccaagugcaccgccagcaacaagaaccgggggaucaucaagaccuucuccaacggcugcgacuacgugagcaacaagggcgucgacacgguguccguggggaacacccucuacugcgucaacaagcaggagggccagagccuguacgugaagggggagcccaucaucaacuucuacgacccccugguguucccgagcgacgaguucgacgccuccaucagccaggucaacgagaagaucaaccagucccucgccuucauccgcaagagcgacgagcugcugcacaacgugaacgcgggcaaguccaccaccaacaucaugaucaccacgaucaucaucgugaucaucgucauccuccugagccugaucgccguggggcuccugcuguacugcaaggcccgguccacccccgugacccugagcaaggaccagcucuccggcaucaacaacaucgccuucagcaacugaggacuaguacuggcugcaucucccuuuccucuguccuccauccuucucccaggauggugaagggggaccugguacccagugauccccaccccaggauccuaaaucaugacuuaccugcuaauaaaaacucauuggaaaagugagaagaucuaaaaaaaaaaaaaaaaaaaaaaaaaaaaaaaaaaaaaaaaaaaaaaaaaaaaaaaaaaaaaaaaugcaucccccccccccccccccccccccccccccccaaaggcucuuuucagagccaccagaauu

SEQ ID NO: 1847 - RNA, 1977 nt, Artificial Sequence
  mRNA product Design e-6 comprising derived and/or modified sequence from HRSV(A2)__F_DSCav1_mut1 (opt2)
gggagagcggcucggccauuuugucccagucaguccggaggcugcggcugcagaaguaccgccugcggaguaacugcaaagaagcuuaccauggagcuccucauccucaaggccaacgccaucaccaccauccucaccgccgucaccuucugcuucgccuccggccagaacaucaccgaggaguucuaccaguccaccugcuccgccgucuccaagggcuaccucggcgcccuccgcaccggcugguacaccuccgucaucaccaucgagcucuccaacaucaaggagaacaagugcaacggcaccgacgccaaggucaagcucaucaagcaggagcucgacaaguacaagaacgccgucaccgagcuccagcuccucaugcaguccacccccgccaccggcuccggcuccgccaucugcuccggcgucgccgucugcaagguccuccaccucgagggcgaggucaacaagaucaaguccgcccuccucuccaccaacaaggccgucgucucccucuccaacggcgucuccguccucaccuucaagguccucgaccucaagaacuacaucgacaagcagcuccuccccauccucaacaagcaguccugcuccauccccaacaucgagaccgucaucgaguuccagcagaagaacaaccgccuccucgagaucacccgcgaguucuccgucaacgccggcgucaccacccccgucuccaccuacaugcucaccaacuccgagcuccucucccucaucaacgacaugcccaucaccaacgaccagaagaagcucauguccaacaacguccagaucguccgccagcaguccuacuccaucaugugcaucaucaaggaggagguccucgccuacgucguccagcucccccucuacggcgucaucgacacccccugcuggaagcuccacaccuccccccucugcaccaccaacaccaaggagggcuccaacaucugccucacccgcaccgaccgcggcugguacugcgacaacgccggcuccgucuccuucuucccccaggccgagaccugcaagguccaguccaaccgcgucuucugcgacaccaugaacucccucacccuccccuccgaggucaaccucugcaacgucgacaucuucaaccccaaguacgacugcaagaucaugaccuccaagaccgacgucuccuccuccgucaucaccucccucggcgccaucgucuccugcuacggcaagaccaagugcaccgccuccaacaagaaccgcggcaucaucaagaccuucuccaacggcugcgacuacgucuccaacaagggcgucgacaccgucuccgucggcaacacccucuacugcgucaacaagcaggagggccagucccucuacgucaagggcgagcccaucaucaacuucuacgacccccucgucuuccccuccgacgaguucgacgccuccaucucccaggucaacgagaagaucaaccagucccucgccuucauccgcaaguccgacgagcuccuccacaacgucaacgccggcaaguccaccaccaacaucaugaucaccaccaucaucaucgucaucaucgucauccuccucucccucaucgccgucggccuccuccucuacugcaaggcccgcuccacccccgucacccucuccaaggaccagcucuccggcaucaacaacaucgccuucuccaacugaggacuaguacuggcugcaucucccuuuccucuguccuccauccuucucccaggauggugaagggggaccugguacccagugauccccaccccaggauccuaaaucaugacuuaccugcuaauaaaaacucauuggaaaagugagaagaucuaaaaaaaaaaaaaaaaaaaaaaaaaaaaaaaaaaaaaaaaaaaaaaaaaaaaaaaaaaaaaaaaugcaucccccccccccccccccccccccccccccccaaaggcucuuuucagagccaccagaauu

SEQ ID NO: 1848 - RNA, 1977 nt, Artificial Sequence
  mRNA product Design e-6 comprising derived and/or modified sequence from HRSV(A2)__F_DSCav1_mut1 (opt3)
gggagagcggcucggccauuuugucccagucaguccggaggcugcggcugcagaaguaccgccugcggaguaacugcaaagaagcuuaccauggagcugcucauccuuaaggccaacgcuauuaccacaauacugacugcagugacguucugcuuugccagcggccagaauaucaccgaagaguucuaccaauccacauguucugcggucucaaaaggguauuugggagcuuuaagaacugguugguacaccaguguuauuacaaucgaacugagcaacauuaaggagaauaaaugcaacggcaccgacgccaaggugaaacuaaucaagcaggaacucgauaaguauaaaaaugcaguaacugagcugcagcuucugaugcaguccacacccgccaccgggucuggaucggcuauauguucaggcguggcagucugcaagguguugcaccucgagggugaaguuaacaaaaucaagagcgcccugcugaguacgaauaaagcuguggucucccucucuaacggggugagcguauuaacuuuuaagguucuggaccuuaagaauuacauugauaaacaauugcugccuauccuaaacaagcaguccuguucaauuccaaauaucgagaccgugauagaguuccagcagaaaaacaauaggcuccuggaaauuacacgggaguuuagugucaacgccggagugacuaccccggugagcacauauaugcuuaccaauucugaacuguugucccucaucaacgacaugcccauuacgaacgaucaaaagaaacugaugucaaauaacguccagaucguucgccagcagagcuacaguaucaugugcauuauaaaggaggaaguguuagcguauguagugcaacugccucucuacggcgucaucgacacuccauguuggaaacuucauacaucuccccugugcaccacuaauacaaaggagggcuccaacauuuguuugacccgaacggaucgugggugguacugcgacaaugcaggaagcgugucguucuuuccucaggccgaaaccuguaagguucagucuaacagaguguucugcgauacaaugaacucccuaacucugccaucagaggucaaucucugcaauguggacaucuuuaaccccaaauaugauuguaagauaaugaccaguaaaacagacguaagcuccucuguuauuacuagccugggugcuaucgugucaugcuacggcaagaccaaauguacagccaguaauaagaacagggggaucauuaagaccuucuccaauggaugcgauuaugucagcaacaaaggcguggacacugucucuguggguaauacgcuuuacuguguuaacaagcaagaggggcagucacuguaugugaaaggagaaccuaucauuaacuuuuacgacccauugguauucccgagugaugaguuugacgcaagcauaucccaggucaaugaaaagaucaaccagucucucgcuuucauucggaaaucggaugagcuguuacacaaugugaacgccggcaagagcacaaccaauaucaugaucacuaccauuauaaucguuauuaucgugauucugcuaucccucaucgcggucggccugcuuuuguauugcaaggcccgcucaacacccgugacccugaguaaagaccaacucucugggauaaacaauaucgcauucagcaacugaggacuaguacuggcugcaucucccuuuccucuguccuccauccuucucccaggauggugaagggggaccugguacccagugauccccaccccaggauccuaaaucaugacuuaccugcuaauaaaaacucauuggaaaagugagaagaucuaaaaaaaaaaaaaaaaaaaaaaaaaaaaaaaaaaaaaaaaaaaaaaaaaaaaaaaaaaaaaaaaugcaucccccccccccccccccccccccccccccccaaaggcucuuuucagagccaccagaauu

SEQ ID NO: 1849 - RNA, 1977 nt, Artificial Sequence
  mRNA product Design e-6 comprising derived and/or modified sequence from HRSV(A2)__F_DSCav1_mut1 (opt4)
gggagagcggcucggccauuuugucccagucaguccggaggcugcggcugcagaaguaccgccugcggaguaacugcaaagaagcuuaccauggagcugcugauccugaaggccaacgccaucaccaccauccugaccgccgugaccuucugcuucgccagcggccagaacaucaccgaggaguucuaccagagcaccugcagcgccgugagcaagggcuaccugggcgcccugagaaccggcugguacaccagcgugaucaccaucgagcugagcaacaucaaggagaacaagugcaacggcaccgacgccaaggugaagcugaucaagcaggagcuggacaaguacaagaacgccgugaccgagcugcagcugcugaugcagagcacccccgccaccggcagcggcagcgccaucugcagcggcguggccgugugcaaggugcugcaccuggagggcgaggugaacaagaucaagagcgcccugcugagcaccaacaaggccguggugagccugagcaacggcgugagcgugcugaccuucaaggugcuggaccugaagaacuacaucgacaagcagcugcugcccauccugaacaagcagagcugcagcauccccaacaucgagaccgugaucgaguuccagcagaagaacaacagacugcuggagaucaccagagaguucagcgugaacgccggcgugaccacccccgugagcaccuacaugcugaccaacagcgagcugcugagccugaucaacgacaugcccaucaccaacgaccagaagaagcugaugagcaacaacgugcagaucgugagacagcagagcuacagcaucaugugcaucaucaaggaggaggugcuggccuacguggugcagcugccccuguacggcgugaucgacacccccugcuggaagcugcacaccagcccccugugcaccaccaacaccaaggagggcagcaacaucugccugaccagaaccgacagaggcugguacugcgacaacgccggcagcgugagcuucuucccccaggccgagaccugcaaggugcagagcaacagaguguucugcgacaccaugaacagccugacccugcccagcgaggugaaccugugcaacguggacaucuucaaccccaaguacgacugcaagaucaugaccagcaagaccgacgugagcagcagcgugaucaccagccugggcgccaucgugagcugcuacggcaagaccaagugcaccgccagcaacaagaacagaggcaucaucaagaccuucagcaacggcugcgacuacgugagcaacaagggcguggacaccgugagcgugggcaacacccuguacugcgugaacaagcaggagggccagagccuguacgugaagggcgagcccaucaucaacuucuacgacccccugguguuccccagcgacgaguucgacgccagcaucagccaggugaacgagaagaucaaccagagccuggccuucaucagaaagagcgacgagcugcugcacaacgugaacgccggcaagagcaccaccaacaucaugaucaccaccaucaucaucgugaucaucgugauccugcugagccugaucgccgugggccugcugcuguacugcaaggccagaagcacccccgugacccugagcaaggaccagcugagcggcaucaacaacaucgccuucagcaacugaggacuaguacuggcugcaucucccuuuccucuguccuccauccuucucccaggauggugaagggggaccugguacccagugauccccaccccaggauccuaaaucaugacuuaccugcuaauaaaaacucauuggaaaagugagaagaucuaaaaaaaaaaaaaaaaaaaaaaaaaaaaaaaaaaaaaaaaaaaaaaaaaaaaaaaaaaaaaaaaugcaucccccccccccccccccccccccccccccccaaaggcucuuuucagagccaccagaauu

SEQ ID NO: 1850 - RNA, 1977 nt, Artificial Sequence
  mRNA product Design e-6 comprising derived and/or modified sequence from HRSV(A2)__F_DSCav1_mut1 (opt5)
gggagagcggcucggccauuuugucccagucaguccggaggcugcggcugcagaaguaccgccugcggaguaacugcaaagaagcuuaccauggagcugcucauccugaaggccaacgcuauuaccacaauccuuacggccgugaccuucugcuuugcgagcggccagaauauuacagaagaguucuaccaauccaccuguucugcugucagcaaaggguaucugggagcccucagaacaggcugguacaccuccguuaucacaauugaacugucuaacaucaaggagaauaaaugcaacgggaccgacgccaaggugaaacuuaucaagcaggaacuggauaaguauaaaaaugcugugacggagcuccagcugcugaugcagagcacccccgccacaggauccggcucugcuauuuguagcggggucgccgugugcaagguucuccaccuggagggagaagugaacaaaaucaaguccgcgcuucugagcaccaauaaagccgucgugucucucuccaacggcguuagcgugcugacauuuaagguccuugaccugaagaauuacauugauaaacaacuccugccuauccugaacaagcagucuuguuccauuccgaauaucgagaccgugauugaguuccagcagaaaaacaaucggcuccuggaaaucacgcgcgaguuuagcgugaacgcuggcgucacaacccccguuucuacauauaugcuuaccaauuccgaacugcucagccugaucaacgacaugccuauuaccaacgaucaaaagaaacuuauguccaauaacgugcagaucgugagacagcagucuuacagcauuaugugcaucauuaaggaggaaguccuggccuaugugguucaacucccccuguacggggugaucgacacaccuuguuggaaacugcauacgagcccccucugcaccacaaauaccaaggagggauccaacaucugucugacacggaccgaucgcggcugguacugcgacaaugcugggucugucuccuucuuuccucaggccgaaacguguaaggugcagagcaacagaguuuucugcgauacaaugaacucucuuacccugccgagcgaggugaaucucugcaaugucgacauuuuuaaccccaaauaugauuguaagaucaugaccuccaaaacagacgugucuagcuccgucauuaccagccugggagcgaucgugucuugcuacggcaagacaaaauguacggccuccaauaagaaccgggggauuaucaagaccuucagcaauggaugcgauuauguuucuaacaaaggcguggacacagucuccgugggcaauacccuuuacuguguuaacaagcaagaggggcagagccuguaugugaaaggagaaccuaucauuaacuuuuacgacccccucgucuucccuuccgaugaguuugacgcuucuaucagccaggugaaugaaaagauuaaccagucccuggccuucauccgcaaaucugaugagcugcuccacaaugugaacgcuggcaagagcacaaccaauauuaugaucacgaccauuaucaucguuauuaucgucauucugcuuucccugaucgccguggggcuccugcuguauugcaaggccagaagcacacccgugacccuuucuaaagaccaacucuccggaauuaacaauaucgcuuucagcaacugaggacuaguacuggcugcaucucccuuuccucuguccuccauccuucucccaggauggugaagggggaccugguacccagugauccccaccccaggauccuaaaucaugacuuaccugcuaauaaaaacucauuggaaaagugagaagaucuaaaaaaaaaaaaaaaaaaaaaaaaaaaaaaaaaaaaaaaaaaaaaaaaaaaaaaaaaaaaaaaaugcaucccccccccccccccccccccccccccccccaaaggcucuuuucagagccaccagaauu

SEQ ID NO: 1851 - RNA, 1977 nt, Artificial Sequence
  mRNA product Design e-6 comprising derived and/or modified sequence from HRSV(A2)__F_DSCav1_mut1 (opt6)
gggagagcggcucggccauuuugucccagucaguccggaggcugcggcugcagaaguaccgccugcggaguaacugcaaagaagcuuaccauggaacuauuaauacuaaaagcaaacgcuauaacaacaauacuaacagcagucacauucugcuuugcaucaggccaaaacaucacagaagaauuuuaccaaucaacaugcuccgccguaucgaaaggauaccuaggcgcauuaagaaccggaugguauacaucagucauaacaauugaacuaucuaacauaaaagaaaacaaauguaacggcacagaugccaaaguaaaacucaucaaacaagaauuagauaaauacaaaaacgcagucacugaacuacaacucuuaaugcaaucaacaccugcaacaggaucaggaucagcaauaugcucaggaguagccguauguaaaguacuacaccuagaaggagaagucaacaaaauaaaaucagcccuccuaaguacaaacaaagcugucguaucacuauccaaugguguuucaguacuaacuuucaaaguucuagaccuaaaaaacuacauagacaaacaacuacuaccaauacuaaauaaacaaaguuguucuauacccaacauagaaaccgucauagaauuucaacaaaaaaauaauagacuccuagaaauaacaagagaauuuucaguuaacgcagguguaacaaccccaguauccaccuauaugcuaacaaauucagaauuacuuucccuaaucaacgacaugcccauaacaaaugaccaaaaaaaauuaaugucaaacaacguccaaauaguucgucaacaaucauauucaauaaugugcauaauaaaagaagaagucuuagccuacguaguacaacuuccccuuuauggaguuaucgacacacccugcuggaaacuccacacuucaccacuauguacuacaaacacaaaagaaggauccaacaucugccucacaagaaccgaucgaggaugguacugugauaacgccggauccgucucauucuucccacaagcagaaacaugcaaaguacaaucaaacagaguauuuugcgacacaaugaacucccucacauuaccuucugaaguaaaccuauguaauguagacauauucaaccccaaauacgauugcaaaauaaugacaucaaagacagauguaucaucaagugucaucacaucccuaggagcaauugucucauguuaugguaaaacaaaaugcaccgcaucaaauaaaaacagaggcauaauaaaaaccuucucaaacgguugugacuacguauccaauaaaggcgucgacacaguaucaguagguaacacauuauauuguguaaacaaacaagaaggacagucccuauauguaaaaggagaaccaauaaucaacuucuacgacccacuuguuuucccuucugaugaauuugacgcaaguauaucacaaguaaaugaaaaaaucaaucaaucacuagccuuuauaagaaaaucagaugaauuauuacacaacguaaacgccggaaaaucaacaaccaacauaaugauaaccacaauaauaaucgucauaauagucauccuacuaucacucauagcaguuggacuccuacuauacugcaaagcacgaucaacaccaguaacauuauccaaagaccaacuaagugguaucaauaacaucgccuuuucaaacugaggacuaguacuggcugcaucucccuuuccucuguccuccauccuucucccaggauggugaagggggaccugguacccagugauccccaccccaggauccuaaaucaugacuuaccugcuaauaaaaacucauuggaaaagugagaagaucuaaaaaaaaaaaaaaaaaaaaaaaaaaaaaaaaaaaaaaaaaaaaaaaaaaaaaaaaaaaaaaaaugcaucccccccccccccccccccccccccccccccaaaggcucuuuucagagccaccagaauu

SEQ ID NO: 1852 - RNA, 1977 nt, Artificial Sequence
  mRNA product Design e-6 comprising derived and/or modified sequence from HRSV(A2)__F_DSCav1_mut1 (opt11)
gggagagcggcucggccauuuugucccagucaguccggaggcugcggcugcagaaguaccgccugcggaguaacugcaaagaagcuuaccauggaacuccuaauccucaaagccaacgcaaucaccacaauccucacugccgucaccuucugcuucgccuccggccaaaacauaacagaagaauuuuaccaaucaaccuguucagcggucuccaaaggcuaccucggcgcccuccgcaccggcugguacaccuccgugaucaccauagaacucuccaacaucaaggaaaacaaaugcaacggcaccgacgcgaaggucaaacuuauuaaacaagaacucgacaaauacaaaaacgcagucaccgaacuacaacuccuaaugcaguccacgccagccaccggcucuggcucagccauaugcuccgguguggccguaugcaaaguccuacaccucgaaggagaagucaacaaaauaaaauccgcccuacuguccacaaacaaggccguagucucccucucaaacggcgucucaguacucaccuucaaaguccuagaccucaagaacuacaucgacaaacaacuccuacccauacuaaacaaacaauccugcucaauccccaacaucgaaaccguaauagaauuucaacaaaaaaacaacagacuccuggagaucacccgggaauuuuccguaaacgccggagucacaacacccgucucaaccuacaugcuaacgaacucagagcuccucucacuuaucaacgacaugcccauaacaaacgaccaaaaaaaacucauguccaacaacgugcaaaucguccgacaacaauccuacuccaucaugugcaucauuaaagaagaaguccucgcauacguaguccagcucccccucuacggcgucauagacacccccugcuggaaacuacacacaucaccccucugcacaacaaacaccaaagaaggcuccaacaucugccucacccgcaccgaccgaggcugguacugcgauaacgccggcagcgucuccuucuucccccaagcagaaaccugcaagguccaauccaaccgaguuuucugcgacacuaugaacucgcucacccuccccuccgaagucaaccucugcaacgucgacauuuucaaccccaaauacgacugcaaaaucaugaccuccaagaccgacguauccuccuccgucaucaccucccuaggcgccauaguaaguugcuacggcaaaaccaagugcacagcaagcaacaaaaaccgaggaauaaucaaaaccuucuccaacggcugcgacuacguauccaacaagggcgucgacaccguauccguagggaacacccuuuacugcguaaacaaacaagaaggacaaucacucuacguaaaaggcgaacccauaaucaacuucuacgacccccucguauuucccuccgacgaauuugacgcaucaaucucacaggucaacgaaaaaauaaaccaaucgcuagcauucaucagaaaaucagacgaacuccuacacaacgucaacgcaggcaagagcaccaccaacaucaugaucaccaccaucaucaucgucauaaucgucauacuacucucacucauagcagucggccuccuccuauacuguaaagcaaggucgaccccagucacccuauccaaagaccaacuaagcggcaucaacaacaucgcguucucaaacuaaggacuaguacuggcugcaucucccuuuccucuguccuccauccuucucccaggauggugaagggggaccugguacccagugauccccaccccaggauccuaaaucaugacuuaccugcuaauaaaaacucauuggaaaagugagaagaucuaaaaaaaaaaaaaaaaaaaaaaaaaaaaaaaaaaaaaaaaaaaaaaaaaaaaaaaaaaaaaaaaugcaucccccccccccccccccccccccccccccccaaaggcucuuuucagagccaccagaauu

SEQ ID NO: 1853 - RNA, 2193 nt, Artificial Sequence
  mRNA product Design f-1 comprising derived and/or modified sequence from HRSV(A2)__F_DSCav1_mut1 (opt1)
gggagagcggcucggccauuuugucccagucaguccggaggcugcggcugcagaaguaccgccugcggaguaacugcaaagaagcuuaccauggagcugcucauccugaaggccaacgccaucaccaccauccugacggcggugaccuucugcuucgccagcggccagaacaucaccgaggaguucuaccaguccacgugcagcgccgucuccaagggguaccucggcgcccugcggaccggcugguacaccuccgugaucaccaucgagcugagcaacaucaaggagaacaagugcaacgggaccgacgccaaggugaagcucaucaagcaggagcuggacaaguacaagaacgcggucacggagcugcagcuccugaugcaguccaccccggcaaccggcuccggcuccgccaucugcagcggcgucgccgugugcaaggugcugcaccucgagggggaggucaacaagaucaagagcgcccugcuguccaccaacaaggccguggugagccucuccaacggcgucagcgugcugaccuucaaggugcuggaccucaagaacuacaucgacaagcagcugcugcccauccugaacaagcagagcugcuccauccccaacaucgagacggugaucgaguuccagcagaagaacaaccggcuccuggagaucacccgcgaguucagcgugaacgccggggucaccacccccguguccacguacaugcugaccaacagcgagcuccugucccugaucaacgacaugccgaucaccaacgaccagaagaagcucaugagcaacaacgugcagaucguccggcagcaguccuacagcaucaugugcaucaucaaggaggaggugcuggcguacgugguccagcugccccucuacggcgugaucgacacccccugcuggaagcugcacacgagcccccugugcaccaccaacaccaaggagggguccaacaucugccucacgcgcaccgaccggggcugguacugcgacaacgccggcagcgucuccuucuucccgcaggccgagaccugcaaggugcagagcaaccgcguguucugcgacaccaugaacucccugacgcugcccagcgagguaaaccucugcaacgucgacaucuucaaccccaaguacgacugcaagaucaugaccuccaagaccgacgugagcuccagcgugaucaccucccugggggccaucgucagcugcuacggcaagacgaagugcaccgccagcaacaagaaccgggggaucaucaagaccuucuccaacggcugcgacuacgugagcaacaagggcguggacaccguguccgucgggaacacccuguacugcgugaacaagcaggagggccagagccucuacgugaagggggagcccaucaucaacuucuacgacccgcuggucuuccccuccgacgaguucgacgcgagcaucucccaggugaacgagaagaucaaccagagccuggccuucauccgcaaguccgacgagcugcuccacaacgugaacgccggcaagagcacgaccaacaucaugaucaccaccaucaucaucgucaucaucgugauccugcugucccucaucgccguggggcugcugcucuacugcaaggcccggagcacgcccgucacccuguccaaggaccagcugagcggcaucaacaacaucgcguucuccaacugaggacuagugaagggaacacccaaauuuaauucagccuuaagcacaauuaauuaagagugaaacguaauuguacaagcaguuggucacccaccauagggcaugaucaacaccgcaaccuuuccuuuuucccccagugauucugaaaaaccccucuucccuucagcuugcuuagauguuccaaauuuaguaagcuuaaggcggccuacagaagaaaaagaaaaaaaaggccacaaaaguucccucucacuuucaguaaauaaaauaaaagcagcaacagaaauaaagaaauaaaugaaauucaaaaugaaauaaauauuguguugugcagcauuaaaaaaucaauaaaaauuaaaaaugagcaagaucuaaaaaaaaaaaaaaaaaaaaaaaaaaaaaaaaaaaaaaaaaaaaaaaaaaaaaaaaaaaaaaaaugcaucccccccccccccccccccccccccccccccaaaggcucuuuucagagccaccagaauu

SEQ ID NO: 1854 - RNA, 2193 nt, Artificial Sequence
  mRNA product Design f-1 comprising derived and/or modified sequence from HRSV(A2)__F_DSCav1_mut1 (opt1)
gggagagcggcucggccauuuugucccagucaguccggaggcugcggcugcagaaguaccgccugcggaguaacugcaaagaagcuuaccauggagcugcucauccugaaggccaacgccaucaccaccauccugacggcggugaccuucugcuucgccagcggccagaacaucaccgaggaguucuaccaguccacgugcagcgccgucuccaagggguaccucggcgcccugcgcaccgggugguacaccagcgugaucaccaucgagcuguccaacaucaaggagaacaagugcaacggcaccgacgccaaggugaagcucaucaagcaggagcuggacaaguacaagaacgcggucacggagcugcagcuccugaugcagagcacccccgccaccggguccggcagcgccaucugcuccggcguggccgugugcaagguccugcaccucgagggggaggugaacaagaucaagagcgcgcugcuguccaccaacaaggccguggucagccucuccaacggcgugagcgugcugacguucaagguccuggaccucaagaacuacaucgacaagcagcugcugccgauccucaacaagcaguccugcagcauccccaacaucgagaccgugaucgaguuccagcagaagaacaaccggcugcuggagaucacccgcgaguucuccgugaacgccggggucaccacgcccgugagcaccuacaugcucaccaacuccgagcugcugagccucaucaacgacaugcccaucaccaacgaccagaagaagcugaugagcaacaacgugcagaucguccggcagcaguccuacagcaucaugugcaucaucaaggaggaggugcuggccuacgugguccagcucccgcuguacggcgugaucgacacgcccugcuggaagcugcacaccagcccccucugcaccaccaacacgaaggagggguccaacaucugccugacccgcaccgaccggggcugguacugcgacaacgccggcuccgugagcuucuucccccaggcggagaccugcaagguccaguccaaccgcguguucugcgacacgaugaacagccugacccucccguccgaggucaaccugugcaacguggacaucuucaaccccaaguacgacugcaagaucaugaccagcaagaccgacguguccagcuccgucaucacgagccugggggccaucguguccugcuacggcaagaccaagugcaccgccagcaacaagaaccgggggaucaucaagaccuucuccaacggcugcgacuacgugagcaacaagggcgucgacacgguguccguggggaacacccucuacugcgucaacaagcaggagggccagagccuguacgugaagggggagcccaucaucaacuucuacgacccccugguguucccgagcgacgaguucgacgccuccaucagccaggucaacgagaagaucaaccagucccucgccuucauccgcaagagcgacgagcugcugcacaacgugaacgcgggcaaguccaccaccaacaucaugaucaccacgaucaucaucgugaucaucgucauccuccugagccugaucgccguggggcuccugcuguacugcaaggcccgguccacccccgugacccugagcaaggaccagcucuccggcaucaacaacaucgccuucagcaacugaggacuagugaagggaacacccaaauuuaauucagccuuaagcacaauuaauuaagagugaaacguaauuguacaagcaguuggucacccaccauagggcaugaucaacaccgcaaccuuuccuuuuucccccagugauucugaaaaaccccucuucccuucagcuugcuuagauguuccaaauuuaguaagcuuaaggcggccuacagaagaaaaagaaaaaaaaggccacaaaaguucccucucacuuucaguaaauaaaauaaaagcagcaacagaaauaaagaaauaaaugaaauucaaaaugaaauaaauauuguguugugcagcauuaaaaaaucaauaaaaauuaaaaaugagcaagaucuaaaaaaaaaaaaaaaaaaaaaaaaaaaaaaaaaaaaaaaaaaaaaaaaaaaaaaaaaaaaaaaaugcaucccccccccccccccccccccccccccccccaaaggcucuuuucagagccaccagaauu

SEQ ID NO: 1855 - RNA, 2193 nt, Artificial Sequence
  mRNA product Design f-1 comprising derived and/or modified sequence from HRSV(A2)__F_DSCav1_mut1 (opt2)
gggagagcggcucggccauuuugucccagucaguccggaggcugcggcugcagaaguaccgccugcggaguaacugcaaagaagcuuaccauggagcuccucauccucaaggccaacgccaucaccaccauccucaccgccgucaccuucugcuucgccuccggccagaacaucaccgaggaguucuaccaguccaccugcuccgccgucuccaagggcuaccucggcgcccuccgcaccggcugguacaccuccgucaucaccaucgagcucuccaacaucaaggagaacaagugcaacggcaccgacgccaaggucaagcucaucaagcaggagcucgacaaguacaagaacgccgucaccgagcuccagcuccucaugcaguccacccccgccaccggcuccggcuccgccaucugcuccggcgucgccgucugcaagguccuccaccucgagggcgaggucaacaagaucaaguccgcccuccucuccaccaacaaggccgucgucucccucuccaacggcgucuccguccucaccuucaagguccucgaccucaagaacuacaucgacaagcagcuccuccccauccucaacaagcaguccugcuccauccccaacaucgagaccgucaucgaguuccagcagaagaacaaccgccuccucgagaucacccgcgaguucuccgucaacgccggcgucaccacccccgucuccaccuacaugcucaccaacuccgagcuccucucccucaucaacgacaugcccaucaccaacgaccagaagaagcucauguccaacaacguccagaucguccgccagcaguccuacuccaucaugugcaucaucaaggaggagguccucgccuacgucguccagcucccccucuacggcgucaucgacacccccugcuggaagcuccacaccuccccccucugcaccaccaacaccaaggagggcuccaacaucugccucacccgcaccgaccgcggcugguacugcgacaacgccggcuccgucuccuucuucccccaggccgagaccugcaagguccaguccaaccgcgucuucugcgacaccaugaacucccucacccuccccuccgaggucaaccucugcaacgucgacaucuucaaccccaaguacgacugcaagaucaugaccuccaagaccgacgucuccuccuccgucaucaccucccucggcgccaucgucuccugcuacggcaagaccaagugcaccgccuccaacaagaaccgcggcaucaucaagaccuucuccaacggcugcgacuacgucuccaacaagggcgucgacaccgucuccgucggcaacacccucuacugcgucaacaagcaggagggccagucccucuacgucaagggcgagcccaucaucaacuucuacgacccccucgucuuccccuccgacgaguucgacgccuccaucucccaggucaacgagaagaucaaccagucccucgccuucauccgcaaguccgacgagcuccuccacaacgucaacgccggcaaguccaccaccaacaucaugaucaccaccaucaucaucgucaucaucgucauccuccucucccucaucgccgucggccuccuccucuacugcaaggcccgcuccacccccgucacccucuccaaggaccagcucuccggcaucaacaacaucgccuucuccaacugaggacuagugaagggaacacccaaauuuaauucagccuuaagcacaauuaauuaagagugaaacguaauuguacaagcaguuggucacccaccauagggcaugaucaacaccgcaaccuuuccuuuuucccccagugauucugaaaaaccccucuucccuucagcuugcuuagauguuccaaauuuaguaagcuuaaggcggccuacagaagaaaaagaaaaaaaaggccacaaaaguucccucucacuuucaguaaauaaaauaaaagcagcaacagaaauaaagaaauaaaugaaauucaaaaugaaauaaauauuguguugugcagcauuaaaaaaucaauaaaaauuaaaaaugagcaagaucuaaaaaaaaaaaaaaaaaaaaaaaaaaaaaaaaaaaaaaaaaaaaaaaaaaaaaaaaaaaaaaaaugcaucccccccccccccccccccccccccccccccaaaggcucuuuucagagccaccagaauu

SEQ ID NO: 1856 - RNA, 2193 nt, Artificial Sequence
  mRNA product Design f-1 comprising derived and/or modified sequence from HRSV(A2)__F_DSCav1_mut1 (opt3)
gggagagcggcucggccauuuugucccagucaguccggaggcugcggcugcagaaguaccgccugcggaguaacugcaaagaagcuuaccauggagcugcucauccuuaaggccaacgcuauuaccacaauacugacugcagugacguucugcuuugccagcggccagaauaucaccgaagaguucuaccaauccacauguucugcggucucaaaaggguauuugggagcuuuaagaacugguugguacaccaguguuauuacaaucgaacugagcaacauuaaggagaauaaaugcaacggcaccgacgccaaggugaaacuaaucaagcaggaacucgauaaguauaaaaaugcaguaacugagcugcagcuucugaugcaguccacacccgccaccgggucuggaucggcuauauguucaggcguggcagucugcaagguguugcaccucgagggugaaguuaacaaaaucaagagcgcccugcugaguacgaauaaagcuguggucucccucucuaacggggugagcguauuaacuuuuaagguucuggaccuuaagaauuacauugauaaacaauugcugccuauccuaaacaagcaguccuguucaauuccaaauaucgagaccgugauagaguuccagcagaaaaacaauaggcuccuggaaauuacacgggaguuuagugucaacgccggagugacuaccccggugagcacauauaugcuuaccaauucugaacuguugucccucaucaacgacaugcccauuacgaacgaucaaaagaaacugaugucaaauaacguccagaucguucgccagcagagcuacaguaucaugugcauuauaaaggaggaaguguuagcguauguagugcaacugccucucuacggcgucaucgacacuccauguuggaaacuucauacaucuccccugugcaccacuaauacaaaggagggcuccaacauuuguuugacccgaacggaucgugggugguacugcgacaaugcaggaagcgugucguucuuuccucaggccgaaaccuguaagguucagucuaacagaguguucugcgauacaaugaacucccuaacucugccaucagaggucaaucucugcaauguggacaucuuuaaccccaaauaugauuguaagauaaugaccaguaaaacagacguaagcuccucuguuauuacuagccugggugcuaucgugucaugcuacggcaagaccaaauguacagccaguaauaagaacagggggaucauuaagaccuucuccaauggaugcgauuaugucagcaacaaaggcguggacacugucucuguggguaauacgcuuuacuguguuaacaagcaagaggggcagucacuguaugugaaaggagaaccuaucauuaacuuuuacgacccauugguauucccgagugaugaguuugacgcaagcauaucccaggucaaugaaaagaucaaccagucucucgcuuucauucggaaaucggaugagcuguuacacaaugugaacgccggcaagagcacaaccaauaucaugaucacuaccauuauaaucguuauuaucgugauucugcuaucccucaucgcggucggccugcuuuuguauugcaaggcccgcucaacacccgugacccugaguaaagaccaacucucugggauaaacaauaucgcauucagcaacugaggacuagugaagggaacacccaaauuuaauucagccuuaagcacaauuaauuaagagugaaacguaauuguacaagcaguuggucacccaccauagggcaugaucaacaccgcaaccuuuccuuuuucccccagugauucugaaaaaccccucuucccuucagcuugcuuagauguuccaaauuuaguaagcuuaaggcggccuacagaagaaaaagaaaaaaaaggccacaaaaguucccucucacuuucaguaaauaaaauaaaagcagcaacagaaauaaagaaauaaaugaaauucaaaaugaaauaaauauuguguugugcagcauuaaaaaaucaauaaaaauuaaaaaugagcaagaucuaaaaaaaaaaaaaaaaaaaaaaaaaaaaaaaaaaaaaaaaaaaaaaaaaaaaaaaaaaaaaaaaugcaucccccccccccccccccccccccccccccccaaaggcucuuuucagagccaccagaauu

SEQ ID NO: 1857 - RNA, 2193 nt, Artificial Sequence
  mRNA product Design f-1 comprising derived and/or modified sequence from HRSV(A2)__F_DSCav1_mut1 (opt4)
gggagagcggcucggccauuuugucccagucaguccggaggcugcggcugcagaaguaccgccugcggaguaacugcaaagaagcuuaccauggagcugcugauccugaaggccaacgccaucaccaccauccugaccgccgugaccuucugcuucgccagcggccagaacaucaccgaggaguucuaccagagcaccugcagcgccgugagcaagggcuaccugggcgcccugagaaccggcugguacaccagcgugaucaccaucgagcugagcaacaucaaggagaacaagugcaacggcaccgacgccaaggugaagcugaucaagcaggagcuggacaaguacaagaacgccgugaccgagcugcagcugcugaugcagagcacccccgccaccggcagcggcagcgccaucugcagcggcguggccgugugcaaggugcugcaccuggagggcgaggugaacaagaucaagagcgcccugcugagcaccaacaaggccguggugagccugagcaacggcgugagcgugcugaccuucaaggugcuggaccugaagaacuacaucgacaagcagcugcugcccauccugaacaagcagagcugcagcauccccaacaucgagaccgugaucgaguuccagcagaagaacaacagacugcuggagaucaccagagaguucagcgugaacgccggcgugaccacccccgugagcaccuacaugcugaccaacagcgagcugcugagccugaucaacgacaugcccaucaccaacgaccagaagaagcugaugagcaacaacgugcagaucgugagacagcagagcuacagcaucaugugcaucaucaaggaggaggugcuggccuacguggugcagcugccccuguacggcgugaucgacacccccugcuggaagcugcacaccagcccccugugcaccaccaacaccaaggagggcagcaacaucugccugaccagaaccgacagaggcugguacugcgacaacgccggcagcgugagcuucuucccccaggccgagaccugcaaggugcagagcaacagaguguucugcgacaccaugaacagccugacccugcccagcgaggugaaccugugcaacguggacaucuucaaccccaaguacgacugcaagaucaugaccagcaagaccgacgugagcagcagcgugaucaccagccugggcgccaucgugagcugcuacggcaagaccaagugcaccgccagcaacaagaacagaggcaucaucaagaccuucagcaacggcugcgacuacgugagcaacaagggcguggacaccgugagcgugggcaacacccuguacugcgugaacaagcaggagggccagagccuguacgugaagggcgagcccaucaucaacuucuacgacccccugguguuccccagcgacgaguucgacgccagcaucagccaggugaacgagaagaucaaccagagccuggccuucaucagaaagagcgacgagcugcugcacaacgugaacgccggcaagagcaccaccaacaucaugaucaccaccaucaucaucgugaucaucgugauccugcugagccugaucgccgugggccugcugcuguacugcaaggccagaagcacccccgugacccugagcaaggaccagcugagcggcaucaacaacaucgccuucagcaacugaggacuagugaagggaacacccaaauuuaauucagccuuaagcacaauuaauuaagagugaaacguaauuguacaagcaguuggucacccaccauagggcaugaucaacaccgcaaccuuuccuuuuucccccagugauucugaaaaaccccucuucccuucagcuugcuuagauguuccaaauuuaguaagcuuaaggcggccuacagaagaaaaagaaaaaaaaggccacaaaaguucccucucacuuucaguaaauaaaauaaaagcagcaacagaaauaaagaaauaaaugaaauucaaaaugaaauaaauauuguguugugcagcauuaaaaaaucaauaaaaauuaaaaaugagcaagaucuaaaaaaaaaaaaaaaaaaaaaaaaaaaaaaaaaaaaaaaaaaaaaaaaaaaaaaaaaaaaaaaaugcaucccccccccccccccccccccccccccccccaaaggcucuuuucagagccaccagaauu

SEQ ID NO: 1858 - RNA, 2193 nt, Artificial Sequence
  mRNA product Design f-1 comprising derived and/or modified sequence from HRSV(A2)__F_DSCav1_mut1 (opt5)
gggagagcggcucggccauuuugucccagucaguccggaggcugcggcugcagaaguaccgccugcggaguaacugcaaagaagcuuaccauggagcugcucauccugaaggccaacgcuauuaccacaauccuuacggccgugaccuucugcuuugcgagcggccagaauauuacagaagaguucuaccaauccaccuguucugcugucagcaaaggguaucugggagcccucagaacaggcugguacaccuccguuaucacaauugaacugucuaacaucaaggagaauaaaugcaacgggaccgacgccaaggugaaacuuaucaagcaggaacuggauaaguauaaaaaugcugugacggagcuccagcugcugaugcagagcacccccgccacaggauccggcucugcuauuuguagcggggucgccgugugcaagguucuccaccuggagggagaagugaacaaaaucaaguccgcgcuucugagcaccaauaaagccgucgugucucucuccaacggcguuagcgugcugacauuuaagguccuugaccugaagaauuacauugauaaacaacuccugccuauccugaacaagcagucuuguuccauuccgaauaucgagaccgugauugaguuccagcagaaaaacaaucggcuccuggaaaucacgcgcgaguuuagcgugaacgcuggcgucacaacccccguuucuacauauaugcuuaccaauuccgaacugcucagccugaucaacgacaugccuauuaccaacgaucaaaagaaacuuauguccaauaacgugcagaucgugagacagcagucuuacagcauuaugugcaucauuaaggaggaaguccuggccuaugugguucaacucccccuguacggggugaucgacacaccuuguuggaaacugcauacgagcccccucugcaccacaaauaccaaggagggauccaacaucugucugacacggaccgaucgcggcugguacugcgacaaugcugggucugucuccuucuuuccucaggccgaaacguguaaggugcagagcaacagaguuuucugcgauacaaugaacucucuuacccugccgagcgaggugaaucucugcaaugucgacauuuuuaaccccaaauaugauuguaagaucaugaccuccaaaacagacgugucuagcuccgucauuaccagccugggagcgaucgugucuugcuacggcaagacaaaauguacggccuccaauaagaaccgggggauuaucaagaccuucagcaauggaugcgauuauguuucuaacaaaggcguggacacagucuccgugggcaauacccuuuacuguguuaacaagcaagaggggcagagccuguaugugaaaggagaaccuaucauuaacuuuuacgacccccucgucuucccuuccgaugaguuugacgcuucuaucagccaggugaaugaaaagauuaaccagucccuggccuucauccgcaaaucugaugagcugcuccacaaugugaacgcuggcaagagcacaaccaauauuaugaucacgaccauuaucaucguuauuaucgucauucugcuuucccugaucgccguggggcuccugcuguauugcaaggccagaagcacacccgugacccuuucuaaagaccaacucuccggaauuaacaauaucgcuuucagcaacugaggacuagugaagggaacacccaaauuuaauucagccuuaagcacaauuaauuaagagugaaacguaauuguacaagcaguuggucacccaccauagggcaugaucaacaccgcaaccuuuccuuuuucccccagugauucugaaaaaccccucuucccuucagcuugcuuagauguuccaaauuuaguaagcuuaaggcggccuacagaagaaaaagaaaaaaaaggccacaaaaguucccucucacuuucaguaaauaaaauaaaagcagcaacagaaauaaagaaauaaaugaaauucaaaaugaaauaaauauuguguugugcagcauuaaaaaaucaauaaaaauuaaaaaugagcaagaucuaaaaaaaaaaaaaaaaaaaaaaaaaaaaaaaaaaaaaaaaaaaaaaaaaaaaaaaaaaaaaaaaugcaucccccccccccccccccccccccccccccccaaaggcucuuuucagagccaccagaauu

SEQ ID NO: 1859 - RNA, 2193 nt, Artificial Sequence
  mRNA product Design f-1 comprising derived and/or modified sequence from HRSV(A2)__F_DSCav1_mut1 (opt6)
gggagagcggcucggccauuuugucccagucaguccggaggcugcggcugcagaaguaccgccugcggaguaacugcaaagaagcuuaccauggaacuauuaauacuaaaagcaaacgcuauaacaacaauacuaacagcagucacauucugcuuugcaucaggccaaaacaucacagaagaauuuuaccaaucaacaugcuccgccguaucgaaaggauaccuaggcgcauuaagaaccggaugguauacaucagucauaacaauugaacuaucuaacauaaaagaaaacaaauguaacggcacagaugccaaaguaaaacucaucaaacaagaauuagauaaauacaaaaacgcagucacugaacuacaacucuuaaugcaaucaacaccugcaacaggaucaggaucagcaauaugcucaggaguagccguauguaaaguacuacaccuagaaggagaagucaacaaaauaaaaucagcccuccuaaguacaaacaaagcugucguaucacuauccaaugguguuucaguacuaacuuucaaaguucuagaccuaaaaaacuacauagacaaacaacuacuaccaauacuaaauaaacaaaguuguucuauacccaacauagaaaccgucauagaauuucaacaaaaaaauaauagacuccuagaaauaacaagagaauuuucaguuaacgcagguguaacaaccccaguauccaccuauaugcuaacaaauucagaauuacuuucccuaaucaacgacaugcccauaacaaaugaccaaaaaaaauuaaugucaaacaacguccaaauaguucgucaacaaucauauucaauaaugugcauaauaaaagaagaagucuuagccuacguaguacaacuuccccuuuauggaguuaucgacacacccugcuggaaacuccacacuucaccacuauguacuacaaacacaaaagaaggauccaacaucugccucacaagaaccgaucgaggaugguacugugauaacgccggauccgucucauucuucccacaagcagaaacaugcaaaguacaaucaaacagaguauuuugcgacacaaugaacucccucacauuaccuucugaaguaaaccuauguaauguagacauauucaaccccaaauacgauugcaaaauaaugacaucaaagacagauguaucaucaagugucaucacaucccuaggagcaauugucucauguuaugguaaaacaaaaugcaccgcaucaaauaaaaacagaggcauaauaaaaaccuucucaaacgguugugacuacguauccaauaaaggcgucgacacaguaucaguagguaacacauuauauuguguaaacaaacaagaaggacagucccuauauguaaaaggagaaccaauaaucaacuucuacgacccacuuguuuucccuucugaugaauuugacgcaaguauaucacaaguaaaugaaaaaaucaaucaaucacuagccuuuauaagaaaaucagaugaauuauuacacaacguaaacgccggaaaaucaacaaccaacauaaugauaaccacaauaauaaucgucauaauagucauccuacuaucacucauagcaguuggacuccuacuauacugcaaagcacgaucaacaccaguaacauuauccaaagaccaacuaagugguaucaauaacaucgccuuuucaaacugaggacuagugaagggaacacccaaauuuaauucagccuuaagcacaauuaauuaagagugaaacguaauuguacaagcaguuggucacccaccauagggcaugaucaacaccgcaaccuuuccuuuuucccccagugauucugaaaaaccccucuucccuucagcuugcuuagauguuccaaauuuaguaagcuuaaggcggccuacagaagaaaaagaaaaaaaaggccacaaaaguucccucucacuuucaguaaauaaaauaaaagcagcaacagaaauaaagaaauaaaugaaauucaaaaugaaauaaauauuguguugugcagcauuaaaaaaucaauaaaaauuaaaaaugagcaagaucuaaaaaaaaaaaaaaaaaaaaaaaaaaaaaaaaaaaaaaaaaaaaaaaaaaaaaaaaaaaaaaaaugcaucccccccccccccccccccccccccccccccaaaggcucuuuucagagccaccagaauu

SEQ ID NO: 1860 - RNA, 2193 nt, Artificial Sequence
  mRNA product Design f-1 comprising derived and/or modified sequence from HRSV(A2)__F_DSCav1_mut1 (opt11)
gggagagcggcucggccauuuugucccagucaguccggaggcugcggcugcagaaguaccgccugcggaguaacugcaaagaagcuuaccauggaacuccuaauccucaaagccaacgcaaucaccacaauccucacugccgucaccuucugcuucgccuccggccaaaacauaacagaagaauuuuaccaaucaaccuguucagcggucuccaaaggcuaccucggcgcccuccgcaccggcugguacaccuccgugaucaccauagaacucuccaacaucaaggaaaacaaaugcaacggcaccgacgcgaaggucaaacuuauuaaacaagaacucgacaaauacaaaaacgcagucaccgaacuacaacuccuaaugcaguccacgccagccaccggcucuggcucagccauaugcuccgguguggccguaugcaaaguccuacaccucgaaggagaagucaacaaaauaaaauccgcccuacuguccacaaacaaggccguagucucccucucaaacggcgucucaguacucaccuucaaaguccuagaccucaagaacuacaucgacaaacaacuccuacccauacuaaacaaacaauccugcucaauccccaacaucgaaaccguaauagaauuucaacaaaaaaacaacagacuccuggagaucacccgggaauuuuccguaaacgccggagucacaacacccgucucaaccuacaugcuaacgaacucagagcuccucucacuuaucaacgacaugcccauaacaaacgaccaaaaaaaacucauguccaacaacgugcaaaucguccgacaacaauccuacuccaucaugugcaucauuaaagaagaaguccucgcauacguaguccagcucccccucuacggcgucauagacacccccugcuggaaacuacacacaucaccccucugcacaacaaacaccaaagaaggcuccaacaucugccucacccgcaccgaccgaggcugguacugcgauaacgccggcagcgucuccuucuucccccaagcagaaaccugcaagguccaauccaaccgaguuuucugcgacacuaugaacucgcucacccuccccuccgaagucaaccucugcaacgucgacauuuucaaccccaaauacgacugcaaaaucaugaccuccaagaccgacguauccuccuccgucaucaccucccuaggcgccauaguaaguugcuacggcaaaaccaagugcacagcaagcaacaaaaaccgaggaauaaucaaaaccuucuccaacggcugcgacuacguauccaacaagggcgucgacaccguauccguagggaacacccuuuacugcguaaacaaacaagaaggacaaucacucuacguaaaaggcgaacccauaaucaacuucuacgacccccucguauuucccuccgacgaauuugacgcaucaaucucacaggucaacgaaaaaauaaaccaaucgcuagcauucaucagaaaaucagacgaacuccuacacaacgucaacgcaggcaagagcaccaccaacaucaugaucaccaccaucaucaucgucauaaucgucauacuacucucacucauagcagucggccuccuccuauacuguaaagcaaggucgaccccagucacccuauccaaagaccaacuaagcggcaucaacaacaucgcguucucaaacuaaggacuagugaagggaacacccaaauuuaauucagccuuaagcacaauuaauuaagagugaaacguaauuguacaagcaguuggucacccaccauagggcaugaucaacaccgcaaccuuuccuuuuucccccagugauucugaaaaaccccucuucccuucagcuugcuuagauguuccaaauuuaguaagcuuaaggcggccuacagaagaaaaagaaaaaaaaggccacaaaaguucccucucacuuucaguaaauaaaauaaaagcagcaacagaaauaaagaaauaaaugaaauucaaaaugaaauaaauauuguguugugcagcauuaaaaaaucaauaaaaauuaaaaaugagcaagaucuaaaaaaaaaaaaaaaaaaaaaaaaaaaaaaaaaaaaaaaaaaaaaaaaaaaaaaaaaaaaaaaaugcaucccccccccccccccccccccccccccccccaaaggcucuuuucagagccaccagaauu

SEQ ID NO: 1861 - RNA, 1973 nt, Artificial Sequence
  mRNA product Design f-2 comprising derived and/or modified sequence from HRSV(A2)__F_DSCav1_mut1 (opt1)
gggagagcggcucggccauuuugucccagucaguccggaggcugcggcugcagaaguaccgccugcggaguaacugcaaagaagcuuaccauggagcugcucauccugaaggccaacgccaucaccaccauccugacggcggugaccuucugcuucgccagcggccagaacaucaccgaggaguucuaccaguccacgugcagcgccgucuccaagggguaccucggcgcccugcggaccggcugguacaccuccgugaucaccaucgagcugagcaacaucaaggagaacaagugcaacgggaccgacgccaaggugaagcucaucaagcaggagcuggacaaguacaagaacgcggucacggagcugcagcuccugaugcaguccaccccggcaaccggcuccggcuccgccaucugcagcggcgucgccgugugcaaggugcugcaccucgagggggaggucaacaagaucaagagcgcccugcuguccaccaacaaggccguggugagccucuccaacggcgucagcgugcugaccuucaaggugcuggaccucaagaacuacaucgacaagcagcugcugcccauccugaacaagcagagcugcuccauccccaacaucgagacggugaucgaguuccagcagaagaacaaccggcuccuggagaucacccgcgaguucagcgugaacgccggggucaccacccccguguccacguacaugcugaccaacagcgagcuccugucccugaucaacgacaugccgaucaccaacgaccagaagaagcucaugagcaacaacgugcagaucguccggcagcaguccuacagcaucaugugcaucaucaaggaggaggugcuggcguacgugguccagcugccccucuacggcgugaucgacacccccugcuggaagcugcacacgagcccccugugcaccaccaacaccaaggagggguccaacaucugccucacgcgcaccgaccggggcugguacugcgacaacgccggcagcgucuccuucuucccgcaggccgagaccugcaaggugcagagcaaccgcguguucugcgacaccaugaacucccugacgcugcccagcgagguaaaccucugcaacgucgacaucuucaaccccaaguacgacugcaagaucaugaccuccaagaccgacgugagcuccagcgugaucaccucccugggggccaucgucagcugcuacggcaagacgaagugcaccgccagcaacaagaaccgggggaucaucaagaccuucuccaacggcugcgacuacgugagcaacaagggcguggacaccguguccgucgggaacacccuguacugcgugaacaagcaggagggccagagccucuacgugaagggggagcccaucaucaacuucuacgacccgcuggucuuccccuccgacgaguucgacgcgagcaucucccaggugaacgagaagaucaaccagagccuggccuucauccgcaaguccgacgagcugcuccacaacgugaacgccggcaagagcacgaccaacaucaugaucaccaccaucaucaucgucaucaucgugauccugcugucccucaucgccguggggcugcugcucuacugcaaggcccggagcacgcccgucacccuguccaaggaccagcugagcggcaucaacaacaucgcguucuccaacugaggacuaguggaagcauuuuccuggcugauuaaaagaaauuacucagcuauggucaucuguuccuguuagaaggcuaugcagcauauuauauacuaugcgcauguuaugaaaugcauaauaaaaaauuuuaaaaaaucuaaaagaucuaaaaaaaaaaaaaaaaaaaaaaaaaaaaaaaaaaaaaaaaaaaaaaaaaaaaaaaaaaaaaaaaugcaucccccccccccccccccccccccccccccccaaaggcucuuuucagagccaccagaauu

SEQ ID NO: 1862 - RNA, 1973 nt, Artificial Sequence
  mRNA product Design f-2 comprising derived and/or modified sequence from HRSV(A2)__F_DSCav1_mut1 (opt1)
gggagagcggcucggccauuuugucccagucaguccggaggcugcggcugcagaaguaccgccugcggaguaacugcaaagaagcuuaccauggagcugcucauccugaaggccaacgccaucaccaccauccugacggcggugaccuucugcuucgccagcggccagaacaucaccgaggaguucuaccaguccacgugcagcgccgucuccaagggguaccucggcgcccugcgcaccgggugguacaccagcgugaucaccaucgagcuguccaacaucaaggagaacaagugcaacggcaccgacgccaaggugaagcucaucaagcaggagcuggacaaguacaagaacgcggucacggagcugcagcuccugaugcagagcacccccgccaccggguccggcagcgccaucugcuccggcguggccgugugcaagguccugcaccucgagggggaggugaacaagaucaagagcgcgcugcuguccaccaacaaggccguggucagccucuccaacggcgugagcgugcugacguucaagguccuggaccucaagaacuacaucgacaagcagcugcugccgauccucaacaagcaguccugcagcauccccaacaucgagaccgugaucgaguuccagcagaagaacaaccggcugcuggagaucacccgcgaguucuccgugaacgccggggucaccacgcccgugagcaccuacaugcucaccaacuccgagcugcugagccucaucaacgacaugcccaucaccaacgaccagaagaagcugaugagcaacaacgugcagaucguccggcagcaguccuacagcaucaugugcaucaucaaggaggaggugcuggccuacgugguccagcucccgcuguacggcgugaucgacacgcccugcuggaagcugcacaccagcccccucugcaccaccaacacgaaggagggguccaacaucugccugacccgcaccgaccggggcugguacugcgacaacgccggcuccgugagcuucuucccccaggcggagaccugcaagguccaguccaaccgcguguucugcgacacgaugaacagccugacccucccguccgaggucaaccugugcaacguggacaucuucaaccccaaguacgacugcaagaucaugaccagcaagaccgacguguccagcuccgucaucacgagccugggggccaucguguccugcuacggcaagaccaagugcaccgccagcaacaagaaccgggggaucaucaagaccuucuccaacggcugcgacuacgugagcaacaagggcgucgacacgguguccguggggaacacccucuacugcgucaacaagcaggagggccagagccuguacgugaagggggagcccaucaucaacuucuacgacccccugguguucccgagcgacgaguucgacgccuccaucagccaggucaacgagaagaucaaccagucccucgccuucauccgcaagagcgacgagcugcugcacaacgugaacgcgggcaaguccaccaccaacaucaugaucaccacgaucaucaucgugaucaucgucauccuccugagccugaucgccguggggcuccugcuguacugcaaggcccgguccacccccgugacccugagcaaggaccagcucuccggcaucaacaacaucgccuucagcaacugaggacuaguggaagcauuuuccuggcugauuaaaagaaauuacucagcuauggucaucuguuccuguuagaaggcuaugcagcauauuauauacuaugcgcauguuaugaaaugcauaauaaaaaauuuuaaaaaaucuaaaagaucuaaaaaaaaaaaaaaaaaaaaaaaaaaaaaaaaaaaaaaaaaaaaaaaaaaaaaaaaaaaaaaaaugcaucccccccccccccccccccccccccccccccaaaggcucuuuucagagccaccagaauu

SEQ ID NO: 1863 - RNA, 1973 nt, Artificial Sequence
  mRNA product Design f-2 comprising derived and/or modified sequence from HRSV(A2)__F_DSCav1_mut1 (opt2)
gggagagcggcucggccauuuugucccagucaguccggaggcugcggcugcagaaguaccgccugcggaguaacugcaaagaagcuuaccauggagcuccucauccucaaggccaacgccaucaccaccauccucaccgccgucaccuucugcuucgccuccggccagaacaucaccgaggaguucuaccaguccaccugcuccgccgucuccaagggcuaccucggcgcccuccgcaccggcugguacaccuccgucaucaccaucgagcucuccaacaucaaggagaacaagugcaacggcaccgacgccaaggucaagcucaucaagcaggagcucgacaaguacaagaacgccgucaccgagcuccagcuccucaugcaguccacccccgccaccggcuccggcuccgccaucugcuccggcgucgccgucugcaagguccuccaccucgagggcgaggucaacaagaucaaguccgcccuccucuccaccaacaaggccgucgucucccucuccaacggcgucuccguccucaccuucaagguccucgaccucaagaacuacaucgacaagcagcuccuccccauccucaacaagcaguccugcuccauccccaacaucgagaccgucaucgaguuccagcagaagaacaaccgccuccucgagaucacccgcgaguucuccgucaacgccggcgucaccacccccgucuccaccuacaugcucaccaacuccgagcuccucucccucaucaacgacaugcccaucaccaacgaccagaagaagcucauguccaacaacguccagaucguccgccagcaguccuacuccaucaugugcaucaucaaggaggagguccucgccuacgucguccagcucccccucuacggcgucaucgacacccccugcuggaagcuccacaccuccccccucugcaccaccaacaccaaggagggcuccaacaucugccucacccgcaccgaccgcggcugguacugcgacaacgccggcuccgucuccuucuucccccaggccgagaccugcaagguccaguccaaccgcgucuucugcgacaccaugaacucccucacccuccccuccgaggucaaccucugcaacgucgacaucuucaaccccaaguacgacugcaagaucaugaccuccaagaccgacgucuccuccuccgucaucaccucccucggcgccaucgucuccugcuacggcaagaccaagugcaccgccuccaacaagaaccgcggcaucaucaagaccuucuccaacggcugcgacuacgucuccaacaagggcgucgacaccgucuccgucggcaacacccucuacugcgucaacaagcaggagggccagucccucuacgucaagggcgagcccaucaucaacuucuacgacccccucgucuuccccuccgacgaguucgacgccuccaucucccaggucaacgagaagaucaaccagucccucgccuucauccgcaaguccgacgagcuccuccacaacgucaacgccggcaaguccaccaccaacaucaugaucaccaccaucaucaucgucaucaucgucauccuccucucccucaucgccgucggccuccuccucuacugcaaggcccgcuccacccccgucacccucuccaaggaccagcucuccggcaucaacaacaucgccuucuccaacugaggacuaguggaagcauuuuccuggcugauuaaaagaaauuacucagcuauggucaucuguuccuguuagaaggcuaugcagcauauuauauacuaugcgcauguuaugaaaugcauaauaaaaaauuuuaaaaaaucuaaaagaucuaaaaaaaaaaaaaaaaaaaaaaaaaaaaaaaaaaaaaaaaaaaaaaaaaaaaaaaaaaaaaaaaugcaucccccccccccccccccccccccccccccccaaaggcucuuuucagagccaccagaauu

SEQ ID NO: 1864 - RNA, 1973 nt, Artificial Sequence
  mRNA product Design f-2 comprising derived and/or modified sequence from HRSV(A2)__F_DSCav1_mut1 (opt3)
gggagagcggcucggccauuuugucccagucaguccggaggcugcggcugcagaaguaccgccugcggaguaacugcaaagaagcuuaccauggagcugcucauccuuaaggccaacgcuauuaccacaauacugacugcagugacguucugcuuugccagcggccagaauaucaccgaagaguucuaccaauccacauguucugcggucucaaaaggguauuugggagcuuuaagaacugguugguacaccaguguuauuacaaucgaacugagcaacauuaaggagaauaaaugcaacggcaccgacgccaaggugaaacuaaucaagcaggaacucgauaaguauaaaaaugcaguaacugagcugcagcuucugaugcaguccacacccgccaccgggucuggaucggcuauauguucaggcguggcagucugcaagguguugcaccucgagggugaaguuaacaaaaucaagagcgcccugcugaguacgaauaaagcuguggucucccucucuaacggggugagcguauuaacuuuuaagguucuggaccuuaagaauuacauugauaaacaauugcugccuauccuaaacaagcaguccuguucaauuccaaauaucgagaccgugauagaguuccagcagaaaaacaauaggcuccuggaaauuacacgggaguuuagugucaacgccggagugacuaccccggugagcacauauaugcuuaccaauucugaacuguugucccucaucaacgacaugcccauuacgaacgaucaaaagaaacugaugucaaauaacguccagaucguucgccagcagagcuacaguaucaugugcauuauaaaggaggaaguguuagcguauguagugcaacugccucucuacggcgucaucgacacuccauguuggaaacuucauacaucuccccugugcaccacuaauacaaaggagggcuccaacauuuguuugacccgaacggaucgugggugguacugcgacaaugcaggaagcgugucguucuuuccucaggccgaaaccuguaagguucagucuaacagaguguucugcgauacaaugaacucccuaacucugccaucagaggucaaucucugcaauguggacaucuuuaaccccaaauaugauuguaagauaaugaccaguaaaacagacguaagcuccucuguuauuacuagccugggugcuaucgugucaugcuacggcaagaccaaauguacagccaguaauaagaacagggggaucauuaagaccuucuccaauggaugcgauuaugucagcaacaaaggcguggacacugucucuguggguaauacgcuuuacuguguuaacaagcaagaggggcagucacuguaugugaaaggagaaccuaucauuaacuuuuacgacccauugguauucccgagugaugaguuugacgcaagcauaucccaggucaaugaaaagaucaaccagucucucgcuuucauucggaaaucggaugagcuguuacacaaugugaacgccggcaagagcacaaccaauaucaugaucacuaccauuauaaucguuauuaucgugauucugcuaucccucaucgcggucggccugcuuuuguauugcaaggcccgcucaacacccgugacccugaguaaagaccaacucucugggauaaacaauaucgcauucagcaacugaggacuaguggaagcauuuuccuggcugauuaaaagaaauuacucagcuauggucaucuguuccuguuagaaggcuaugcagcauauuauauacuaugcgcauguuaugaaaugcauaauaaaaaauuuuaaaaaaucuaaaagaucuaaaaaaaaaaaaaaaaaaaaaaaaaaaaaaaaaaaaaaaaaaaaaaaaaaaaaaaaaaaaaaaaugcaucccccccccccccccccccccccccccccccaaaggcucuuuucagagccaccagaauu

SEQ ID NO: 1865 - RNA, 1973 nt, Artificial Sequence
  mRNA product Design f-2 comprising derived and/or modified sequence from HRSV(A2)__F_DSCav1_mut1 (opt4)
gggagagcggcucggccauuuugucccagucaguccggaggcugcggcugcagaaguaccgccugcggaguaacugcaaagaagcuuaccauggagcugcugauccugaaggccaacgccaucaccaccauccugaccgccgugaccuucugcuucgccagcggccagaacaucaccgaggaguucuaccagagcaccugcagcgccgugagcaagggcuaccugggcgcccugagaaccggcugguacaccagcgugaucaccaucgagcugagcaacaucaaggagaacaagugcaacggcaccgacgccaaggugaagcugaucaagcaggagcuggacaaguacaagaacgccgugaccgagcugcagcugcugaugcagagcacccccgccaccggcagcggcagcgccaucugcagcggcguggccgugugcaaggugcugcaccuggagggcgaggugaacaagaucaagagcgcccugcugagcaccaacaaggccguggugagccugagcaacggcgugagcgugcugaccuucaaggugcuggaccugaagaacuacaucgacaagcagcugcugcccauccugaacaagcagagcugcagcauccccaacaucgagaccgugaucgaguuccagcagaagaacaacagacugcuggagaucaccagagaguucagcgugaacgccggcgugaccacccccgugagcaccuacaugcugaccaacagcgagcugcugagccugaucaacgacaugcccaucaccaacgaccagaagaagcugaugagcaacaacgugcagaucgugagacagcagagcuacagcaucaugugcaucaucaaggaggaggugcuggccuacguggugcagcugccccuguacggcgugaucgacacccccugcuggaagcugcacaccagcccccugugcaccaccaacaccaaggagggcagcaacaucugccugaccagaaccgacagaggcugguacugcgacaacgccggcagcgugagcuucuucccccaggccgagaccugcaaggugcagagcaacagaguguucugcgacaccaugaacagccugacccugcccagcgaggugaaccugugcaacguggacaucuucaaccccaaguacgacugcaagaucaugaccagcaagaccgacgugagcagcagcgugaucaccagccugggcgccaucgugagcugcuacggcaagaccaagugcaccgccagcaacaagaacagaggcaucaucaagaccuucagcaacggcugcgacuacgugagcaacaagggcguggacaccgugagcgugggcaacacccuguacugcgugaacaagcaggagggccagagccuguacgugaagggcgagcccaucaucaacuucuacgacccccugguguuccccagcgacgaguucgacgccagcaucagccaggugaacgagaagaucaaccagagccuggccuucaucagaaagagcgacgagcugcugcacaacgugaacgccggcaagagcaccaccaacaucaugaucaccaccaucaucaucgugaucaucgugauccugcugagccugaucgccgugggccugcugcuguacugcaaggccagaagcacccccgugacccugagcaaggaccagcugagcggcaucaacaacaucgccuucagcaacugaggacuaguggaagcauuuuccuggcugauuaaaagaaauuacucagcuauggucaucuguuccuguuagaaggcuaugcagcauauuauauacuaugcgcauguuaugaaaugcauaauaaaaaauuuuaaaaaaucuaaaagaucuaaaaaaaaaaaaaaaaaaaaaaaaaaaaaaaaaaaaaaaaaaaaaaaaaaaaaaaaaaaaaaaaugcaucccccccccccccccccccccccccccccccaaaggcucuuuucagagccaccagaauu

SEQ ID NO: 1866 - RNA, 1973 nt, Artificial Sequence
  mRNA product Design f-2 comprising derived and/or modified sequence from HRSV(A2)__F_DSCav1_mut1 (opt5)
gggagagcggcucggccauuuugucccagucaguccggaggcugcggcugcagaaguaccgccugcggaguaacugcaaagaagcuuaccauggagcugcucauccugaaggccaacgcuauuaccacaauccuuacggccgugaccuucugcuuugcgagcggccagaauauuacagaagaguucuaccaauccaccuguucugcugucagcaaaggguaucugggagcccucagaacaggcugguacaccuccguuaucacaauugaacugucuaacaucaaggagaauaaaugcaacgggaccgacgccaaggugaaacuuaucaagcaggaacuggauaaguauaaaaaugcugugacggagcuccagcugcugaugcagagcacccccgccacaggauccggcucugcuauuuguagcggggucgccgugugcaagguucuccaccuggagggagaagugaacaaaaucaaguccgcgcuucugagcaccaauaaagccgucgugucucucuccaacggcguuagcgugcugacauuuaagguccuugaccugaagaauuacauugauaaacaacuccugccuauccugaacaagcagucuuguuccauuccgaauaucgagaccgugauugaguuccagcagaaaaacaaucggcuccuggaaaucacgcgcgaguuuagcgugaacgcuggcgucacaacccccguuucuacauauaugcuuaccaauuccgaacugcucagccugaucaacgacaugccuauuaccaacgaucaaaagaaacuuauguccaauaacgugcagaucgugagacagcagucuuacagcauuaugugcaucauuaaggaggaaguccuggccuaugugguucaacucccccuguacggggugaucgacacaccuuguuggaaacugcauacgagcccccucugcaccacaaauaccaaggagggauccaacaucugucugacacggaccgaucgcggcugguacugcgacaaugcugggucugucuccuucuuuccucaggccgaaacguguaaggugcagagcaacagaguuuucugcgauacaaugaacucucuuacccugccgagcgaggugaaucucugcaaugucgacauuuuuaaccccaaauaugauuguaagaucaugaccuccaaaacagacgugucuagcuccgucauuaccagccugggagcgaucgugucuugcuacggcaagacaaaauguacggccuccaauaagaaccgggggauuaucaagaccuucagcaauggaugcgauuauguuucuaacaaaggcguggacacagucuccgugggcaauacccuuuacuguguuaacaagcaagaggggcagagccuguaugugaaaggagaaccuaucauuaacuuuuacgacccccucgucuucccuuccgaugaguuugacgcuucuaucagccaggugaaugaaaagauuaaccagucccuggccuucauccgcaaaucugaugagcugcuccacaaugugaacgcuggcaagagcacaaccaauauuaugaucacgaccauuaucaucguuauuaucgucauucugcuuucccugaucgccguggggcuccugcuguauugcaaggccagaagcacacccgugacccuuucuaaagaccaacucuccggaauuaacaauaucgcuuucagcaacugaggacuaguggaagcauuuuccuggcugauuaaaagaaauuacucagcuauggucaucuguuccuguuagaaggcuaugcagcauauuauauacuaugcgcauguuaugaaaugcauaauaaaaaauuuuaaaaaaucuaaaagaucuaaaaaaaaaaaaaaaaaaaaaaaaaaaaaaaaaaaaaaaaaaaaaaaaaaaaaaaaaaaaaaaaugcaucccccccccccccccccccccccccccccccaaaggcucuuuucagagccaccagaauu

SEQ ID NO: 1867 - RNA, 1973 nt, Artificial Sequence
  mRNA product Design f-2 comprising derived and/or modified sequence from HRSV(A2)__F_DSCav1_mut1 (opt6)
gggagagcggcucggccauuuugucccagucaguccggaggcugcggcugcagaaguaccgccugcggaguaacugcaaagaagcuuaccauggaacuauuaauacuaaaagcaaacgcuauaacaacaauacuaacagcagucacauucugcuuugcaucaggccaaaacaucacagaagaauuuuaccaaucaacaugcuccgccguaucgaaaggauaccuaggcgcauuaagaaccggaugguauacaucagucauaacaauugaacuaucuaacauaaaagaaaacaaauguaacggcacagaugccaaaguaaaacucaucaaacaagaauuagauaaauacaaaaacgcagucacugaacuacaacucuuaaugcaaucaacaccugcaacaggaucaggaucagcaauaugcucaggaguagccguauguaaaguacuacaccuagaaggagaagucaacaaaauaaaaucagcccuccuaaguacaaacaaagcugucguaucacuauccaaugguguuucaguacuaacuuucaaaguucuagaccuaaaaaacuacauagacaaacaacuacuaccaauacuaaauaaacaaaguuguucuauacccaacauagaaaccgucauagaauuucaacaaaaaaauaauagacuccuagaaauaacaagagaauuuucaguuaacgcagguguaacaaccccaguauccaccuauaugcuaacaaauucagaauuacuuucccuaaucaacgacaugcccauaacaaaugaccaaaaaaaauuaaugucaaacaacguccaaauaguucgucaacaaucauauucaauaaugugcauaauaaaagaagaagucuuagccuacguaguacaacuuccccuuuauggaguuaucgacacacccugcuggaaacuccacacuucaccacuauguacuacaaacacaaaagaaggauccaacaucugccucacaagaaccgaucgaggaugguacugugauaacgccggauccgucucauucuucccacaagcagaaacaugcaaaguacaaucaaacagaguauuuugcgacacaaugaacucccucacauuaccuucugaaguaaaccuauguaauguagacauauucaaccccaaauacgauugcaaaauaaugacaucaaagacagauguaucaucaagugucaucacaucccuaggagcaauugucucauguuaugguaaaacaaaaugcaccgcaucaaauaaaaacagaggcauaauaaaaaccuucucaaacgguugugacuacguauccaauaaaggcgucgacacaguaucaguagguaacacauuauauuguguaaacaaacaagaaggacagucccuauauguaaaaggagaaccaauaaucaacuucuacgacccacuuguuuucccuucugaugaauuugacgcaaguauaucacaaguaaaugaaaaaaucaaucaaucacuagccuuuauaagaaaaucagaugaauuauuacacaacguaaacgccggaaaaucaacaaccaacauaaugauaaccacaauaauaaucgucauaauagucauccuacuaucacucauagcaguuggacuccuacuauacugcaaagcacgaucaacaccaguaacauuauccaaagaccaacuaagugguaucaauaacaucgccuuuucaaacugaggacuaguggaagcauuuuccuggcugauuaaaagaaauuacucagcuauggucaucuguuccuguuagaaggcuaugcagcauauuauauacuaugcgcauguuaugaaaugcauaauaaaaaauuuuaaaaaaucuaaaagaucuaaaaaaaaaaaaaaaaaaaaaaaaaaaaaaaaaaaaaaaaaaaaaaaaaaaaaaaaaaaaaaaaugcaucccccccccccccccccccccccccccccccaaaggcucuuuucagagccaccagaauu

SEQ ID NO: 1868 - RNA, 1973 nt, Artificial Sequence
  mRNA product Design f-2 comprising derived and/or modified sequence from HRSV(A2)__F_DSCav1_mut1 (opt11)
gggagagcggcucggccauuuugucccagucaguccggaggcugcggcugcagaaguaccgccugcggaguaacugcaaagaagcuuaccauggaacuccuaauccucaaagccaacgcaaucaccacaauccucacugccgucaccuucugcuucgccuccggccaaaacauaacagaagaauuuuaccaaucaaccuguucagcggucuccaaaggcuaccucggcgcccuccgcaccggcugguacaccuccgugaucaccauagaacucuccaacaucaaggaaaacaaaugcaacggcaccgacgcgaaggucaaacuuauuaaacaagaacucgacaaauacaaaaacgcagucaccgaacuacaacuccuaaugcaguccacgccagccaccggcucuggcucagccauaugcuccgguguggccguaugcaaaguccuacaccucgaaggagaagucaacaaaauaaaauccgcccuacuguccacaaacaaggccguagucucccucucaaacggcgucucaguacucaccuucaaaguccuagaccucaagaacuacaucgacaaacaacuccuacccauacuaaacaaacaauccugcucaauccccaacaucgaaaccguaauagaauuucaacaaaaaaacaacagacuccuggagaucacccgggaauuuuccguaaacgccggagucacaacacccgucucaaccuacaugcuaacgaacucagagcuccucucacuuaucaacgacaugcccauaacaaacgaccaaaaaaaacucauguccaacaacgugcaaaucguccgacaacaauccuacuccaucaugugcaucauuaaagaagaaguccucgcauacguaguccagcucccccucuacggcgucauagacacccccugcuggaaacuacacacaucaccccucugcacaacaaacaccaaagaaggcuccaacaucugccucacccgcaccgaccgaggcugguacugcgauaacgccggcagcgucuccuucuucccccaagcagaaaccugcaagguccaauccaaccgaguuuucugcgacacuaugaacucgcucacccuccccuccgaagucaaccucugcaacgucgacauuuucaaccccaaauacgacugcaaaaucaugaccuccaagaccgacguauccuccuccgucaucaccucccuaggcgccauaguaaguugcuacggcaaaaccaagugcacagcaagcaacaaaaaccgaggaauaaucaaaaccuucuccaacggcugcgacuacguauccaacaagggcgucgacaccguauccguagggaacacccuuuacugcguaaacaaacaagaaggacaaucacucuacguaaaaggcgaacccauaaucaacuucuacgacccccucguauuucccuccgacgaauuugacgcaucaaucucacaggucaacgaaaaaauaaaccaaucgcuagcauucaucagaaaaucagacgaacuccuacacaacgucaacgcaggcaagagcaccaccaacaucaugaucaccaccaucaucaucgucauaaucgucauacuacucucacucauagcagucggccuccuccuauacuguaaagcaaggucgaccccagucacccuauccaaagaccaacuaagcggcaucaacaacaucgcguucucaaacuaaggacuaguggaagcauuuuccuggcugauuaaaagaaauuacucagcuauggucaucuguuccuguuagaaggcuaugcagcauauuauauacuaugcgcauguuaugaaaugcauaauaaaaaauuuuaaaaaaucuaaaagaucuaaaaaaaaaaaaaaaaaaaaaaaaaaaaaaaaaaaaaaaaaaaaaaaaaaaaaaaaaaaaaaaaugcaucccccccccccccccccccccccccccccccaaaggcucuuuucagagccaccagaauu

SEQ ID NO: 1869 - RNA, 1964 nt, Artificial Sequence
  mRNA product Design f-3 comprising derived and/or modified sequence from HRSV(A2)__F_DSCav1_mut1 (opt1)
gggagagucccgcagucggcguccagcggcucugcuuguucgugugugugucguugcaggccuuauucaagcuuaccauggagcugcucauccugaaggccaacgccaucaccaccauccugacggcggugaccuucugcuucgccagcggccagaacaucaccgaggaguucuaccaguccacgugcagcgccgucuccaagggguaccucggcgcccugcggaccggcugguacaccuccgugaucaccaucgagcugagcaacaucaaggagaacaagugcaacgggaccgacgccaaggugaagcucaucaagcaggagcuggacaaguacaagaacgcggucacggagcugcagcuccugaugcaguccaccccggcaaccggcuccggcuccgccaucugcagcggcgucgccgugugcaaggugcugcaccucgagggggaggucaacaagaucaagagcgcccugcuguccaccaacaaggccguggugagccucuccaacggcgucagcgugcugaccuucaaggugcuggaccucaagaacuacaucgacaagcagcugcugcccauccugaacaagcagagcugcuccauccccaacaucgagacggugaucgaguuccagcagaagaacaaccggcuccuggagaucacccgcgaguucagcgugaacgccggggucaccacccccguguccacguacaugcugaccaacagcgagcuccugucccugaucaacgacaugccgaucaccaacgaccagaagaagcucaugagcaacaacgugcagaucguccggcagcaguccuacagcaucaugugcaucaucaaggaggaggugcuggcguacgugguccagcugccccucuacggcgugaucgacacccccugcuggaagcugcacacgagcccccugugcaccaccaacaccaaggagggguccaacaucugccucacgcgcaccgaccggggcugguacugcgacaacgccggcagcgucuccuucuucccgcaggccgagaccugcaaggugcagagcaaccgcguguucugcgacaccaugaacucccugacgcugcccagcgagguaaaccucugcaacgucgacaucuucaaccccaaguacgacugcaagaucaugaccuccaagaccgacgugagcuccagcgugaucaccucccugggggccaucgucagcugcuacggcaagacgaagugcaccgccagcaacaagaaccgggggaucaucaagaccuucuccaacggcugcgacuacgugagcaacaagggcguggacaccguguccgucgggaacacccuguacugcgugaacaagcaggagggccagagccucuacgugaagggggagcccaucaucaacuucuacgacccgcuggucuuccccuccgacgaguucgacgcgagcaucucccaggugaacgagaagaucaaccagagccuggccuucauccgcaaguccgacgagcugcuccacaacgugaacgccggcaagagcacgaccaacaucaugaucaccaccaucaucaucgucaucaucgugauccugcugucccucaucgccguggggcugcugcucuacugcaaggcccggagcacgcccgucacccuguccaaggaccagcugagcggcaucaacaacaucgcguucuccaacugaggacuaguacuggcugcaucucccuuuccucuguccuccauccuucucccaggauggugaagggggaccugguacccagugauccccaccccaggauccuaaaucaugacuuaccugcuaauaaaaacucauuggaaaagugagaagaucuaaaaaaaaaaaaaaaaaaaaaaaaaaaaaaaaaaaaaaaaaaaaaaaaaaaaaaaaaaaaaaaaugcaucccccccccccccccccccccccccccccccaaaggcucuuuucagagccaccagaauu

SEQ ID NO: 1870 - RNA, 1964 nt, Artificial Sequence
  mRNA product Design f-3 comprising derived and/or modified sequence from HRSV(A2)__F_DSCav1_mut1 (opt1)
gggagagucccgcagucggcguccagcggcucugcuuguucgugugugugucguugcaggccuuauucaagcuuaccauggagcugcucauccugaaggccaacgccaucaccaccauccugacggcggugaccuucugcuucgccagcggccagaacaucaccgaggaguucuaccaguccacgugcagcgccgucuccaagggguaccucggcgcccugcgcaccgggugguacaccagcgugaucaccaucgagcuguccaacaucaaggagaacaagugcaacggcaccgacgccaaggugaagcucaucaagcaggagcuggacaaguacaagaacgcggucacggagcugcagcuccugaugcagagcacccccgccaccggguccggcagcgccaucugcuccggcguggccgugugcaagguccugcaccucgagggggaggugaacaagaucaagagcgcgcugcuguccaccaacaaggccguggucagccucuccaacggcgugagcgugcugacguucaagguccuggaccucaagaacuacaucgacaagcagcugcugccgauccucaacaagcaguccugcagcauccccaacaucgagaccgugaucgaguuccagcagaagaacaaccggcugcuggagaucacccgcgaguucuccgugaacgccggggucaccacgcccgugagcaccuacaugcucaccaacuccgagcugcugagccucaucaacgacaugcccaucaccaacgaccagaagaagcugaugagcaacaacgugcagaucguccggcagcaguccuacagcaucaugugcaucaucaaggaggaggugcuggccuacgugguccagcucccgcuguacggcgugaucgacacgcccugcuggaagcugcacaccagcccccucugcaccaccaacacgaaggagggguccaacaucugccugacccgcaccgaccggggcugguacugcgacaacgccggcuccgugagcuucuucccccaggcggagaccugcaagguccaguccaaccgcguguucugcgacacgaugaacagccugacccucccguccgaggucaaccugugcaacguggacaucuucaaccccaaguacgacugcaagaucaugaccagcaagaccgacguguccagcuccgucaucacgagccugggggccaucguguccugcuacggcaagaccaagugcaccgccagcaacaagaaccgggggaucaucaagaccuucuccaacggcugcgacuacgugagcaacaagggcgucgacacgguguccguggggaacacccucuacugcgucaacaagcaggagggccagagccuguacgugaagggggagcccaucaucaacuucuacgacccccugguguucccgagcgacgaguucgacgccuccaucagccaggucaacgagaagaucaaccagucccucgccuucauccgcaagagcgacgagcugcugcacaacgugaacgcgggcaaguccaccaccaacaucaugaucaccacgaucaucaucgugaucaucgucauccuccugagccugaucgccguggggcuccugcuguacugcaaggcccgguccacccccgugacccugagcaaggaccagcucuccggcaucaacaacaucgccuucagcaacugaggacuaguacuggcugcaucucccuuuccucuguccuccauccuucucccaggauggugaagggggaccugguacccagugauccccaccccaggauccuaaaucaugacuuaccugcuaauaaaaacucauuggaaaagugagaagaucuaaaaaaaaaaaaaaaaaaaaaaaaaaaaaaaaaaaaaaaaaaaaaaaaaaaaaaaaaaaaaaaaugcaucccccccccccccccccccccccccccccccaaaggcucuuuucagagccaccagaauu

SEQ ID NO: 1871 - RNA, 1964 nt, Artificial Sequence
  mRNA product Design f-3 comprising derived and/or modified sequence from HRSV(A2)__F_DSCav1_mut1 (opt2)
gggagagucccgcagucggcguccagcggcucugcuuguucgugugugugucguugcaggccuuauucaagcuuaccauggagcuccucauccucaaggccaacgccaucaccaccauccucaccgccgucaccuucugcuucgccuccggccagaacaucaccgaggaguucuaccaguccaccugcuccgccgucuccaagggcuaccucggcgcccuccgcaccggcugguacaccuccgucaucaccaucgagcucuccaacaucaaggagaacaagugcaacggcaccgacgccaaggucaagcucaucaagcaggagcucgacaaguacaagaacgccgucaccgagcuccagcuccucaugcaguccacccccgccaccggcuccggcuccgccaucugcuccggcgucgccgucugcaagguccuccaccucgagggcgaggucaacaagaucaaguccgcccuccucuccaccaacaaggccgucgucucccucuccaacggcgucuccguccucaccuucaagguccucgaccucaagaacuacaucgacaagcagcuccuccccauccucaacaagcaguccugcuccauccccaacaucgagaccgucaucgaguuccagcagaagaacaaccgccuccucgagaucacccgcgaguucuccgucaacgccggcgucaccacccccgucuccaccuacaugcucaccaacuccgagcuccucucccucaucaacgacaugcccaucaccaacgaccagaagaagcucauguccaacaacguccagaucguccgccagcaguccuacuccaucaugugcaucaucaaggaggagguccucgccuacgucguccagcucccccucuacggcgucaucgacacccccugcuggaagcuccacaccuccccccucugcaccaccaacaccaaggagggcuccaacaucugccucacccgcaccgaccgcggcugguacugcgacaacgccggcuccgucuccuucuucccccaggccgagaccugcaagguccaguccaaccgcgucuucugcgacaccaugaacucccucacccuccccuccgaggucaaccucugcaacgucgacaucuucaaccccaaguacgacugcaagaucaugaccuccaagaccgacgucuccuccuccgucaucaccucccucggcgccaucgucuccugcuacggcaagaccaagugcaccgccuccaacaagaaccgcggcaucaucaagaccuucuccaacggcugcgacuacgucuccaacaagggcgucgacaccgucuccgucggcaacacccucuacugcgucaacaagcaggagggccagucccucuacgucaagggcgagcccaucaucaacuucuacgacccccucgucuuccccuccgacgaguucgacgccuccaucucccaggucaacgagaagaucaaccagucccucgccuucauccgcaaguccgacgagcuccuccacaacgucaacgccggcaaguccaccaccaacaucaugaucaccaccaucaucaucgucaucaucgucauccuccucucccucaucgccgucggccuccuccucuacugcaaggcccgcuccacccccgucacccucuccaaggaccagcucuccggcaucaacaacaucgccuucuccaacugaggacuaguacuggcugcaucucccuuuccucuguccuccauccuucucccaggauggugaagggggaccugguacccagugauccccaccccaggauccuaaaucaugacuuaccugcuaauaaaaacucauuggaaaagugagaagaucuaaaaaaaaaaaaaaaaaaaaaaaaaaaaaaaaaaaaaaaaaaaaaaaaaaaaaaaaaaaaaaaaugcaucccccccccccccccccccccccccccccccaaaggcucuuuucagagccaccagaauu

SEQ ID NO: 1872 - RNA, 1964 nt, Artificial Sequence
  mRNA product Design f-3 comprising derived and/or modified sequence from HRSV(A2)__F_DSCav1_mut1 (opt3)
gggagagucccgcagucggcguccagcggcucugcuuguucgugugugugucguugcaggccuuauucaagcuuaccauggagcugcucauccuuaaggccaacgcuauuaccacaauacugacugcagugacguucugcuuugccagcggccagaauaucaccgaagaguucuaccaauccacauguucugcggucucaaaaggguauuugggagcuuuaagaacugguugguacaccaguguuauuacaaucgaacugagcaacauuaaggagaauaaaugcaacggcaccgacgccaaggugaaacuaaucaagcaggaacucgauaaguauaaaaaugcaguaacugagcugcagcuucugaugcaguccacacccgccaccgggucuggaucggcuauauguucaggcguggcagucugcaagguguugcaccucgagggugaaguuaacaaaaucaagagcgcccugcugaguacgaauaaagcuguggucucccucucuaacggggugagcguauuaacuuuuaagguucuggaccuuaagaauuacauugauaaacaauugcugccuauccuaaacaagcaguccuguucaauuccaaauaucgagaccgugauagaguuccagcagaaaaacaauaggcuccuggaaauuacacgggaguuuagugucaacgccggagugacuaccccggugagcacauauaugcuuaccaauucugaacuguugucccucaucaacgacaugcccauuacgaacgaucaaaagaaacugaugucaaauaacguccagaucguucgccagcagagcuacaguaucaugugcauuauaaaggaggaaguguuagcguauguagugcaacugccucucuacggcgucaucgacacuccauguuggaaacuucauacaucuccccugugcaccacuaauacaaaggagggcuccaacauuuguuugacccgaacggaucgugggugguacugcgacaaugcaggaagcgugucguucuuuccucaggccgaaaccuguaagguucagucuaacagaguguucugcgauacaaugaacucccuaacucugccaucagaggucaaucucugcaauguggacaucuuuaaccccaaauaugauuguaagauaaugaccaguaaaacagacguaagcuccucuguuauuacuagccugggugcuaucgugucaugcuacggcaagaccaaauguacagccaguaauaagaacagggggaucauuaagaccuucuccaauggaugcgauuaugucagcaacaaaggcguggacacugucucuguggguaauacgcuuuacuguguuaacaagcaagaggggcagucacuguaugugaaaggagaaccuaucauuaacuuuuacgacccauugguauucccgagugaugaguuugacgcaagcauaucccaggucaaugaaaagaucaaccagucucucgcuuucauucggaaaucggaugagcuguuacacaaugugaacgccggcaagagcacaaccaauaucaugaucacuaccauuauaaucguuauuaucgugauucugcuaucccucaucgcggucggccugcuuuuguauugcaaggcccgcucaacacccgugacccugaguaaagaccaacucucugggauaaacaauaucgcauucagcaacugaggacuaguacuggcugcaucucccuuuccucuguccuccauccuucucccaggauggugaagggggaccugguacccagugauccccaccccaggauccuaaaucaugacuuaccugcuaauaaaaacucauuggaaaagugagaagaucuaaaaaaaaaaaaaaaaaaaaaaaaaaaaaaaaaaaaaaaaaaaaaaaaaaaaaaaaaaaaaaaaugcaucccccccccccccccccccccccccccccccaaaggcucuuuucagagccaccagaauu

SEQ ID NO: 1873 - RNA, 1964 nt, Artificial Sequence
  mRNA product Design f-3 comprising derived and/or modified sequence from HRSV(A2)__F_DSCav1_mut1 (opt4)
gggagagucccgcagucggcguccagcggcucugcuuguucgugugugugucguugcaggccuuauucaagcuuaccauggagcugcugauccugaaggccaacgccaucaccaccauccugaccgccgugaccuucugcuucgccagcggccagaacaucaccgaggaguucuaccagagcaccugcagcgccgugagcaagggcuaccugggcgcccugagaaccggcugguacaccagcgugaucaccaucgagcugagcaacaucaaggagaacaagugcaacggcaccgacgccaaggugaagcugaucaagcaggagcuggacaaguacaagaacgccgugaccgagcugcagcugcugaugcagagcacccccgccaccggcagcggcagcgccaucugcagcggcguggccgugugcaaggugcugcaccuggagggcgaggugaacaagaucaagagcgcccugcugagcaccaacaaggccguggugagccugagcaacggcgugagcgugcugaccuucaaggugcuggaccugaagaacuacaucgacaagcagcugcugcccauccugaacaagcagagcugcagcauccccaacaucgagaccgugaucgaguuccagcagaagaacaacagacugcuggagaucaccagagaguucagcgugaacgccggcgugaccacccccgugagcaccuacaugcugaccaacagcgagcugcugagccugaucaacgacaugcccaucaccaacgaccagaagaagcugaugagcaacaacgugcagaucgugagacagcagagcuacagcaucaugugcaucaucaaggaggaggugcuggccuacguggugcagcugccccuguacggcgugaucgacacccccugcuggaagcugcacaccagcccccugugcaccaccaacaccaaggagggcagcaacaucugccugaccagaaccgacagaggcugguacugcgacaacgccggcagcgugagcuucuucccccaggccgagaccugcaaggugcagagcaacagaguguucugcgacaccaugaacagccugacccugcccagcgaggugaaccugugcaacguggacaucuucaaccccaaguacgacugcaagaucaugaccagcaagaccgacgugagcagcagcgugaucaccagccugggcgccaucgugagcugcuacggcaagaccaagugcaccgccagcaacaagaacagaggcaucaucaagaccuucagcaacggcugcgacuacgugagcaacaagggcguggacaccgugagcgugggcaacacccuguacugcgugaacaagcaggagggccagagccuguacgugaagggcgagcccaucaucaacuucuacgacccccugguguuccccagcgacgaguucgacgccagcaucagccaggugaacgagaagaucaaccagagccuggccuucaucagaaagagcgacgagcugcugcacaacgugaacgccggcaagagcaccaccaacaucaugaucaccaccaucaucaucgugaucaucgugauccugcugagccugaucgccgugggccugcugcuguacugcaaggccagaagcacccccgugacccugagcaaggaccagcugagcggcaucaacaacaucgccuucagcaacugaggacuaguacuggcugcaucucccuuuccucuguccuccauccuucucccaggauggugaagggggaccugguacccagugauccccaccccaggauccuaaaucaugacuuaccugcuaauaaaaacucauuggaaaagugagaagaucuaaaaaaaaaaaaaaaaaaaaaaaaaaaaaaaaaaaaaaaaaaaaaaaaaaaaaaaaaaaaaaaaugcaucccccccccccccccccccccccccccccccaaaggcucuuuucagagccaccagaauu

SEQ ID NO: 1874 - RNA, 1964 nt, Artificial Sequence
  mRNA product Design f-3 comprising derived and/or modified sequence from HRSV(A2)__F_DSCav1_mut1 (opt5)
gggagagucccgcagucggcguccagcggcucugcuuguucgugugugugucguugcaggccuuauucaagcuuaccauggagcugcucauccugaaggccaacgcuauuaccacaauccuuacggccgugaccuucugcuuugcgagcggccagaauauuacagaagaguucuaccaauccaccuguucugcugucagcaaaggguaucugggagcccucagaacaggcugguacaccuccguuaucacaauugaacugucuaacaucaaggagaauaaaugcaacgggaccgacgccaaggugaaacuuaucaagcaggaacuggauaaguauaaaaaugcugugacggagcuccagcugcugaugcagagcacccccgccacaggauccggcucugcuauuuguagcggggucgccgugugcaagguucuccaccuggagggagaagugaacaaaaucaaguccgcgcuucugagcaccaauaaagccgucgugucucucuccaacggcguuagcgugcugacauuuaagguccuugaccugaagaauuacauugauaaacaacuccugccuauccugaacaagcagucuuguuccauuccgaauaucgagaccgugauugaguuccagcagaaaaacaaucggcuccuggaaaucacgcgcgaguuuagcgugaacgcuggcgucacaacccccguuucuacauauaugcuuaccaauuccgaacugcucagccugaucaacgacaugccuauuaccaacgaucaaaagaaacuuauguccaauaacgugcagaucgugagacagcagucuuacagcauuaugugcaucauuaaggaggaaguccuggccuaugugguucaacucccccuguacggggugaucgacacaccuuguuggaaacugcauacgagcccccucugcaccacaaauaccaaggagggauccaacaucugucugacacggaccgaucgcggcugguacugcgacaaugcugggucugucuccuucuuuccucaggccgaaacguguaaggugcagagcaacagaguuuucugcgauacaaugaacucucuuacccugccgagcgaggugaaucucugcaaugucgacauuuuuaaccccaaauaugauuguaagaucaugaccuccaaaacagacgugucuagcuccgucauuaccagccugggagcgaucgugucuugcuacggcaagacaaaauguacggccuccaauaagaaccgggggauuaucaagaccuucagcaauggaugcgauuauguuucuaacaaaggcguggacacagucuccgugggcaauacccuuuacuguguuaacaagcaagaggggcagagccuguaugugaaaggagaaccuaucauuaacuuuuacgacccccucgucuucccuuccgaugaguuugacgcuucuaucagccaggugaaugaaaagauuaaccagucccuggccuucauccgcaaaucugaugagcugcuccacaaugugaacgcuggcaagagcacaaccaauauuaugaucacgaccauuaucaucguuauuaucgucauucugcuuucccugaucgccguggggcuccugcuguauugcaaggccagaagcacacccgugacccuuucuaaagaccaacucuccggaauuaacaauaucgcuuucagcaacugaggacuaguacuggcugcaucucccuuuccucuguccuccauccuucucccaggauggugaagggggaccugguacccagugauccccaccccaggauccuaaaucaugacuuaccugcuaauaaaaacucauuggaaaagugagaagaucuaaaaaaaaaaaaaaaaaaaaaaaaaaaaaaaaaaaaaaaaaaaaaaaaaaaaaaaaaaaaaaaaugcaucccccccccccccccccccccccccccccccaaaggcucuuuucagagccaccagaauu

SEQ ID NO: 1875 - RNA, 1964 nt, Artificial Sequence
  mRNA product Design f-3 comprising derived and/or modified sequence from HRSV(A2)__F_DSCav1_mut1 (opt6)
gggagagucccgcagucggcguccagcggcucugcuuguucgugugugugucguugcaggccuuauucaagcuuaccauggaacuauuaauacuaaaagcaaacgcuauaacaacaauacuaacagcagucacauucugcuuugcaucaggccaaaacaucacagaagaauuuuaccaaucaacaugcuccgccguaucgaaaggauaccuaggcgcauuaagaaccggaugguauacaucagucauaacaauugaacuaucuaacauaaaagaaaacaaauguaacggcacagaugccaaaguaaaacucaucaaacaagaauuagauaaauacaaaaacgcagucacugaacuacaacucuuaaugcaaucaacaccugcaacaggaucaggaucagcaauaugcucaggaguagccguauguaaaguacuacaccuagaaggagaagucaacaaaauaaaaucagcccuccuaaguacaaacaaagcugucguaucacuauccaaugguguuucaguacuaacuuucaaaguucuagaccuaaaaaacuacauagacaaacaacuacuaccaauacuaaauaaacaaaguuguucuauacccaacauagaaaccgucauagaauuucaacaaaaaaauaauagacuccuagaaauaacaagagaauuuucaguuaacgcagguguaacaaccccaguauccaccuauaugcuaacaaauucagaauuacuuucccuaaucaacgacaugcccauaacaaaugaccaaaaaaaauuaaugucaaacaacguccaaauaguucgucaacaaucauauucaauaaugugcauaauaaaagaagaagucuuagccuacguaguacaacuuccccuuuauggaguuaucgacacacccugcuggaaacuccacacuucaccacuauguacuacaaacacaaaagaaggauccaacaucugccucacaagaaccgaucgaggaugguacugugauaacgccggauccgucucauucuucccacaagcagaaacaugcaaaguacaaucaaacagaguauuuugcgacacaaugaacucccucacauuaccuucugaaguaaaccuauguaauguagacauauucaaccccaaauacgauugcaaaauaaugacaucaaagacagauguaucaucaagugucaucacaucccuaggagcaauugucucauguuaugguaaaacaaaaugcaccgcaucaaauaaaaacagaggcauaauaaaaaccuucucaaacgguugugacuacguauccaauaaaggcgucgacacaguaucaguagguaacacauuauauuguguaaacaaacaagaaggacagucccuauauguaaaaggagaaccaauaaucaacuucuacgacccacuuguuuucccuucugaugaauuugacgcaaguauaucacaaguaaaugaaaaaaucaaucaaucacuagccuuuauaagaaaaucagaugaauuauuacacaacguaaacgccggaaaaucaacaaccaacauaaugauaaccacaauaauaaucgucauaauagucauccuacuaucacucauagcaguuggacuccuacuauacugcaaagcacgaucaacaccaguaacauuauccaaagaccaacuaagugguaucaauaacaucgccuuuucaaacugaggacuaguacuggcugcaucucccuuuccucuguccuccauccuucucccaggauggugaagggggaccugguacccagugauccccaccccaggauccuaaaucaugacuuaccugcuaauaaaaacucauuggaaaagugagaagaucuaaaaaaaaaaaaaaaaaaaaaaaaaaaaaaaaaaaaaaaaaaaaaaaaaaaaaaaaaaaaaaaaugcaucccccccccccccccccccccccccccccccaaaggcucuuuucagagccaccagaauu

SEQ ID NO: 1876 - RNA, 1964 nt, Artificial Sequence
  mRNA product Design f-3 comprising derived and/or modified sequence from HRSV(A2)__F_DSCav1_mut1 (opt11)
gggagagucccgcagucggcguccagcggcucugcuuguucgugugugugucguugcaggccuuauucaagcuuaccauggaacuccuaauccucaaagccaacgcaaucaccacaauccucacugccgucaccuucugcuucgccuccggccaaaacauaacagaagaauuuuaccaaucaaccuguucagcggucuccaaaggcuaccucggcgcccuccgcaccggcugguacaccuccgugaucaccauagaacucuccaacaucaaggaaaacaaaugcaacggcaccgacgcgaaggucaaacuuauuaaacaagaacucgacaaauacaaaaacgcagucaccgaacuacaacuccuaaugcaguccacgccagccaccggcucuggcucagccauaugcuccgguguggccguaugcaaaguccuacaccucgaaggagaagucaacaaaauaaaauccgcccuacuguccacaaacaaggccguagucucccucucaaacggcgucucaguacucaccuucaaaguccuagaccucaagaacuacaucgacaaacaacuccuacccauacuaaacaaacaauccugcucaauccccaacaucgaaaccguaauagaauuucaacaaaaaaacaacagacuccuggagaucacccgggaauuuuccguaaacgccggagucacaacacccgucucaaccuacaugcuaacgaacucagagcuccucucacuuaucaacgacaugcccauaacaaacgaccaaaaaaaacucauguccaacaacgugcaaaucguccgacaacaauccuacuccaucaugugcaucauuaaagaagaaguccucgcauacguaguccagcucccccucuacggcgucauagacacccccugcuggaaacuacacacaucaccccucugcacaacaaacaccaaagaaggcuccaacaucugccucacccgcaccgaccgaggcugguacugcgauaacgccggcagcgucuccuucuucccccaagcagaaaccugcaagguccaauccaaccgaguuuucugcgacacuaugaacucgcucacccuccccuccgaagucaaccucugcaacgucgacauuuucaaccccaaauacgacugcaaaaucaugaccuccaagaccgacguauccuccuccgucaucaccucccuaggcgccauaguaaguugcuacggcaaaaccaagugcacagcaagcaacaaaaaccgaggaauaaucaaaaccuucuccaacggcugcgacuacguauccaacaagggcgucgacaccguauccguagggaacacccuuuacugcguaaacaaacaagaaggacaaucacucuacguaaaaggcgaacccauaaucaacuucuacgacccccucguauuucccuccgacgaauuugacgcaucaaucucacaggucaacgaaaaaauaaaccaaucgcuagcauucaucagaaaaucagacgaacuccuacacaacgucaacgcaggcaagagcaccaccaacaucaugaucaccaccaucaucaucgucauaaucgucauacuacucucacucauagcagucggccuccuccuauacuguaaagcaaggucgaccccagucacccuauccaaagaccaacuaagcggcaucaacaacaucgcguucucaaacuaaggacuaguacuggcugcaucucccuuuccucuguccuccauccuucucccaggauggugaagggggaccugguacccagugauccccaccccaggauccuaaaucaugacuuaccugcuaauaaaaacucauuggaaaagugagaagaucuaaaaaaaaaaaaaaaaaaaaaaaaaaaaaaaaaaaaaaaaaaaaaaaaaaaaaaaaaaaaaaaaugcaucccccccccccccccccccccccccccccccaaaggcucuuuucagagccaccagaauu

SEQ ID NO: 1877 - RNA, 2180 nt, Artificial Sequence
  mRNA product Design f-4 comprising derived and/or modified sequence from HRSV(A2)__F_DSCav1_mut1 (opt1)
gggagagucccgcagucggcguccagcggcucugcuuguucgugugugugucguugcaggccuuauucaagcuuaccauggagcugcucauccugaaggccaacgccaucaccaccauccugacggcggugaccuucugcuucgccagcggccagaacaucaccgaggaguucuaccaguccacgugcagcgccgucuccaagggguaccucggcgcccugcggaccggcugguacaccuccgugaucaccaucgagcugagcaacaucaaggagaacaagugcaacgggaccgacgccaaggugaagcucaucaagcaggagcuggacaaguacaagaacgcggucacggagcugcagcuccugaugcaguccaccccggcaaccggcuccggcuccgccaucugcagcggcgucgccgugugcaaggugcugcaccucgagggggaggucaacaagaucaagagcgcccugcuguccaccaacaaggccguggugagccucuccaacggcgucagcgugcugaccuucaaggugcuggaccucaagaacuacaucgacaagcagcugcugcccauccugaacaagcagagcugcuccauccccaacaucgagacggugaucgaguuccagcagaagaacaaccggcuccuggagaucacccgcgaguucagcgugaacgccggggucaccacccccguguccacguacaugcugaccaacagcgagcuccugucccugaucaacgacaugccgaucaccaacgaccagaagaagcucaugagcaacaacgugcagaucguccggcagcaguccuacagcaucaugugcaucaucaaggaggaggugcuggcguacgugguccagcugccccucuacggcgugaucgacacccccugcuggaagcugcacacgagcccccugugcaccaccaacaccaaggagggguccaacaucugccucacgcgcaccgaccggggcugguacugcgacaacgccggcagcgucuccuucuucccgcaggccgagaccugcaaggugcagagcaaccgcguguucugcgacaccaugaacucccugacgcugcccagcgagguaaaccucugcaacgucgacaucuucaaccccaaguacgacugcaagaucaugaccuccaagaccgacgugagcuccagcgugaucaccucccugggggccaucgucagcugcuacggcaagacgaagugcaccgccagcaacaagaaccgggggaucaucaagaccuucuccaacggcugcgacuacgugagcaacaagggcguggacaccguguccgucgggaacacccuguacugcgugaacaagcaggagggccagagccucuacgugaagggggagcccaucaucaacuucuacgacccgcuggucuuccccuccgacgaguucgacgcgagcaucucccaggugaacgagaagaucaaccagagccuggccuucauccgcaaguccgacgagcugcuccacaacgugaacgccggcaagagcacgaccaacaucaugaucaccaccaucaucaucgucaucaucgugauccugcugucccucaucgccguggggcugcugcucuacugcaaggcccggagcacgcccgucacccuguccaaggaccagcugagcggcaucaacaacaucgcguucuccaacugaggacuagugaagggaacacccaaauuuaauucagccuuaagcacaauuaauuaagagugaaacguaauuguacaagcaguuggucacccaccauagggcaugaucaacaccgcaaccuuuccuuuuucccccagugauucugaaaaaccccucuucccuucagcuugcuuagauguuccaaauuuaguaagcuuaaggcggccuacagaagaaaaagaaaaaaaaggccacaaaaguucccucucacuuucaguaaauaaaauaaaagcagcaacagaaauaaagaaauaaaugaaauucaaaaugaaauaaauauuguguugugcagcauuaaaaaaucaauaaaaauuaaaaaugagcaagaucuaaaaaaaaaaaaaaaaaaaaaaaaaaaaaaaaaaaaaaaaaaaaaaaaaaaaaaaaaaaaaaaaugcaucccccccccccccccccccccccccccccccaaaggcucuuuucagagccaccagaauu

SEQ ID NO: 1878 - RNA, 2180 nt, Artificial Sequence
  mRNA product Design f-4 comprising derived and/or modified sequence from HRSV(A2)__F_DSCav1_mut1 (opt1)
gggagagucccgcagucggcguccagcggcucugcuuguucgugugugugucguugcaggccuuauucaagcuuaccauggagcugcucauccugaaggccaacgccaucaccaccauccugacggcggugaccuucugcuucgccagcggccagaacaucaccgaggaguucuaccaguccacgugcagcgccgucuccaagggguaccucggcgcccugcgcaccgggugguacaccagcgugaucaccaucgagcuguccaacaucaaggagaacaagugcaacggcaccgacgccaaggugaagcucaucaagcaggagcuggacaaguacaagaacgcggucacggagcugcagcuccugaugcagagcacccccgccaccggguccggcagcgccaucugcuccggcguggccgugugcaagguccugcaccucgagggggaggugaacaagaucaagagcgcgcugcuguccaccaacaaggccguggucagccucuccaacggcgugagcgugcugacguucaagguccuggaccucaagaacuacaucgacaagcagcugcugccgauccucaacaagcaguccugcagcauccccaacaucgagaccgugaucgaguuccagcagaagaacaaccggcugcuggagaucacccgcgaguucuccgugaacgccggggucaccacgcccgugagcaccuacaugcucaccaacuccgagcugcugagccucaucaacgacaugcccaucaccaacgaccagaagaagcugaugagcaacaacgugcagaucguccggcagcaguccuacagcaucaugugcaucaucaaggaggaggugcuggccuacgugguccagcucccgcuguacggcgugaucgacacgcccugcuggaagcugcacaccagcccccucugcaccaccaacacgaaggagggguccaacaucugccugacccgcaccgaccggggcugguacugcgacaacgccggcuccgugagcuucuucccccaggcggagaccugcaagguccaguccaaccgcguguucugcgacacgaugaacagccugacccucccguccgaggucaaccugugcaacguggacaucuucaaccccaaguacgacugcaagaucaugaccagcaagaccgacguguccagcuccgucaucacgagccugggggccaucguguccugcuacggcaagaccaagugcaccgccagcaacaagaaccgggggaucaucaagaccuucuccaacggcugcgacuacgugagcaacaagggcgucgacacgguguccguggggaacacccucuacugcgucaacaagcaggagggccagagccuguacgugaagggggagcccaucaucaacuucuacgacccccugguguucccgagcgacgaguucgacgccuccaucagccaggucaacgagaagaucaaccagucccucgccuucauccgcaagagcgacgagcugcugcacaacgugaacgcgggcaaguccaccaccaacaucaugaucaccacgaucaucaucgugaucaucgucauccuccugagccugaucgccguggggcuccugcuguacugcaaggcccgguccacccccgugacccugagcaaggaccagcucuccggcaucaacaacaucgccuucagcaacugaggacuagugaagggaacacccaaauuuaauucagccuuaagcacaauuaauuaagagugaaacguaauuguacaagcaguuggucacccaccauagggcaugaucaacaccgcaaccuuuccuuuuucccccagugauucugaaaaaccccucuucccuucagcuugcuuagauguuccaaauuuaguaagcuuaaggcggccuacagaagaaaaagaaaaaaaaggccacaaaaguucccucucacuuucaguaaauaaaauaaaagcagcaacagaaauaaagaaauaaaugaaauucaaaaugaaauaaauauuguguugugcagcauuaaaaaaucaauaaaaauuaaaaaugagcaagaucuaaaaaaaaaaaaaaaaaaaaaaaaaaaaaaaaaaaaaaaaaaaaaaaaaaaaaaaaaaaaaaaaugcaucccccccccccccccccccccccccccccccaaaggcucuuuucagagccaccagaauu

SEQ ID NO: 1879 - RNA, 2180 nt, Artificial Sequence
  mRNA product Design f-4 comprising derived and/or modified sequence from HRSV(A2)__F_DSCav1_mut1 (opt2)
gggagagucccgcagucggcguccagcggcucugcuuguucgugugugugucguugcaggccuuauucaagcuuaccauggagcuccucauccucaaggccaacgccaucaccaccauccucaccgccgucaccuucugcuucgccuccggccagaacaucaccgaggaguucuaccaguccaccugcuccgccgucuccaagggcuaccucggcgcccuccgcaccggcugguacaccuccgucaucaccaucgagcucuccaacaucaaggagaacaagugcaacggcaccgacgccaaggucaagcucaucaagcaggagcucgacaaguacaagaacgccgucaccgagcuccagcuccucaugcaguccacccccgccaccggcuccggcuccgccaucugcuccggcgucgccgucugcaagguccuccaccucgagggcgaggucaacaagaucaaguccgcccuccucuccaccaacaaggccgucgucucccucuccaacggcgucuccguccucaccuucaagguccucgaccucaagaacuacaucgacaagcagcuccuccccauccucaacaagcaguccugcuccauccccaacaucgagaccgucaucgaguuccagcagaagaacaaccgccuccucgagaucacccgcgaguucuccgucaacgccggcgucaccacccccgucuccaccuacaugcucaccaacuccgagcuccucucccucaucaacgacaugcccaucaccaacgaccagaagaagcucauguccaacaacguccagaucguccgccagcaguccuacuccaucaugugcaucaucaaggaggagguccucgccuacgucguccagcucccccucuacggcgucaucgacacccccugcuggaagcuccacaccuccccccucugcaccaccaacaccaaggagggcuccaacaucugccucacccgcaccgaccgcggcugguacugcgacaacgccggcuccgucuccuucuucccccaggccgagaccugcaagguccaguccaaccgcgucuucugcgacaccaugaacucccucacccuccccuccgaggucaaccucugcaacgucgacaucuucaaccccaaguacgacugcaagaucaugaccuccaagaccgacgucuccuccuccgucaucaccucccucggcgccaucgucuccugcuacggcaagaccaagugcaccgccuccaacaagaaccgcggcaucaucaagaccuucuccaacggcugcgacuacgucuccaacaagggcgucgacaccgucuccgucggcaacacccucuacugcgucaacaagcaggagggccagucccucuacgucaagggcgagcccaucaucaacuucuacgacccccucgucuuccccuccgacgaguucgacgccuccaucucccaggucaacgagaagaucaaccagucccucgccuucauccgcaaguccgacgagcuccuccacaacgucaacgccggcaaguccaccaccaacaucaugaucaccaccaucaucaucgucaucaucgucauccuccucucccucaucgccgucggccuccuccucuacugcaaggcccgcuccacccccgucacccucuccaaggaccagcucuccggcaucaacaacaucgccuucuccaacugaggacuagugaagggaacacccaaauuuaauucagccuuaagcacaauuaauuaagagugaaacguaauuguacaagcaguuggucacccaccauagggcaugaucaacaccgcaaccuuuccuuuuucccccagugauucugaaaaaccccucuucccuucagcuugcuuagauguuccaaauuuaguaagcuuaaggcggccuacagaagaaaaagaaaaaaaaggccacaaaaguucccucucacuuucaguaaauaaaauaaaagcagcaacagaaauaaagaaauaaaugaaauucaaaaugaaauaaauauuguguugugcagcauuaaaaaaucaauaaaaauuaaaaaugagcaagaucuaaaaaaaaaaaaaaaaaaaaaaaaaaaaaaaaaaaaaaaaaaaaaaaaaaaaaaaaaaaaaaaaugcaucccccccccccccccccccccccccccccccaaaggcucuuuucagagccaccagaauu

SEQ ID NO: 1880 - RNA, 2180 nt, Artificial Sequence
  mRNA product Design f-4 comprising derived and/or modified sequence from HRSV(A2)__F_DSCav1_mut1 (opt3)
gggagagucccgcagucggcguccagcggcucugcuuguucgugugugugucguugcaggccuuauucaagcuuaccauggagcugcucauccuuaaggccaacgcuauuaccacaauacugacugcagugacguucugcuuugccagcggccagaauaucaccgaagaguucuaccaauccacauguucugcggucucaaaaggguauuugggagcuuuaagaacugguugguacaccaguguuauuacaaucgaacugagcaacauuaaggagaauaaaugcaacggcaccgacgccaaggugaaacuaaucaagcaggaacucgauaaguauaaaaaugcaguaacugagcugcagcuucugaugcaguccacacccgccaccgggucuggaucggcuauauguucaggcguggcagucugcaagguguugcaccucgagggugaaguuaacaaaaucaagagcgcccugcugaguacgaauaaagcuguggucucccucucuaacggggugagcguauuaacuuuuaagguucuggaccuuaagaauuacauugauaaacaauugcugccuauccuaaacaagcaguccuguucaauuccaaauaucgagaccgugauagaguuccagcagaaaaacaauaggcuccuggaaauuacacgggaguuuagugucaacgccggagugacuaccccggugagcacauauaugcuuaccaauucugaacuguugucccucaucaacgacaugcccauuacgaacgaucaaaagaaacugaugucaaauaacguccagaucguucgccagcagagcuacaguaucaugugcauuauaaaggaggaaguguuagcguauguagugcaacugccucucuacggcgucaucgacacuccauguuggaaacuucauacaucuccccugugcaccacuaauacaaaggagggcuccaacauuuguuugacccgaacggaucgugggugguacugcgacaaugcaggaagcgugucguucuuuccucaggccgaaaccuguaagguucagucuaacagaguguucugcgauacaaugaacucccuaacucugccaucagaggucaaucucugcaauguggacaucuuuaaccccaaauaugauuguaagauaaugaccaguaaaacagacguaagcuccucuguuauuacuagccugggugcuaucgugucaugcuacggcaagaccaaauguacagccaguaauaagaacagggggaucauuaagaccuucuccaauggaugcgauuaugucagcaacaaaggcguggacacugucucuguggguaauacgcuuuacuguguuaacaagcaagaggggcagucacuguaugugaaaggagaaccuaucauuaacuuuuacgacccauugguauucccgagugaugaguuugacgcaagcauaucccaggucaaugaaaagaucaaccagucucucgcuuucauucggaaaucggaugagcuguuacacaaugugaacgccggcaagagcacaaccaauaucaugaucacuaccauuauaaucguuauuaucgugauucugcuaucccucaucgcggucggccugcuuuuguauugcaaggcccgcucaacacccgugacccugaguaaagaccaacucucugggauaaacaauaucgcauucagcaacugaggacuagugaagggaacacccaaauuuaauucagccuuaagcacaauuaauuaagagugaaacguaauuguacaagcaguuggucacccaccauagggcaugaucaacaccgcaaccuuuccuuuuucccccagugauucugaaaaaccccucuucccuucagcuugcuuagauguuccaaauuuaguaagcuuaaggcggccuacagaagaaaaagaaaaaaaaggccacaaaaguucccucucacuuucaguaaauaaaauaaaagcagcaacagaaauaaagaaauaaaugaaauucaaaaugaaauaaauauuguguugugcagcauuaaaaaaucaauaaaaauuaaaaaugagcaagaucuaaaaaaaaaaaaaaaaaaaaaaaaaaaaaaaaaaaaaaaaaaaaaaaaaaaaaaaaaaaaaaaaugcaucccccccccccccccccccccccccccccccaaaggcucuuuucagagccaccagaauu

SEQ ID NO: 1881 - RNA, 2180 nt, Artificial Sequence
  mRNA product Design f-4 comprising derived and/or modified sequence from HRSV(A2)__F_DSCav1_mut1 (opt4)
gggagagucccgcagucggcguccagcggcucugcuuguucgugugugugucguugcaggccuuauucaagcuuaccauggagcugcugauccugaaggccaacgccaucaccaccauccugaccgccgugaccuucugcuucgccagcggccagaacaucaccgaggaguucuaccagagcaccugcagcgccgugagcaagggcuaccugggcgcccugagaaccggcugguacaccagcgugaucaccaucgagcugagcaacaucaaggagaacaagugcaacggcaccgacgccaaggugaagcugaucaagcaggagcuggacaaguacaagaacgccgugaccgagcugcagcugcugaugcagagcacccccgccaccggcagcggcagcgccaucugcagcggcguggccgugugcaaggugcugcaccuggagggcgaggugaacaagaucaagagcgcccugcugagcaccaacaaggccguggugagccugagcaacggcgugagcgugcugaccuucaaggugcuggaccugaagaacuacaucgacaagcagcugcugcccauccugaacaagcagagcugcagcauccccaacaucgagaccgugaucgaguuccagcagaagaacaacagacugcuggagaucaccagagaguucagcgugaacgccggcgugaccacccccgugagcaccuacaugcugaccaacagcgagcugcugagccugaucaacgacaugcccaucaccaacgaccagaagaagcugaugagcaacaacgugcagaucgugagacagcagagcuacagcaucaugugcaucaucaaggaggaggugcuggccuacguggugcagcugccccuguacggcgugaucgacacccccugcuggaagcugcacaccagcccccugugcaccaccaacaccaaggagggcagcaacaucugccugaccagaaccgacagaggcugguacugcgacaacgccggcagcgugagcuucuucccccaggccgagaccugcaaggugcagagcaacagaguguucugcgacaccaugaacagccugacccugcccagcgaggugaaccugugcaacguggacaucuucaaccccaaguacgacugcaagaucaugaccagcaagaccgacgugagcagcagcgugaucaccagccugggcgccaucgugagcugcuacggcaagaccaagugcaccgccagcaacaagaacagaggcaucaucaagaccuucagcaacggcugcgacuacgugagcaacaagggcguggacaccgugagcgugggcaacacccuguacugcgugaacaagcaggagggccagagccuguacgugaagggcgagcccaucaucaacuucuacgacccccugguguuccccagcgacgaguucgacgccagcaucagccaggugaacgagaagaucaaccagagccuggccuucaucagaaagagcgacgagcugcugcacaacgugaacgccggcaagagcaccaccaacaucaugaucaccaccaucaucaucgugaucaucgugauccugcugagccugaucgccgugggccugcugcuguacugcaaggccagaagcacccccgugacccugagcaaggaccagcugagcggcaucaacaacaucgccuucagcaacugaggacuagugaagggaacacccaaauuuaauucagccuuaagcacaauuaauuaagagugaaacguaauuguacaagcaguuggucacccaccauagggcaugaucaacaccgcaaccuuuccuuuuucccccagugauucugaaaaaccccucuucccuucagcuugcuuagauguuccaaauuuaguaagcuuaaggcggccuacagaagaaaaagaaaaaaaaggccacaaaaguucccucucacuuucaguaaauaaaauaaaagcagcaacagaaauaaagaaauaaaugaaauucaaaaugaaauaaauauuguguugugcagcauuaaaaaaucaauaaaaauuaaaaaugagcaagaucuaaaaaaaaaaaaaaaaaaaaaaaaaaaaaaaaaaaaaaaaaaaaaaaaaaaaaaaaaaaaaaaaugcaucccccccccccccccccccccccccccccccaaaggcucuuuucagagccaccagaauu

SEQ ID NO: 1882 - RNA, 2180 nt, Artificial Sequence
  mRNA product Design f-4 comprising derived and/or modified sequence from HRSV(A2)__F_DSCav1_mut1 (opt5)
gggagagucccgcagucggcguccagcggcucugcuuguucgugugugugucguugcaggccuuauucaagcuuaccauggagcugcucauccugaaggccaacgcuauuaccacaauccuuacggccgugaccuucugcuuugcgagcggccagaauauuacagaagaguucuaccaauccaccuguucugcugucagcaaaggguaucugggagcccucagaacaggcugguacaccuccguuaucacaauugaacugucuaacaucaaggagaauaaaugcaacgggaccgacgccaaggugaaacuuaucaagcaggaacuggauaaguauaaaaaugcugugacggagcuccagcugcugaugcagagcacccccgccacaggauccggcucugcuauuuguagcggggucgccgugugcaagguucuccaccuggagggagaagugaacaaaaucaaguccgcgcuucugagcaccaauaaagccgucgugucucucuccaacggcguuagcgugcugacauuuaagguccuugaccugaagaauuacauugauaaacaacuccugccuauccugaacaagcagucuuguuccauuccgaauaucgagaccgugauugaguuccagcagaaaaacaaucggcuccuggaaaucacgcgcgaguuuagcgugaacgcuggcgucacaacccccguuucuacauauaugcuuaccaauuccgaacugcucagccugaucaacgacaugccuauuaccaacgaucaaaagaaacuuauguccaauaacgugcagaucgugagacagcagucuuacagcauuaugugcaucauuaaggaggaaguccuggccuaugugguucaacucccccuguacggggugaucgacacaccuuguuggaaacugcauacgagcccccucugcaccacaaauaccaaggagggauccaacaucugucugacacggaccgaucgcggcugguacugcgacaaugcugggucugucuccuucuuuccucaggccgaaacguguaaggugcagagcaacagaguuuucugcgauacaaugaacucucuuacccugccgagcgaggugaaucucugcaaugucgacauuuuuaaccccaaauaugauuguaagaucaugaccuccaaaacagacgugucuagcuccgucauuaccagccugggagcgaucgugucuugcuacggcaagacaaaauguacggccuccaauaagaaccgggggauuaucaagaccuucagcaauggaugcgauuauguuucuaacaaaggcguggacacagucuccgugggcaauacccuuuacuguguuaacaagcaagaggggcagagccuguaugugaaaggagaaccuaucauuaacuuuuacgacccccucgucuucccuuccgaugaguuugacgcuucuaucagccaggugaaugaaaagauuaaccagucccuggccuucauccgcaaaucugaugagcugcuccacaaugugaacgcuggcaagagcacaaccaauauuaugaucacgaccauuaucaucguuauuaucgucauucugcuuucccugaucgccguggggcuccugcuguauugcaaggccagaagcacacccgugacccuuucuaaagaccaacucuccggaauuaacaauaucgcuuucagcaacugaggacuagugaagggaacacccaaauuuaauucagccuuaagcacaauuaauuaagagugaaacguaauuguacaagcaguuggucacccaccauagggcaugaucaacaccgcaaccuuuccuuuuucccccagugauucugaaaaaccccucuucccuucagcuugcuuagauguuccaaauuuaguaagcuuaaggcggccuacagaagaaaaagaaaaaaaaggccacaaaaguucccucucacuuucaguaaauaaaauaaaagcagcaacagaaauaaagaaauaaaugaaauucaaaaugaaauaaauauuguguugugcagcauuaaaaaaucaauaaaaauuaaaaaugagcaagaucuaaaaaaaaaaaaaaaaaaaaaaaaaaaaaaaaaaaaaaaaaaaaaaaaaaaaaaaaaaaaaaaaugcaucccccccccccccccccccccccccccccccaaaggcucuuuucagagccaccagaauu

SEQ ID NO: 1883 - RNA, 2180 nt, Artificial Sequence
  mRNA product Design f-4 comprising derived and/or modified sequence from HRSV(A2)__F_DSCav1_mut1 (opt6)
gggagagucccgcagucggcguccagcggcucugcuuguucgugugugugucguugcaggccuuauucaagcuuaccauggaacuauuaauacuaaaagcaaacgcuauaacaacaauacuaacagcagucacauucugcuuugcaucaggccaaaacaucacagaagaauuuuaccaaucaacaugcuccgccguaucgaaaggauaccuaggcgcauuaagaaccggaugguauacaucagucauaacaauugaacuaucuaacauaaaagaaaacaaauguaacggcacagaugccaaaguaaaacucaucaaacaagaauuagauaaauacaaaaacgcagucacugaacuacaacucuuaaugcaaucaacaccugcaacaggaucaggaucagcaauaugcucaggaguagccguauguaaaguacuacaccuagaaggagaagucaacaaaauaaaaucagcccuccuaaguacaaacaaagcugucguaucacuauccaaugguguuucaguacuaacuuucaaaguucuagaccuaaaaaacuacauagacaaacaacuacuaccaauacuaaauaaacaaaguuguucuauacccaacauagaaaccgucauagaauuucaacaaaaaaauaauagacuccuagaaauaacaagagaauuuucaguuaacgcagguguaacaaccccaguauccaccuauaugcuaacaaauucagaauuacuuucccuaaucaacgacaugcccauaacaaaugaccaaaaaaaauuaaugucaaacaacguccaaauaguucgucaacaaucauauucaauaaugugcauaauaaaagaagaagucuuagccuacguaguacaacuuccccuuuauggaguuaucgacacacccugcuggaaacuccacacuucaccacuauguacuacaaacacaaaagaaggauccaacaucugccucacaagaaccgaucgaggaugguacugugauaacgccggauccgucucauucuucccacaagcagaaacaugcaaaguacaaucaaacagaguauuuugcgacacaaugaacucccucacauuaccuucugaaguaaaccuauguaauguagacauauucaaccccaaauacgauugcaaaauaaugacaucaaagacagauguaucaucaagugucaucacaucccuaggagcaauugucucauguuaugguaaaacaaaaugcaccgcaucaaauaaaaacagaggcauaauaaaaaccuucucaaacgguugugacuacguauccaauaaaggcgucgacacaguaucaguagguaacacauuauauuguguaaacaaacaagaaggacagucccuauauguaaaaggagaaccaauaaucaacuucuacgacccacuuguuuucccuucugaugaauuugacgcaaguauaucacaaguaaaugaaaaaaucaaucaaucacuagccuuuauaagaaaaucagaugaauuauuacacaacguaaacgccggaaaaucaacaaccaacauaaugauaaccacaauaauaaucgucauaauagucauccuacuaucacucauagcaguuggacuccuacuauacugcaaagcacgaucaacaccaguaacauuauccaaagaccaacuaagugguaucaauaacaucgccuuuucaaacugaggacuagugaagggaacacccaaauuuaauucagccuuaagcacaauuaauuaagagugaaacguaauuguacaagcaguuggucacccaccauagggcaugaucaacaccgcaaccuuuccuuuuucccccagugauucugaaaaaccccucuucccuucagcuugcuuagauguuccaaauuuaguaagcuuaaggcggccuacagaagaaaaagaaaaaaaaggccacaaaaguucccucucacuuucaguaaauaaaauaaaagcagcaacagaaauaaagaaauaaaugaaauucaaaaugaaauaaauauuguguugugcagcauuaaaaaaucaauaaaaauuaaaaaugagcaagaucuaaaaaaaaaaaaaaaaaaaaaaaaaaaaaaaaaaaaaaaaaaaaaaaaaaaaaaaaaaaaaaaaugcaucccccccccccccccccccccccccccccccaaaggcucuuuucagagccaccagaauu

SEQ ID NO: 1884 - RNA, 2180 nt, Artificial Sequence
  mRNA product Design f-4 comprising derived and/or modified sequence from HRSV(A2)__F_DSCav1_mut1 (opt11)
gggagagucccgcagucggcguccagcggcucugcuuguucgugugugugucguugcaggccuuauucaagcuuaccauggaacuccuaauccucaaagccaacgcaaucaccacaauccucacugccgucaccuucugcuucgccuccggccaaaacauaacagaagaauuuuaccaaucaaccuguucagcggucuccaaaggcuaccucggcgcccuccgcaccggcugguacaccuccgugaucaccauagaacucuccaacaucaaggaaaacaaaugcaacggcaccgacgcgaaggucaaacuuauuaaacaagaacucgacaaauacaaaaacgcagucaccgaacuacaacuccuaaugcaguccacgccagccaccggcucuggcucagccauaugcuccgguguggccguaugcaaaguccuacaccucgaaggagaagucaacaaaauaaaauccgcccuacuguccacaaacaaggccguagucucccucucaaacggcgucucaguacucaccuucaaaguccuagaccucaagaacuacaucgacaaacaacuccuacccauacuaaacaaacaauccugcucaauccccaacaucgaaaccguaauagaauuucaacaaaaaaacaacagacuccuggagaucacccgggaauuuuccguaaacgccggagucacaacacccgucucaaccuacaugcuaacgaacucagagcuccucucacuuaucaacgacaugcccauaacaaacgaccaaaaaaaacucauguccaacaacgugcaaaucguccgacaacaauccuacuccaucaugugcaucauuaaagaagaaguccucgcauacguaguccagcucccccucuacggcgucauagacacccccugcuggaaacuacacacaucaccccucugcacaacaaacaccaaagaaggcuccaacaucugccucacccgcaccgaccgaggcugguacugcgauaacgccggcagcgucuccuucuucccccaagcagaaaccugcaagguccaauccaaccgaguuuucugcgacacuaugaacucgcucacccuccccuccgaagucaaccucugcaacgucgacauuuucaaccccaaauacgacugcaaaaucaugaccuccaagaccgacguauccuccuccgucaucaccucccuaggcgccauaguaaguugcuacggcaaaaccaagugcacagcaagcaacaaaaaccgaggaauaaucaaaaccuucuccaacggcugcgacuacguauccaacaagggcgucgacaccguauccguagggaacacccuuuacugcguaaacaaacaagaaggacaaucacucuacguaaaaggcgaacccauaaucaacuucuacgacccccucguauuucccuccgacgaauuugacgcaucaaucucacaggucaacgaaaaaauaaaccaaucgcuagcauucaucagaaaaucagacgaacuccuacacaacgucaacgcaggcaagagcaccaccaacaucaugaucaccaccaucaucaucgucauaaucgucauacuacucucacucauagcagucggccuccuccuauacuguaaagcaaggucgaccccagucacccuauccaaagaccaacuaagcggcaucaacaacaucgcguucucaaacuaaggacuagugaagggaacacccaaauuuaauucagccuuaagcacaauuaauuaagagugaaacguaauuguacaagcaguuggucacccaccauagggcaugaucaacaccgcaaccuuuccuuuuucccccagugauucugaaaaaccccucuucccuucagcuugcuuagauguuccaaauuuaguaagcuuaaggcggccuacagaagaaaaagaaaaaaaaggccacaaaaguucccucucacuuucaguaaauaaaauaaaagcagcaacagaaauaaagaaauaaaugaaauucaaaaugaaauaaauauuguguugugcagcauuaaaaaaucaauaaaaauuaaaaaugagcaagaucuaaaaaaaaaaaaaaaaaaaaaaaaaaaaaaaaaaaaaaaaaaaaaaaaaaaaaaaaaaaaaaaaugcaucccccccccccccccccccccccccccccccaaaggcucuuuucagagccaccagaauu

SEQ ID NO: 1885 - RNA, 1956 nt, Artificial Sequence
  mRNA product Design f-5 comprising derived and/or modified sequence from HRSV(A2)__F_DSCav1_mut1 (opt1)
gggagacuuucccauucuguagcagaauuugguguugccuguggucuuggucccgcggagaagcuuaccauggagcugcucauccugaaggccaacgccaucaccaccauccugacggcggugaccuucugcuucgccagcggccagaacaucaccgaggaguucuaccaguccacgugcagcgccgucuccaagggguaccucggcgcccugcggaccggcugguacaccuccgugaucaccaucgagcugagcaacaucaaggagaacaagugcaacgggaccgacgccaaggugaagcucaucaagcaggagcuggacaaguacaagaacgcggucacggagcugcagcuccugaugcaguccaccccggcaaccggcuccggcuccgccaucugcagcggcgucgccgugugcaaggugcugcaccucgagggggaggucaacaagaucaagagcgcccugcuguccaccaacaaggccguggugagccucuccaacggcgucagcgugcugaccuucaaggugcuggaccucaagaacuacaucgacaagcagcugcugcccauccugaacaagcagagcugcuccauccccaacaucgagacggugaucgaguuccagcagaagaacaaccggcuccuggagaucacccgcgaguucagcgugaacgccggggucaccacccccguguccacguacaugcugaccaacagcgagcuccugucccugaucaacgacaugccgaucaccaacgaccagaagaagcucaugagcaacaacgugcagaucguccggcagcaguccuacagcaucaugugcaucaucaaggaggaggugcuggcguacgugguccagcugccccucuacggcgugaucgacacccccugcuggaagcugcacacgagcccccugugcaccaccaacaccaaggagggguccaacaucugccucacgcgcaccgaccggggcugguacugcgacaacgccggcagcgucuccuucuucccgcaggccgagaccugcaaggugcagagcaaccgcguguucugcgacaccaugaacucccugacgcugcccagcgagguaaaccucugcaacgucgacaucuucaaccccaaguacgacugcaagaucaugaccuccaagaccgacgugagcuccagcgugaucaccucccugggggccaucgucagcugcuacggcaagacgaagugcaccgccagcaacaagaaccgggggaucaucaagaccuucuccaacggcugcgacuacgugagcaacaagggcguggacaccguguccgucgggaacacccuguacugcgugaacaagcaggagggccagagccucuacgugaagggggagcccaucaucaacuucuacgacccgcuggucuuccccuccgacgaguucgacgcgagcaucucccaggugaacgagaagaucaaccagagccuggccuucauccgcaaguccgacgagcugcuccacaacgugaacgccggcaagagcacgaccaacaucaugaucaccaccaucaucaucgucaucaucgugauccugcugucccucaucgccguggggcugcugcucuacugcaaggcccggagcacgcccgucacccuguccaaggaccagcugagcggcaucaacaacaucgcguucuccaacugaggacuaguacuggcugcaucucccuuuccucuguccuccauccuucucccaggauggugaagggggaccugguacccagugauccccaccccaggauccuaaaucaugacuuaccugcuaauaaaaacucauuggaaaagugagaagaucuaaaaaaaaaaaaaaaaaaaaaaaaaaaaaaaaaaaaaaaaaaaaaaaaaaaaaaaaaaaaaaaaugcaucccccccccccccccccccccccccccccccaaaggcucuuuucagagccaccagaauu

SEQ ID NO: 1886 - RNA, 1956 nt, Artificial Sequence
  mRNA product Design f-5 comprising derived and/or modified sequence from HRSV(A2)__F_DSCav1_mut1 (opt1)
gggagacuuucccauucuguagcagaauuugguguugccuguggucuuggucccgcggagaagcuuaccauggagcugcucauccugaaggccaacgccaucaccaccauccugacggcggugaccuucugcuucgccagcggccagaacaucaccgaggaguucuaccaguccacgugcagcgccgucuccaagggguaccucggcgcccugcgcaccgggugguacaccagcgugaucaccaucgagcuguccaacaucaaggagaacaagugcaacggcaccgacgccaaggugaagcucaucaagcaggagcuggacaaguacaagaacgcggucacggagcugcagcuccugaugcagagcacccccgccaccggguccggcagcgccaucugcuccggcguggccgugugcaagguccugcaccucgagggggaggugaacaagaucaagagcgcgcugcuguccaccaacaaggccguggucagccucuccaacggcgugagcgugcugacguucaagguccuggaccucaagaacuacaucgacaagcagcugcugccgauccucaacaagcaguccugcagcauccccaacaucgagaccgugaucgaguuccagcagaagaacaaccggcugcuggagaucacccgcgaguucuccgugaacgccggggucaccacgcccgugagcaccuacaugcucaccaacuccgagcugcugagccucaucaacgacaugcccaucaccaacgaccagaagaagcugaugagcaacaacgugcagaucguccggcagcaguccuacagcaucaugugcaucaucaaggaggaggugcuggccuacgugguccagcucccgcuguacggcgugaucgacacgcccugcuggaagcugcacaccagcccccucugcaccaccaacacgaaggagggguccaacaucugccugacccgcaccgaccggggcugguacugcgacaacgccggcuccgugagcuucuucccccaggcggagaccugcaagguccaguccaaccgcguguucugcgacacgaugaacagccugacccucccguccgaggucaaccugugcaacguggacaucuucaaccccaaguacgacugcaagaucaugaccagcaagaccgacguguccagcuccgucaucacgagccugggggccaucguguccugcuacggcaagaccaagugcaccgccagcaacaagaaccgggggaucaucaagaccuucuccaacggcugcgacuacgugagcaacaagggcgucgacacgguguccguggggaacacccucuacugcgucaacaagcaggagggccagagccuguacgugaagggggagcccaucaucaacuucuacgacccccugguguucccgagcgacgaguucgacgccuccaucagccaggucaacgagaagaucaaccagucccucgccuucauccgcaagagcgacgagcugcugcacaacgugaacgcgggcaaguccaccaccaacaucaugaucaccacgaucaucaucgugaucaucgucauccuccugagccugaucgccguggggcuccugcuguacugcaaggcccgguccacccccgugacccugagcaaggaccagcucuccggcaucaacaacaucgccuucagcaacugaggacuaguacuggcugcaucucccuuuccucuguccuccauccuucucccaggauggugaagggggaccugguacccagugauccccaccccaggauccuaaaucaugacuuaccugcuaauaaaaacucauuggaaaagugagaagaucuaaaaaaaaaaaaaaaaaaaaaaaaaaaaaaaaaaaaaaaaaaaaaaaaaaaaaaaaaaaaaaaaugcaucccccccccccccccccccccccccccccccaaaggcucuuuucagagccaccagaauu

SEQ ID NO: 1887 - RNA, 1956 nt, Artificial Sequence
  mRNA product Design f-5 comprising derived and/or modified sequence from HRSV(A2)__F_DSCav1_mut1 (opt2)
gggagacuuucccauucuguagcagaauuugguguugccuguggucuuggucccgcggagaagcuuaccauggagcuccucauccucaaggccaacgccaucaccaccauccucaccgccgucaccuucugcuucgccuccggccagaacaucaccgaggaguucuaccaguccaccugcuccgccgucuccaagggcuaccucggcgcccuccgcaccggcugguacaccuccgucaucaccaucgagcucuccaacaucaaggagaacaagugcaacggcaccgacgccaaggucaagcucaucaagcaggagcucgacaaguacaagaacgccgucaccgagcuccagcuccucaugcaguccacccccgccaccggcuccggcuccgccaucugcuccggcgucgccgucugcaagguccuccaccucgagggcgaggucaacaagaucaaguccgcccuccucuccaccaacaaggccgucgucucccucuccaacggcgucuccguccucaccuucaagguccucgaccucaagaacuacaucgacaagcagcuccuccccauccucaacaagcaguccugcuccauccccaacaucgagaccgucaucgaguuccagcagaagaacaaccgccuccucgagaucacccgcgaguucuccgucaacgccggcgucaccacccccgucuccaccuacaugcucaccaacuccgagcuccucucccucaucaacgacaugcccaucaccaacgaccagaagaagcucauguccaacaacguccagaucguccgccagcaguccuacuccaucaugugcaucaucaaggaggagguccucgccuacgucguccagcucccccucuacggcgucaucgacacccccugcuggaagcuccacaccuccccccucugcaccaccaacaccaaggagggcuccaacaucugccucacccgcaccgaccgcggcugguacugcgacaacgccggcuccgucuccuucuucccccaggccgagaccugcaagguccaguccaaccgcgucuucugcgacaccaugaacucccucacccuccccuccgaggucaaccucugcaacgucgacaucuucaaccccaaguacgacugcaagaucaugaccuccaagaccgacgucuccuccuccgucaucaccucccucggcgccaucgucuccugcuacggcaagaccaagugcaccgccuccaacaagaaccgcggcaucaucaagaccuucuccaacggcugcgacuacgucuccaacaagggcgucgacaccgucuccgucggcaacacccucuacugcgucaacaagcaggagggccagucccucuacgucaagggcgagcccaucaucaacuucuacgacccccucgucuuccccuccgacgaguucgacgccuccaucucccaggucaacgagaagaucaaccagucccucgccuucauccgcaaguccgacgagcuccuccacaacgucaacgccggcaaguccaccaccaacaucaugaucaccaccaucaucaucgucaucaucgucauccuccucucccucaucgccgucggccuccuccucuacugcaaggcccgcuccacccccgucacccucuccaaggaccagcucuccggcaucaacaacaucgccuucuccaacugaggacuaguacuggcugcaucucccuuuccucuguccuccauccuucucccaggauggugaagggggaccugguacccagugauccccaccccaggauccuaaaucaugacuuaccugcuaauaaaaacucauuggaaaagugagaagaucuaaaaaaaaaaaaaaaaaaaaaaaaaaaaaaaaaaaaaaaaaaaaaaaaaaaaaaaaaaaaaaaaugcaucccccccccccccccccccccccccccccccaaaggcucuuuucagagccaccagaauu

SEQ ID NO: 1888 - RNA, 1956 nt, Artificial Sequence
  mRNA product Design f-5 comprising derived and/or modified sequence from HRSV(A2)__F_DSCav1_mut1 (opt3)
gggagacuuucccauucuguagcagaauuugguguugccuguggucuuggucccgcggagaagcuuaccauggagcugcucauccuuaaggccaacgcuauuaccacaauacugacugcagugacguucugcuuugccagcggccagaauaucaccgaagaguucuaccaauccacauguucugcggucucaaaaggguauuugggagcuuuaagaacugguugguacaccaguguuauuacaaucgaacugagcaacauuaaggagaauaaaugcaacggcaccgacgccaaggugaaacuaaucaagcaggaacucgauaaguauaaaaaugcaguaacugagcugcagcuucugaugcaguccacacccgccaccgggucuggaucggcuauauguucaggcguggcagucugcaagguguugcaccucgagggugaaguuaacaaaaucaagagcgcccugcugaguacgaauaaagcuguggucucccucucuaacggggugagcguauuaacuuuuaagguucuggaccuuaagaauuacauugauaaacaauugcugccuauccuaaacaagcaguccuguucaauuccaaauaucgagaccgugauagaguuccagcagaaaaacaauaggcuccuggaaauuacacgggaguuuagugucaacgccggagugacuaccccggugagcacauauaugcuuaccaauucugaacuguugucccucaucaacgacaugcccauuacgaacgaucaaaagaaacugaugucaaauaacguccagaucguucgccagcagagcuacaguaucaugugcauuauaaaggaggaaguguuagcguauguagugcaacugccucucuacggcgucaucgacacuccauguuggaaacuucauacaucuccccugugcaccacuaauacaaaggagggcuccaacauuuguuugacccgaacggaucgugggugguacugcgacaaugcaggaagcgugucguucuuuccucaggccgaaaccuguaagguucagucuaacagaguguucugcgauacaaugaacucccuaacucugccaucagaggucaaucucugcaauguggacaucuuuaaccccaaauaugauuguaagauaaugaccaguaaaacagacguaagcuccucuguuauuacuagccugggugcuaucgugucaugcuacggcaagaccaaauguacagccaguaauaagaacagggggaucauuaagaccuucuccaauggaugcgauuaugucagcaacaaaggcguggacacugucucuguggguaauacgcuuuacuguguuaacaagcaagaggggcagucacuguaugugaaaggagaaccuaucauuaacuuuuacgacccauugguauucccgagugaugaguuugacgcaagcauaucccaggucaaugaaaagaucaaccagucucucgcuuucauucggaaaucggaugagcuguuacacaaugugaacgccggcaagagcacaaccaauaucaugaucacuaccauuauaaucguuauuaucgugauucugcuaucccucaucgcggucggccugcuuuuguauugcaaggcccgcucaacacccgugacccugaguaaagaccaacucucugggauaaacaauaucgcauucagcaacugaggacuaguacuggcugcaucucccuuuccucuguccuccauccuucucccaggauggugaagggggaccugguacccagugauccccaccccaggauccuaaaucaugacuuaccugcuaauaaaaacucauuggaaaagugagaagaucuaaaaaaaaaaaaaaaaaaaaaaaaaaaaaaaaaaaaaaaaaaaaaaaaaaaaaaaaaaaaaaaaugcaucccccccccccccccccccccccccccccccaaaggcucuuuucagagccaccagaauu

SEQ ID NO: 1889 - RNA, 1956 nt, Artificial Sequence
  mRNA product Design f-5 comprising derived and/or modified sequence from HRSV(A2)__F_DSCav1_mut1 (opt4)
gggagacuuucccauucuguagcagaauuugguguugccuguggucuuggucccgcggagaagcuuaccauggagcugcugauccugaaggccaacgccaucaccaccauccugaccgccgugaccuucugcuucgccagcggccagaacaucaccgaggaguucuaccagagcaccugcagcgccgugagcaagggcuaccugggcgcccugagaaccggcugguacaccagcgugaucaccaucgagcugagcaacaucaaggagaacaagugcaacggcaccgacgccaaggugaagcugaucaagcaggagcuggacaaguacaagaacgccgugaccgagcugcagcugcugaugcagagcacccccgccaccggcagcggcagcgccaucugcagcggcguggccgugugcaaggugcugcaccuggagggcgaggugaacaagaucaagagcgcccugcugagcaccaacaaggccguggugagccugagcaacggcgugagcgugcugaccuucaaggugcuggaccugaagaacuacaucgacaagcagcugcugcccauccugaacaagcagagcugcagcauccccaacaucgagaccgugaucgaguuccagcagaagaacaacagacugcuggagaucaccagagaguucagcgugaacgccggcgugaccacccccgugagcaccuacaugcugaccaacagcgagcugcugagccugaucaacgacaugcccaucaccaacgaccagaagaagcugaugagcaacaacgugcagaucgugagacagcagagcuacagcaucaugugcaucaucaaggaggaggugcuggccuacguggugcagcugccccuguacggcgugaucgacacccccugcuggaagcugcacaccagcccccugugcaccaccaacaccaaggagggcagcaacaucugccugaccagaaccgacagaggcugguacugcgacaacgccggcagcgugagcuucuucccccaggccgagaccugcaaggugcagagcaacagaguguucugcgacaccaugaacagccugacccugcccagcgaggugaaccugugcaacguggacaucuucaaccccaaguacgacugcaagaucaugaccagcaagaccgacgugagcagcagcgugaucaccagccugggcgccaucgugagcugcuacggcaagaccaagugcaccgccagcaacaagaacagaggcaucaucaagaccuucagcaacggcugcgacuacgugagcaacaagggcguggacaccgugagcgugggcaacacccuguacugcgugaacaagcaggagggccagagccuguacgugaagggcgagcccaucaucaacuucuacgacccccugguguuccccagcgacgaguucgacgccagcaucagccaggugaacgagaagaucaaccagagccuggccuucaucagaaagagcgacgagcugcugcacaacgugaacgccggcaagagcaccaccaacaucaugaucaccaccaucaucaucgugaucaucgugauccugcugagccugaucgccgugggccugcugcuguacugcaaggccagaagcacccccgugacccugagcaaggaccagcugagcggcaucaacaacaucgccuucagcaacugaggacuaguacuggcugcaucucccuuuccucuguccuccauccuucucccaggauggugaagggggaccugguacccagugauccccaccccaggauccuaaaucaugacuuaccugcuaauaaaaacucauuggaaaagugagaagaucuaaaaaaaaaaaaaaaaaaaaaaaaaaaaaaaaaaaaaaaaaaaaaaaaaaaaaaaaaaaaaaaaugcaucccccccccccccccccccccccccccccccaaaggcucuuuucagagccaccagaauu

SEQ ID NO: 1890 - RNA, 1956 nt, Artificial Sequence
  mRNA product Design f-5 comprising derived and/or modified sequence from HRSV(A2)__F_DSCav1_mut1 (opt5)
gggagacuuucccauucuguagcagaauuugguguugccuguggucuuggucccgcggagaagcuuaccauggagcugcucauccugaaggccaacgcuauuaccacaauccuuacggccgugaccuucugcuuugcgagcggccagaauauuacagaagaguucuaccaauccaccuguucugcugucagcaaaggguaucugggagcccucagaacaggcugguacaccuccguuaucacaauugaacugucuaacaucaaggagaauaaaugcaacgggaccgacgccaaggugaaacuuaucaagcaggaacuggauaaguauaaaaaugcugugacggagcuccagcugcugaugcagagcacccccgccacaggauccggcucugcuauuuguagcggggucgccgugugcaagguucuccaccuggagggagaagugaacaaaaucaaguccgcgcuucugagcaccaauaaagccgucgugucucucuccaacggcguuagcgugcugacauuuaagguccuugaccugaagaauuacauugauaaacaacuccugccuauccugaacaagcagucuuguuccauuccgaauaucgagaccgugauugaguuccagcagaaaaacaaucggcuccuggaaaucacgcgcgaguuuagcgugaacgcuggcgucacaacccccguuucuacauauaugcuuaccaauuccgaacugcucagccugaucaacgacaugccuauuaccaacgaucaaaagaaacuuauguccaauaacgugcagaucgugagacagcagucuuacagcauuaugugcaucauuaaggaggaaguccuggccuaugugguucaacucccccuguacggggugaucgacacaccuuguuggaaacugcauacgagcccccucugcaccacaaauaccaaggagggauccaacaucugucugacacggaccgaucgcggcugguacugcgacaaugcugggucugucuccuucuuuccucaggccgaaacguguaaggugcagagcaacagaguuuucugcgauacaaugaacucucuuacccugccgagcgaggugaaucucugcaaugucgacauuuuuaaccccaaauaugauuguaagaucaugaccuccaaaacagacgugucuagcuccgucauuaccagccugggagcgaucgugucuugcuacggcaagacaaaauguacggccuccaauaagaaccgggggauuaucaagaccuucagcaauggaugcgauuauguuucuaacaaaggcguggacacagucuccgugggcaauacccuuuacuguguuaacaagcaagaggggcagagccuguaugugaaaggagaaccuaucauuaacuuuuacgacccccucgucuucccuuccgaugaguuugacgcuucuaucagccaggugaaugaaaagauuaaccagucccuggccuucauccgcaaaucugaugagcugcuccacaaugugaacgcuggcaagagcacaaccaauauuaugaucacgaccauuaucaucguuauuaucgucauucugcuuucccugaucgccguggggcuccugcuguauugcaaggccagaagcacacccgugacccuuucuaaagaccaacucuccggaauuaacaauaucgcuuucagcaacugaggacuaguacuggcugcaucucccuuuccucuguccuccauccuucucccaggauggugaagggggaccugguacccagugauccccaccccaggauccuaaaucaugacuuaccugcuaauaaaaacucauuggaaaagugagaagaucuaaaaaaaaaaaaaaaaaaaaaaaaaaaaaaaaaaaaaaaaaaaaaaaaaaaaaaaaaaaaaaaaugcaucccccccccccccccccccccccccccccccaaaggcucuuuucagagccaccagaauu

SEQ ID NO: 1891 - RNA, 1956 nt, Artificial Sequence
  mRNA product Design f-5 comprising derived and/or modified sequence from HRSV(A2)__F_DSCav1_mut1 (opt6)
gggagacuuucccauucuguagcagaauuugguguugccuguggucuuggucccgcggagaagcuuaccauggaacuauuaauacuaaaagcaaacgcuauaacaacaauacuaacagcagucacauucugcuuugcaucaggccaaaacaucacagaagaauuuuaccaaucaacaugcuccgccguaucgaaaggauaccuaggcgcauuaagaaccggaugguauacaucagucauaacaauugaacuaucuaacauaaaagaaaacaaauguaacggcacagaugccaaaguaaaacucaucaaacaagaauuagauaaauacaaaaacgcagucacugaacuacaacucuuaaugcaaucaacaccugcaacaggaucaggaucagcaauaugcucaggaguagccguauguaaaguacuacaccuagaaggagaagucaacaaaauaaaaucagcccuccuaaguacaaacaaagcugucguaucacuauccaaugguguuucaguacuaacuuucaaaguucuagaccuaaaaaacuacauagacaaacaacuacuaccaauacuaaauaaacaaaguuguucuauacccaacauagaaaccgucauagaauuucaacaaaaaaauaauagacuccuagaaauaacaagagaauuuucaguuaacgcagguguaacaaccccaguauccaccuauaugcuaacaaauucagaauuacuuucccuaaucaacgacaugcccauaacaaaugaccaaaaaaaauuaaugucaaacaacguccaaauaguucgucaacaaucauauucaauaaugugcauaauaaaagaagaagucuuagccuacguaguacaacuuccccuuuauggaguuaucgacacacccugcuggaaacuccacacuucaccacuauguacuacaaacacaaaagaaggauccaacaucugccucacaagaaccgaucgaggaugguacugugauaacgccggauccgucucauucuucccacaagcagaaacaugcaaaguacaaucaaacagaguauuuugcgacacaaugaacucccucacauuaccuucugaaguaaaccuauguaauguagacauauucaaccccaaauacgauugcaaaauaaugacaucaaagacagauguaucaucaagugucaucacaucccuaggagcaauugucucauguuaugguaaaacaaaaugcaccgcaucaaauaaaaacagaggcauaauaaaaaccuucucaaacgguugugacuacguauccaauaaaggcgucgacacaguaucaguagguaacacauuauauuguguaaacaaacaagaaggacagucccuauauguaaaaggagaaccaauaaucaacuucuacgacccacuuguuuucccuucugaugaauuugacgcaaguauaucacaaguaaaugaaaaaaucaaucaaucacuagccuuuauaagaaaaucagaugaauuauuacacaacguaaacgccggaaaaucaacaaccaacauaaugauaaccacaauaauaaucgucauaauagucauccuacuaucacucauagcaguuggacuccuacuauacugcaaagcacgaucaacaccaguaacauuauccaaagaccaacuaagugguaucaauaacaucgccuuuucaaacugaggacuaguacuggcugcaucucccuuuccucuguccuccauccuucucccaggauggugaagggggaccugguacccagugauccccaccccaggauccuaaaucaugacuuaccugcuaauaaaaacucauuggaaaagugagaagaucuaaaaaaaaaaaaaaaaaaaaaaaaaaaaaaaaaaaaaaaaaaaaaaaaaaaaaaaaaaaaaaaaugcaucccccccccccccccccccccccccccccccaaaggcucuuuucagagccaccagaauu

SEQ ID NO: 1892 - RNA, 1956 nt, Artificial Sequence
  mRNA product Design f-5 comprising derived and/or modified sequence from HRSV(A2)__F_DSCav1_mut1 (opt11)
gggagacuuucccauucuguagcagaauuugguguugccuguggucuuggucccgcggagaagcuuaccauggaacuccuaauccucaaagccaacgcaaucaccacaauccucacugccgucaccuucugcuucgccuccggccaaaacauaacagaagaauuuuaccaaucaaccuguucagcggucuccaaaggcuaccucggcgcccuccgcaccggcugguacaccuccgugaucaccauagaacucuccaacaucaaggaaaacaaaugcaacggcaccgacgcgaaggucaaacuuauuaaacaagaacucgacaaauacaaaaacgcagucaccgaacuacaacuccuaaugcaguccacgccagccaccggcucuggcucagccauaugcuccgguguggccguaugcaaaguccuacaccucgaaggagaagucaacaaaauaaaauccgcccuacuguccacaaacaaggccguagucucccucucaaacggcgucucaguacucaccuucaaaguccuagaccucaagaacuacaucgacaaacaacuccuacccauacuaaacaaacaauccugcucaauccccaacaucgaaaccguaauagaauuucaacaaaaaaacaacagacuccuggagaucacccgggaauuuuccguaaacgccggagucacaacacccgucucaaccuacaugcuaacgaacucagagcuccucucacuuaucaacgacaugcccauaacaaacgaccaaaaaaaacucauguccaacaacgugcaaaucguccgacaacaauccuacuccaucaugugcaucauuaaagaagaaguccucgcauacguaguccagcucccccucuacggcgucauagacacccccugcuggaaacuacacacaucaccccucugcacaacaaacaccaaagaaggcuccaacaucugccucacccgcaccgaccgaggcugguacugcgauaacgccggcagcgucuccuucuucccccaagcagaaaccugcaagguccaauccaaccgaguuuucugcgacacuaugaacucgcucacccuccccuccgaagucaaccucugcaacgucgacauuuucaaccccaaauacgacugcaaaaucaugaccuccaagaccgacguauccuccuccgucaucaccucccuaggcgccauaguaaguugcuacggcaaaaccaagugcacagcaagcaacaaaaaccgaggaauaaucaaaaccuucuccaacggcugcgacuacguauccaacaagggcgucgacaccguauccguagggaacacccuuuacugcguaaacaaacaagaaggacaaucacucuacguaaaaggcgaacccauaaucaacuucuacgacccccucguauuucccuccgacgaauuugacgcaucaaucucacaggucaacgaaaaaauaaaccaaucgcuagcauucaucagaaaaucagacgaacuccuacacaacgucaacgcaggcaagagcaccaccaacaucaugaucaccaccaucaucaucgucauaaucgucauacuacucucacucauagcagucggccuccuccuauacuguaaagcaaggucgaccccagucacccuauccaaagaccaacuaagcggcaucaacaacaucgcguucucaaacuaaggacuaguacuggcugcaucucccuuuccucuguccuccauccuucucccaggauggugaagggggaccugguacccagugauccccaccccaggauccuaaaucaugacuuaccugcuaauaaaaacucauuggaaaagugagaagaucuaaaaaaaaaaaaaaaaaaaaaaaaaaaaaaaaaaaaaaaaaaaaaaaaaaaaaaaaaaaaaaaaugcaucccccccccccccccccccccccccccccccaaaggcucuuuucagagccaccagaauu

SEQ ID NO: 1893 - RNA, 1952 nt, Artificial Sequence
  mRNA product Design g-1 comprising derived and/or modified sequence from HRSV(A2)__F_DSCav1_mut1 (opt1)
gggagacuuucccauucuguagcagaauuugguguugccuguggucuuggucccgcggagaagcuuaccauggagcugcucauccugaaggccaacgccaucaccaccauccugacggcggugaccuucugcuucgccagcggccagaacaucaccgaggaguucuaccaguccacgugcagcgccgucuccaagggguaccucggcgcccugcggaccggcugguacaccuccgugaucaccaucgagcugagcaacaucaaggagaacaagugcaacgggaccgacgccaaggugaagcucaucaagcaggagcuggacaaguacaagaacgcggucacggagcugcagcuccugaugcaguccaccccggcaaccggcuccggcuccgccaucugcagcggcgucgccgugugcaaggugcugcaccucgagggggaggucaacaagaucaagagcgcccugcuguccaccaacaaggccguggugagccucuccaacggcgucagcgugcugaccuucaaggugcuggaccucaagaacuacaucgacaagcagcugcugcccauccugaacaagcagagcugcuccauccccaacaucgagacggugaucgaguuccagcagaagaacaaccggcuccuggagaucacccgcgaguucagcgugaacgccggggucaccacccccguguccacguacaugcugaccaacagcgagcuccugucccugaucaacgacaugccgaucaccaacgaccagaagaagcucaugagcaacaacgugcagaucguccggcagcaguccuacagcaucaugugcaucaucaaggaggaggugcuggcguacgugguccagcugccccucuacggcgugaucgacacccccugcuggaagcugcacacgagcccccugugcaccaccaacaccaaggagggguccaacaucugccucacgcgcaccgaccggggcugguacugcgacaacgccggcagcgucuccuucuucccgcaggccgagaccugcaaggugcagagcaaccgcguguucugcgacaccaugaacucccugacgcugcccagcgagguaaaccucugcaacgucgacaucuucaaccccaaguacgacugcaagaucaugaccuccaagaccgacgugagcuccagcgugaucaccucccugggggccaucgucagcugcuacggcaagacgaagugcaccgccagcaacaagaaccgggggaucaucaagaccuucuccaacggcugcgacuacgugagcaacaagggcguggacaccguguccgucgggaacacccuguacugcgugaacaagcaggagggccagagccucuacgugaagggggagcccaucaucaacuucuacgacccgcuggucuuccccuccgacgaguucgacgcgagcaucucccaggugaacgagaagaucaaccagagccuggccuucauccgcaaguccgacgagcugcuccacaacgugaacgccggcaagagcacgaccaacaucaugaucaccaccaucaucaucgucaucaucgugauccugcugucccucaucgccguggggcugcugcucuacugcaaggcccggagcacgcccgucacccuguccaaggaccagcugagcggcaucaacaacaucgcguucuccaacugaggacuaguggaagcauuuuccuggcugauuaaaagaaauuacucagcuauggucaucuguuccuguuagaaggcuaugcagcauauuauauacuaugcgcauguuaugaaaugcauaauaaaaaauuuuaaaaaaucuaaaagaucuaaaaaaaaaaaaaaaaaaaaaaaaaaaaaaaaaaaaaaaaaaaaaaaaaaaaaaaaaaaaaaaaugcaucccccccccccccccccccccccccccccccaaaggcucuuuucagagccaccagaauu

SEQ ID NO: 1894 - RNA, 1952 nt, Artificial Sequence
  mRNA product Design g-1 comprising derived and/or modified sequence from HRSV(A2)__F_DSCav1_mut1 (opt1)
gggagacuuucccauucuguagcagaauuugguguugccuguggucuuggucccgcggagaagcuuaccauggagcugcucauccugaaggccaacgccaucaccaccauccugacggcggugaccuucugcuucgccagcggccagaacaucaccgaggaguucuaccaguccacgugcagcgccgucuccaagggguaccucggcgcccugcgcaccgggugguacaccagcgugaucaccaucgagcuguccaacaucaaggagaacaagugcaacggcaccgacgccaaggugaagcucaucaagcaggagcuggacaaguacaagaacgcggucacggagcugcagcuccugaugcagagcacccccgccaccggguccggcagcgccaucugcuccggcguggccgugugcaagguccugcaccucgagggggaggugaacaagaucaagagcgcgcugcuguccaccaacaaggccguggucagccucuccaacggcgugagcgugcugacguucaagguccuggaccucaagaacuacaucgacaagcagcugcugccgauccucaacaagcaguccugcagcauccccaacaucgagaccgugaucgaguuccagcagaagaacaaccggcugcuggagaucacccgcgaguucuccgugaacgccggggucaccacgcccgugagcaccuacaugcucaccaacuccgagcugcugagccucaucaacgacaugcccaucaccaacgaccagaagaagcugaugagcaacaacgugcagaucguccggcagcaguccuacagcaucaugugcaucaucaaggaggaggugcuggccuacgugguccagcucccgcuguacggcgugaucgacacgcccugcuggaagcugcacaccagcccccucugcaccaccaacacgaaggagggguccaacaucugccugacccgcaccgaccggggcugguacugcgacaacgccggcuccgugagcuucuucccccaggcggagaccugcaagguccaguccaaccgcguguucugcgacacgaugaacagccugacccucccguccgaggucaaccugugcaacguggacaucuucaaccccaaguacgacugcaagaucaugaccagcaagaccgacguguccagcuccgucaucacgagccugggggccaucguguccugcuacggcaagaccaagugcaccgccagcaacaagaaccgggggaucaucaagaccuucuccaacggcugcgacuacgugagcaacaagggcgucgacacgguguccguggggaacacccucuacugcgucaacaagcaggagggccagagccuguacgugaagggggagcccaucaucaacuucuacgacccccugguguucccgagcgacgaguucgacgccuccaucagccaggucaacgagaagaucaaccagucccucgccuucauccgcaagagcgacgagcugcugcacaacgugaacgcgggcaaguccaccaccaacaucaugaucaccacgaucaucaucgugaucaucgucauccuccugagccugaucgccguggggcuccugcuguacugcaaggcccgguccacccccgugacccugagcaaggaccagcucuccggcaucaacaacaucgccuucagcaacugaggacuaguggaagcauuuuccuggcugauuaaaagaaauuacucagcuauggucaucuguuccuguuagaaggcuaugcagcauauuauauacuaugcgcauguuaugaaaugcauaauaaaaaauuuuaaaaaaucuaaaagaucuaaaaaaaaaaaaaaaaaaaaaaaaaaaaaaaaaaaaaaaaaaaaaaaaaaaaaaaaaaaaaaaaugcaucccccccccccccccccccccccccccccccaaaggcucuuuucagagccaccagaauu

SEQ ID NO: 1895 - RNA, 1952 nt, Artificial Sequence
  mRNA product Design g-1 comprising derived and/or modified sequence from HRSV(A2)__F_DSCav1_mut1 (opt2)
gggagacuuucccauucuguagcagaauuugguguugccuguggucuuggucccgcggagaagcuuaccauggagcuccucauccucaaggccaacgccaucaccaccauccucaccgccgucaccuucugcuucgccuccggccagaacaucaccgaggaguucuaccaguccaccugcuccgccgucuccaagggcuaccucggcgcccuccgcaccggcugguacaccuccgucaucaccaucgagcucuccaacaucaaggagaacaagugcaacggcaccgacgccaaggucaagcucaucaagcaggagcucgacaaguacaagaacgccgucaccgagcuccagcuccucaugcaguccacccccgccaccggcuccggcuccgccaucugcuccggcgucgccgucugcaagguccuccaccucgagggcgaggucaacaagaucaaguccgcccuccucuccaccaacaaggccgucgucucccucuccaacggcgucuccguccucaccuucaagguccucgaccucaagaacuacaucgacaagcagcuccuccccauccucaacaagcaguccugcuccauccccaacaucgagaccgucaucgaguuccagcagaagaacaaccgccuccucgagaucacccgcgaguucuccgucaacgccggcgucaccacccccgucuccaccuacaugcucaccaacuccgagcuccucucccucaucaacgacaugcccaucaccaacgaccagaagaagcucauguccaacaacguccagaucguccgccagcaguccuacuccaucaugugcaucaucaaggaggagguccucgccuacgucguccagcucccccucuacggcgucaucgacacccccugcuggaagcuccacaccuccccccucugcaccaccaacaccaaggagggcuccaacaucugccucacccgcaccgaccgcggcugguacugcgacaacgccggcuccgucuccuucuucccccaggccgagaccugcaagguccaguccaaccgcgucuucugcgacaccaugaacucccucacccuccccuccgaggucaaccucugcaacgucgacaucuucaaccccaaguacgacugcaagaucaugaccuccaagaccgacgucuccuccuccgucaucaccucccucggcgccaucgucuccugcuacggcaagaccaagugcaccgccuccaacaagaaccgcggcaucaucaagaccuucuccaacggcugcgacuacgucuccaacaagggcgucgacaccgucuccgucggcaacacccucuacugcgucaacaagcaggagggccagucccucuacgucaagggcgagcccaucaucaacuucuacgacccccucgucuuccccuccgacgaguucgacgccuccaucucccaggucaacgagaagaucaaccagucccucgccuucauccgcaaguccgacgagcuccuccacaacgucaacgccggcaaguccaccaccaacaucaugaucaccaccaucaucaucgucaucaucgucauccuccucucccucaucgccgucggccuccuccucuacugcaaggcccgcuccacccccgucacccucuccaaggaccagcucuccggcaucaacaacaucgccuucuccaacugaggacuaguggaagcauuuuccuggcugauuaaaagaaauuacucagcuauggucaucuguuccuguuagaaggcuaugcagcauauuauauacuaugcgcauguuaugaaaugcauaauaaaaaauuuuaaaaaaucuaaaagaucuaaaaaaaaaaaaaaaaaaaaaaaaaaaaaaaaaaaaaaaaaaaaaaaaaaaaaaaaaaaaaaaaugcaucccccccccccccccccccccccccccccccaaaggcucuuuucagagccaccagaauu

SEQ ID NO: 1896 - RNA, 1952 nt, Artificial Sequence
  mRNA product Design g-1 comprising derived and/or modified sequence from HRSV(A2)__F_DSCav1_mut1 (opt3)
gggagacuuucccauucuguagcagaauuugguguugccuguggucuuggucccgcggagaagcuuaccauggagcugcucauccuuaaggccaacgcuauuaccacaauacugacugcagugacguucugcuuugccagcggccagaauaucaccgaagaguucuaccaauccacauguucugcggucucaaaaggguauuugggagcuuuaagaacugguugguacaccaguguuauuacaaucgaacugagcaacauuaaggagaauaaaugcaacggcaccgacgccaaggugaaacuaaucaagcaggaacucgauaaguauaaaaaugcaguaacugagcugcagcuucugaugcaguccacacccgccaccgggucuggaucggcuauauguucaggcguggcagucugcaagguguugcaccucgagggugaaguuaacaaaaucaagagcgcccugcugaguacgaauaaagcuguggucucccucucuaacggggugagcguauuaacuuuuaagguucuggaccuuaagaauuacauugauaaacaauugcugccuauccuaaacaagcaguccuguucaauuccaaauaucgagaccgugauagaguuccagcagaaaaacaauaggcuccuggaaauuacacgggaguuuagugucaacgccggagugacuaccccggugagcacauauaugcuuaccaauucugaacuguugucccucaucaacgacaugcccauuacgaacgaucaaaagaaacugaugucaaauaacguccagaucguucgccagcagagcuacaguaucaugugcauuauaaaggaggaaguguuagcguauguagugcaacugccucucuacggcgucaucgacacuccauguuggaaacuucauacaucuccccugugcaccacuaauacaaaggagggcuccaacauuuguuugacccgaacggaucgugggugguacugcgacaaugcaggaagcgugucguucuuuccucaggccgaaaccuguaagguucagucuaacagaguguucugcgauacaaugaacucccuaacucugccaucagaggucaaucucugcaauguggacaucuuuaaccccaaauaugauuguaagauaaugaccaguaaaacagacguaagcuccucuguuauuacuagccugggugcuaucgugucaugcuacggcaagaccaaauguacagccaguaauaagaacagggggaucauuaagaccuucuccaauggaugcgauuaugucagcaacaaaggcguggacacugucucuguggguaauacgcuuuacuguguuaacaagcaagaggggcagucacuguaugugaaaggagaaccuaucauuaacuuuuacgacccauugguauucccgagugaugaguuugacgcaagcauaucccaggucaaugaaaagaucaaccagucucucgcuuucauucggaaaucggaugagcuguuacacaaugugaacgccggcaagagcacaaccaauaucaugaucacuaccauuauaaucguuauuaucgugauucugcuaucccucaucgcggucggccugcuuuuguauugcaaggcccgcucaacacccgugacccugaguaaagaccaacucucugggauaaacaauaucgcauucagcaacugaggacuaguggaagcauuuuccuggcugauuaaaagaaauuacucagcuauggucaucuguuccuguuagaaggcuaugcagcauauuauauacuaugcgcauguuaugaaaugcauaauaaaaaauuuuaaaaaaucuaaaagaucuaaaaaaaaaaaaaaaaaaaaaaaaaaaaaaaaaaaaaaaaaaaaaaaaaaaaaaaaaaaaaaaaugcaucccccccccccccccccccccccccccccccaaaggcucuuuucagagccaccagaauu

SEQ ID NO: 1897 - RNA, 1952 nt, Artificial Sequence
  mRNA product Design g-1 comprising derived and/or modified sequence from HRSV(A2)__F_DSCav1_mut1 (opt4)
gggagacuuucccauucuguagcagaauuugguguugccuguggucuuggucccgcggagaagcuuaccauggagcugcugauccugaaggccaacgccaucaccaccauccugaccgccgugaccuucugcuucgccagcggccagaacaucaccgaggaguucuaccagagcaccugcagcgccgugagcaagggcuaccugggcgcccugagaaccggcugguacaccagcgugaucaccaucgagcugagcaacaucaaggagaacaagugcaacggcaccgacgccaaggugaagcugaucaagcaggagcuggacaaguacaagaacgccgugaccgagcugcagcugcugaugcagagcacccccgccaccggcagcggcagcgccaucugcagcggcguggccgugugcaaggugcugcaccuggagggcgaggugaacaagaucaagagcgcccugcugagcaccaacaaggccguggugagccugagcaacggcgugagcgugcugaccuucaaggugcuggaccugaagaacuacaucgacaagcagcugcugcccauccugaacaagcagagcugcagcauccccaacaucgagaccgugaucgaguuccagcagaagaacaacagacugcuggagaucaccagagaguucagcgugaacgccggcgugaccacccccgugagcaccuacaugcugaccaacagcgagcugcugagccugaucaacgacaugcccaucaccaacgaccagaagaagcugaugagcaacaacgugcagaucgugagacagcagagcuacagcaucaugugcaucaucaaggaggaggugcuggccuacguggugcagcugccccuguacggcgugaucgacacccccugcuggaagcugcacaccagcccccugugcaccaccaacaccaaggagggcagcaacaucugccugaccagaaccgacagaggcugguacugcgacaacgccggcagcgugagcuucuucccccaggccgagaccugcaaggugcagagcaacagaguguucugcgacaccaugaacagccugacccugcccagcgaggugaaccugugcaacguggacaucuucaaccccaaguacgacugcaagaucaugaccagcaagaccgacgugagcagcagcgugaucaccagccugggcgccaucgugagcugcuacggcaagaccaagugcaccgccagcaacaagaacagaggcaucaucaagaccuucagcaacggcugcgacuacgugagcaacaagggcguggacaccgugagcgugggcaacacccuguacugcgugaacaagcaggagggccagagccuguacgugaagggcgagcccaucaucaacuucuacgacccccugguguuccccagcgacgaguucgacgccagcaucagccaggugaacgagaagaucaaccagagccuggccuucaucagaaagagcgacgagcugcugcacaacgugaacgccggcaagagcaccaccaacaucaugaucaccaccaucaucaucgugaucaucgugauccugcugagccugaucgccgugggccugcugcuguacugcaaggccagaagcacccccgugacccugagcaaggaccagcugagcggcaucaacaacaucgccuucagcaacugaggacuaguggaagcauuuuccuggcugauuaaaagaaauuacucagcuauggucaucuguuccuguuagaaggcuaugcagcauauuauauacuaugcgcauguuaugaaaugcauaauaaaaaauuuuaaaaaaucuaaaagaucuaaaaaaaaaaaaaaaaaaaaaaaaaaaaaaaaaaaaaaaaaaaaaaaaaaaaaaaaaaaaaaaaugcaucccccccccccccccccccccccccccccccaaaggcucuuuucagagccaccagaauu

SEQ ID NO: 1898 - RNA, 1952 nt, Artificial Sequence
  mRNA product Design g-1 comprising derived and/or modified sequence from HRSV(A2)__F_DSCav1_mut1 (opt5)
gggagacuuucccauucuguagcagaauuugguguugccuguggucuuggucccgcggagaagcuuaccauggagcugcucauccugaaggccaacgcuauuaccacaauccuuacggccgugaccuucugcuuugcgagcggccagaauauuacagaagaguucuaccaauccaccuguucugcugucagcaaaggguaucugggagcccucagaacaggcugguacaccuccguuaucacaauugaacugucuaacaucaaggagaauaaaugcaacgggaccgacgccaaggugaaacuuaucaagcaggaacuggauaaguauaaaaaugcugugacggagcuccagcugcugaugcagagcacccccgccacaggauccggcucugcuauuuguagcggggucgccgugugcaagguucuccaccuggagggagaagugaacaaaaucaaguccgcgcuucugagcaccaauaaagccgucgugucucucuccaacggcguuagcgugcugacauuuaagguccuugaccugaagaauuacauugauaaacaacuccugccuauccugaacaagcagucuuguuccauuccgaauaucgagaccgugauugaguuccagcagaaaaacaaucggcuccuggaaaucacgcgcgaguuuagcgugaacgcuggcgucacaacccccguuucuacauauaugcuuaccaauuccgaacugcucagccugaucaacgacaugccuauuaccaacgaucaaaagaaacuuauguccaauaacgugcagaucgugagacagcagucuuacagcauuaugugcaucauuaaggaggaaguccuggccuaugugguucaacucccccuguacggggugaucgacacaccuuguuggaaacugcauacgagcccccucugcaccacaaauaccaaggagggauccaacaucugucugacacggaccgaucgcggcugguacugcgacaaugcugggucugucuccuucuuuccucaggccgaaacguguaaggugcagagcaacagaguuuucugcgauacaaugaacucucuuacccugccgagcgaggugaaucucugcaaugucgacauuuuuaaccccaaauaugauuguaagaucaugaccuccaaaacagacgugucuagcuccgucauuaccagccugggagcgaucgugucuugcuacggcaagacaaaauguacggccuccaauaagaaccgggggauuaucaagaccuucagcaauggaugcgauuauguuucuaacaaaggcguggacacagucuccgugggcaauacccuuuacuguguuaacaagcaagaggggcagagccuguaugugaaaggagaaccuaucauuaacuuuuacgacccccucgucuucccuuccgaugaguuugacgcuucuaucagccaggugaaugaaaagauuaaccagucccuggccuucauccgcaaaucugaugagcugcuccacaaugugaacgcuggcaagagcacaaccaauauuaugaucacgaccauuaucaucguuauuaucgucauucugcuuucccugaucgccguggggcuccugcuguauugcaaggccagaagcacacccgugacccuuucuaaagaccaacucuccggaauuaacaauaucgcuuucagcaacugaggacuaguggaagcauuuuccuggcugauuaaaagaaauuacucagcuauggucaucuguuccuguuagaaggcuaugcagcauauuauauacuaugcgcauguuaugaaaugcauaauaaaaaauuuuaaaaaaucuaaaagaucuaaaaaaaaaaaaaaaaaaaaaaaaaaaaaaaaaaaaaaaaaaaaaaaaaaaaaaaaaaaaaaaaugcaucccccccccccccccccccccccccccccccaaaggcucuuuucagagccaccagaauu

SEQ ID NO: 1899 - RNA, 1952 nt, Artificial Sequence
  mRNA product Design g-1 comprising derived and/or modified sequence from HRSV(A2)__F_DSCav1_mut1 (opt6)
gggagacuuucccauucuguagcagaauuugguguugccuguggucuuggucccgcggagaagcuuaccauggaacuauuaauacuaaaagcaaacgcuauaacaacaauacuaacagcagucacauucugcuuugcaucaggccaaaacaucacagaagaauuuuaccaaucaacaugcuccgccguaucgaaaggauaccuaggcgcauuaagaaccggaugguauacaucagucauaacaauugaacuaucuaacauaaaagaaaacaaauguaacggcacagaugccaaaguaaaacucaucaaacaagaauuagauaaauacaaaaacgcagucacugaacuacaacucuuaaugcaaucaacaccugcaacaggaucaggaucagcaauaugcucaggaguagccguauguaaaguacuacaccuagaaggagaagucaacaaaauaaaaucagcccuccuaaguacaaacaaagcugucguaucacuauccaaugguguuucaguacuaacuuucaaaguucuagaccuaaaaaacuacauagacaaacaacuacuaccaauacuaaauaaacaaaguuguucuauacccaacauagaaaccgucauagaauuucaacaaaaaaauaauagacuccuagaaauaacaagagaauuuucaguuaacgcagguguaacaaccccaguauccaccuauaugcuaacaaauucagaauuacuuucccuaaucaacgacaugcccauaacaaaugaccaaaaaaaauuaaugucaaacaacguccaaauaguucgucaacaaucauauucaauaaugugcauaauaaaagaagaagucuuagccuacguaguacaacuuccccuuuauggaguuaucgacacacccugcuggaaacuccacacuucaccacuauguacuacaaacacaaaagaaggauccaacaucugccucacaagaaccgaucgaggaugguacugugauaacgccggauccgucucauucuucccacaagcagaaacaugcaaaguacaaucaaacagaguauuuugcgacacaaugaacucccucacauuaccuucugaaguaaaccuauguaauguagacauauucaaccccaaauacgauugcaaaauaaugacaucaaagacagauguaucaucaagugucaucacaucccuaggagcaauugucucauguuaugguaaaacaaaaugcaccgcaucaaauaaaaacagaggcauaauaaaaaccuucucaaacgguugugacuacguauccaauaaaggcgucgacacaguaucaguagguaacacauuauauuguguaaacaaacaagaaggacagucccuauauguaaaaggagaaccaauaaucaacuucuacgacccacuuguuuucccuucugaugaauuugacgcaaguauaucacaaguaaaugaaaaaaucaaucaaucacuagccuuuauaagaaaaucagaugaauuauuacacaacguaaacgccggaaaaucaacaaccaacauaaugauaaccacaauaauaaucgucauaauagucauccuacuaucacucauagcaguuggacuccuacuauacugcaaagcacgaucaacaccaguaacauuauccaaagaccaacuaagugguaucaauaacaucgccuuuucaaacugaggacuaguggaagcauuuuccuggcugauuaaaagaaauuacucagcuauggucaucuguuccuguuagaaggcuaugcagcauauuauauacuaugcgcauguuaugaaaugcauaauaaaaaauuuuaaaaaaucuaaaagaucuaaaaaaaaaaaaaaaaaaaaaaaaaaaaaaaaaaaaaaaaaaaaaaaaaaaaaaaaaaaaaaaaugcaucccccccccccccccccccccccccccccccaaaggcucuuuucagagccaccagaauu

SEQ ID NO: 1900 - RNA, 1952 nt, Artificial Sequence
  mRNA product Design g-1 comprising derived and/or modified sequence from HRSV(A2)__F_DSCav1_mut1 (opt11)
gggagacuuucccauucuguagcagaauuugguguugccuguggucuuggucccgcggagaagcuuaccauggaacuccuaauccucaaagccaacgcaaucaccacaauccucacugccgucaccuucugcuucgccuccggccaaaacauaacagaagaauuuuaccaaucaaccuguucagcggucuccaaaggcuaccucggcgcccuccgcaccggcugguacaccuccgugaucaccauagaacucuccaacaucaaggaaaacaaaugcaacggcaccgacgcgaaggucaaacuuauuaaacaagaacucgacaaauacaaaaacgcagucaccgaacuacaacuccuaaugcaguccacgccagccaccggcucuggcucagccauaugcuccgguguggccguaugcaaaguccuacaccucgaaggagaagucaacaaaauaaaauccgcccuacuguccacaaacaaggccguagucucccucucaaacggcgucucaguacucaccuucaaaguccuagaccucaagaacuacaucgacaaacaacuccuacccauacuaaacaaacaauccugcucaauccccaacaucgaaaccguaauagaauuucaacaaaaaaacaacagacuccuggagaucacccgggaauuuuccguaaacgccggagucacaacacccgucucaaccuacaugcuaacgaacucagagcuccucucacuuaucaacgacaugcccauaacaaacgaccaaaaaaaacucauguccaacaacgugcaaaucguccgacaacaauccuacuccaucaugugcaucauuaaagaagaaguccucgcauacguaguccagcucccccucuacggcgucauagacacccccugcuggaaacuacacacaucaccccucugcacaacaaacaccaaagaaggcuccaacaucugccucacccgcaccgaccgaggcugguacugcgauaacgccggcagcgucuccuucuucccccaagcagaaaccugcaagguccaauccaaccgaguuuucugcgacacuaugaacucgcucacccuccccuccgaagucaaccucugcaacgucgacauuuucaaccccaaauacgacugcaaaaucaugaccuccaagaccgacguauccuccuccgucaucaccucccuaggcgccauaguaaguugcuacggcaaaaccaagugcacagcaagcaacaaaaaccgaggaauaaucaaaaccuucuccaacggcugcgacuacguauccaacaagggcgucgacaccguauccguagggaacacccuuuacugcguaaacaaacaagaaggacaaucacucuacguaaaaggcgaacccauaaucaacuucuacgacccccucguauuucccuccgacgaauuugacgcaucaaucucacaggucaacgaaaaaauaaaccaaucgcuagcauucaucagaaaaucagacgaacuccuacacaacgucaacgcaggcaagagcaccaccaacaucaugaucaccaccaucaucaucgucauaaucgucauacuacucucacucauagcagucggccuccuccuauacuguaaagcaaggucgaccccagucacccuauccaaagaccaacuaagcggcaucaacaacaucgcguucucaaacuaaggacuaguggaagcauuuuccuggcugauuaaaagaaauuacucagcuauggucaucuguuccuguuagaaggcuaugcagcauauuauauacuaugcgcauguuaugaaaugcauaauaaaaaauuuuaaaaaaucuaaaagaucuaaaaaaaaaaaaaaaaaaaaaaaaaaaaaaaaaaaaaaaaaaaaaaaaaaaaaaaaaaaaaaaaugcaucccccccccccccccccccccccccccccccaaaggcucuuuucagagccaccagaauu

SEQ ID NO: 1901 - RNA, 1967 nt, Artificial Sequence
  mRNA product Design g-2 comprising derived and/or modified sequence from HRSV(A2)__F_DSCav1_mut1 (opt1)
gggagaguccgcucagccagguugcagaagcggcuuagcguguguccuaaucuucucucugcguguagguaggccugugccgcaaacaagcuuaccauggagcugcucauccugaaggccaacgccaucaccaccauccugacggcggugaccuucugcuucgccagcggccagaacaucaccgaggaguucuaccaguccacgugcagcgccgucuccaagggguaccucggcgcccugcggaccggcugguacaccuccgugaucaccaucgagcugagcaacaucaaggagaacaagugcaacgggaccgacgccaaggugaagcucaucaagcaggagcuggacaaguacaagaacgcggucacggagcugcagcuccugaugcaguccaccccggcaaccggcuccggcuccgccaucugcagcggcgucgccgugugcaaggugcugcaccucgagggggaggucaacaagaucaagagcgcccugcuguccaccaacaaggccguggugagccucuccaacggcgucagcgugcugaccuucaaggugcuggaccucaagaacuacaucgacaagcagcugcugcccauccugaacaagcagagcugcuccauccccaacaucgagacggugaucgaguuccagcagaagaacaaccggcuccuggagaucacccgcgaguucagcgugaacgccggggucaccacccccguguccacguacaugcugaccaacagcgagcuccugucccugaucaacgacaugccgaucaccaacgaccagaagaagcucaugagcaacaacgugcagaucguccggcagcaguccuacagcaucaugugcaucaucaaggaggaggugcuggcguacgugguccagcugccccucuacggcgugaucgacacccccugcuggaagcugcacacgagcccccugugcaccaccaacaccaaggagggguccaacaucugccucacgcgcaccgaccggggcugguacugcgacaacgccggcagcgucuccuucuucccgcaggccgagaccugcaaggugcagagcaaccgcguguucugcgacaccaugaacucccugacgcugcccagcgagguaaaccucugcaacgucgacaucuucaaccccaaguacgacugcaagaucaugaccuccaagaccgacgugagcuccagcgugaucaccucccugggggccaucgucagcugcuacggcaagacgaagugcaccgccagcaacaagaaccgggggaucaucaagaccuucuccaacggcugcgacuacgugagcaacaagggcguggacaccguguccgucgggaacacccuguacugcgugaacaagcaggagggccagagccucuacgugaagggggagcccaucaucaacuucuacgacccgcuggucuuccccuccgacgaguucgacgcgagcaucucccaggugaacgagaagaucaaccagagccuggccuucauccgcaaguccgacgagcugcuccacaacgugaacgccggcaagagcacgaccaacaucaugaucaccaccaucaucaucgucaucaucgugauccugcugucccucaucgccguggggcugcugcucuacugcaaggcccggagcacgcccgucacccuguccaaggaccagcugagcggcaucaacaacaucgcguucuccaacugaggacuaguaauaaggaaacuguaugaaugucugugggcaggaagugaagagauccuucuguaaagguuuuuggaauuaugucugcugaauaauaaacuuuuuugaaauaauaaaucugguagaaaaaugagaucuaaaaaaaaaaaaaaaaaaaaaaaaaaaaaaaaaaaaaaaaaaaaaaaaaaaaaaaaaaaaaaaaugcaucccccccccccccccccccccccccccccccaaaggcucuuuucagagccaccagaauu

SEQ ID NO: 1902 - RNA, 1967 nt, Artificial Sequence
  mRNA product Design g-2 comprising derived and/or modified sequence from HRSV(A2)__F_DSCav1_mut1 (opt1)
gggagaguccgcucagccagguugcagaagcggcuuagcguguguccuaaucuucucucugcguguagguaggccugugccgcaaacaagcuuaccauggagcugcucauccugaaggccaacgccaucaccaccauccugacggcggugaccuucugcuucgccagcggccagaacaucaccgaggaguucuaccaguccacgugcagcgccgucuccaagggguaccucggcgcccugcgcaccgggugguacaccagcgugaucaccaucgagcuguccaacaucaaggagaacaagugcaacggcaccgacgccaaggugaagcucaucaagcaggagcuggacaaguacaagaacgcggucacggagcugcagcuccugaugcagagcacccccgccaccggguccggcagcgccaucugcuccggcguggccgugugcaagguccugcaccucgagggggaggugaacaagaucaagagcgcgcugcuguccaccaacaaggccguggucagccucuccaacggcgugagcgugcugacguucaagguccuggaccucaagaacuacaucgacaagcagcugcugccgauccucaacaagcaguccugcagcauccccaacaucgagaccgugaucgaguuccagcagaagaacaaccggcugcuggagaucacccgcgaguucuccgugaacgccggggucaccacgcccgugagcaccuacaugcucaccaacuccgagcugcugagccucaucaacgacaugcccaucaccaacgaccagaagaagcugaugagcaacaacgugcagaucguccggcagcaguccuacagcaucaugugcaucaucaaggaggaggugcuggccuacgugguccagcucccgcuguacggcgugaucgacacgcccugcuggaagcugcacaccagcccccucugcaccaccaacacgaaggagggguccaacaucugccugacccgcaccgaccggggcugguacugcgacaacgccggcuccgugagcuucuucccccaggcggagaccugcaagguccaguccaaccgcguguucugcgacacgaugaacagccugacccucccguccgaggucaaccugugcaacguggacaucuucaaccccaaguacgacugcaagaucaugaccagcaagaccgacguguccagcuccgucaucacgagccugggggccaucguguccugcuacggcaagaccaagugcaccgccagcaacaagaaccgggggaucaucaagaccuucuccaacggcugcgacuacgugagcaacaagggcgucgacacgguguccguggggaacacccucuacugcgucaacaagcaggagggccagagccuguacgugaagggggagcccaucaucaacuucuacgacccccugguguucccgagcgacgaguucgacgccuccaucagccaggucaacgagaagaucaaccagucccucgccuucauccgcaagagcgacgagcugcugcacaacgugaacgcgggcaaguccaccaccaacaucaugaucaccacgaucaucaucgugaucaucgucauccuccugagccugaucgccguggggcuccugcuguacugcaaggcccgguccacccccgugacccugagcaaggaccagcucuccggcaucaacaacaucgccuucagcaacugaggacuaguaauaaggaaacuguaugaaugucugugggcaggaagugaagagauccuucuguaaagguuuuuggaauuaugucugcugaauaauaaacuuuuuugaaauaauaaaucugguagaaaaaugagaucuaaaaaaaaaaaaaaaaaaaaaaaaaaaaaaaaaaaaaaaaaaaaaaaaaaaaaaaaaaaaaaaaugcaucccccccccccccccccccccccccccccccaaaggcucuuuucagagccaccagaauu

SEQ ID NO: 1903 - RNA, 1967 nt, Artificial Sequence
  mRNA product Design g-2 comprising derived and/or modified sequence from HRSV(A2)__F_DSCav1_mut1 (opt2)
gggagaguccgcucagccagguugcagaagcggcuuagcguguguccuaaucuucucucugcguguagguaggccugugccgcaaacaagcuuaccauggagcuccucauccucaaggccaacgccaucaccaccauccucaccgccgucaccuucugcuucgccuccggccagaacaucaccgaggaguucuaccaguccaccugcuccgccgucuccaagggcuaccucggcgcccuccgcaccggcugguacaccuccgucaucaccaucgagcucuccaacaucaaggagaacaagugcaacggcaccgacgccaaggucaagcucaucaagcaggagcucgacaaguacaagaacgccgucaccgagcuccagcuccucaugcaguccacccccgccaccggcuccggcuccgccaucugcuccggcgucgccgucugcaagguccuccaccucgagggcgaggucaacaagaucaaguccgcccuccucuccaccaacaaggccgucgucucccucuccaacggcgucuccguccucaccuucaagguccucgaccucaagaacuacaucgacaagcagcuccuccccauccucaacaagcaguccugcuccauccccaacaucgagaccgucaucgaguuccagcagaagaacaaccgccuccucgagaucacccgcgaguucuccgucaacgccggcgucaccacccccgucuccaccuacaugcucaccaacuccgagcuccucucccucaucaacgacaugcccaucaccaacgaccagaagaagcucauguccaacaacguccagaucguccgccagcaguccuacuccaucaugugcaucaucaaggaggagguccucgccuacgucguccagcucccccucuacggcgucaucgacacccccugcuggaagcuccacaccuccccccucugcaccaccaacaccaaggagggcuccaacaucugccucacccgcaccgaccgcggcugguacugcgacaacgccggcuccgucuccuucuucccccaggccgagaccugcaagguccaguccaaccgcgucuucugcgacaccaugaacucccucacccuccccuccgaggucaaccucugcaacgucgacaucuucaaccccaaguacgacugcaagaucaugaccuccaagaccgacgucuccuccuccgucaucaccucccucggcgccaucgucuccugcuacggcaagaccaagugcaccgccuccaacaagaaccgcggcaucaucaagaccuucuccaacggcugcgacuacgucuccaacaagggcgucgacaccgucuccgucggcaacacccucuacugcgucaacaagcaggagggccagucccucuacgucaagggcgagcccaucaucaacuucuacgacccccucgucuuccccuccgacgaguucgacgccuccaucucccaggucaacgagaagaucaaccagucccucgccuucauccgcaaguccgacgagcuccuccacaacgucaacgccggcaaguccaccaccaacaucaugaucaccaccaucaucaucgucaucaucgucauccuccucucccucaucgccgucggccuccuccucuacugcaaggcccgcuccacccccgucacccucuccaaggaccagcucuccggcaucaacaacaucgccuucuccaacugaggacuaguaauaaggaaacuguaugaaugucugugggcaggaagugaagagauccuucuguaaagguuuuuggaauuaugucugcugaauaauaaacuuuuuugaaauaauaaaucugguagaaaaaugagaucuaaaaaaaaaaaaaaaaaaaaaaaaaaaaaaaaaaaaaaaaaaaaaaaaaaaaaaaaaaaaaaaaugcaucccccccccccccccccccccccccccccccaaaggcucuuuucagagccaccagaauu

SEQ ID NO: 1904 - RNA, 1967 nt, Artificial Sequence
  mRNA product Design g-2 comprising derived and/or modified sequence from HRSV(A2)__F_DSCav1_mut1 (opt3)
gggagaguccgcucagccagguugcagaagcggcuuagcguguguccuaaucuucucucugcguguagguaggccugugccgcaaacaagcuuaccauggagcugcucauccuuaaggccaacgcuauuaccacaauacugacugcagugacguucugcuuugccagcggccagaauaucaccgaagaguucuaccaauccacauguucugcggucucaaaaggguauuugggagcuuuaagaacugguugguacaccaguguuauuacaaucgaacugagcaacauuaaggagaauaaaugcaacggcaccgacgccaaggugaaacuaaucaagcaggaacucgauaaguauaaaaaugcaguaacugagcugcagcuucugaugcaguccacacccgccaccgggucuggaucggcuauauguucaggcguggcagucugcaagguguugcaccucgagggugaaguuaacaaaaucaagagcgcccugcugaguacgaauaaagcuguggucucccucucuaacggggugagcguauuaacuuuuaagguucuggaccuuaagaauuacauugauaaacaauugcugccuauccuaaacaagcaguccuguucaauuccaaauaucgagaccgugauagaguuccagcagaaaaacaauaggcuccuggaaauuacacgggaguuuagugucaacgccggagugacuaccccggugagcacauauaugcuuaccaauucugaacuguugucccucaucaacgacaugcccauuacgaacgaucaaaagaaacugaugucaaauaacguccagaucguucgccagcagagcuacaguaucaugugcauuauaaaggaggaaguguuagcguauguagugcaacugccucucuacggcgucaucgacacuccauguuggaaacuucauacaucuccccugugcaccacuaauacaaaggagggcuccaacauuuguuugacccgaacggaucgugggugguacugcgacaaugcaggaagcgugucguucuuuccucaggccgaaaccuguaagguucagucuaacagaguguucugcgauacaaugaacucccuaacucugccaucagaggucaaucucugcaauguggacaucuuuaaccccaaauaugauuguaagauaaugaccaguaaaacagacguaagcuccucuguuauuacuagccugggugcuaucgugucaugcuacggcaagaccaaauguacagccaguaauaagaacagggggaucauuaagaccuucuccaauggaugcgauuaugucagcaacaaaggcguggacacugucucuguggguaauacgcuuuacuguguuaacaagcaagaggggcagucacuguaugugaaaggagaaccuaucauuaacuuuuacgacccauugguauucccgagugaugaguuugacgcaagcauaucccaggucaaugaaaagaucaaccagucucucgcuuucauucggaaaucggaugagcuguuacacaaugugaacgccggcaagagcacaaccaauaucaugaucacuaccauuauaaucguuauuaucgugauucugcuaucccucaucgcggucggccugcuuuuguauugcaaggcccgcucaacacccgugacccugaguaaagaccaacucucugggauaaacaauaucgcauucagcaacugaggacuaguaauaaggaaacuguaugaaugucugugggcaggaagugaagagauccuucuguaaagguuuuuggaauuaugucugcugaauaauaaacuuuuuugaaauaauaaaucugguagaaaaaugagaucuaaaaaaaaaaaaaaaaaaaaaaaaaaaaaaaaaaaaaaaaaaaaaaaaaaaaaaaaaaaaaaaaugcaucccccccccccccccccccccccccccccccaaaggcucuuuucagagccaccagaauu

SEQ ID NO: 1905 - RNA, 1967 nt, Artificial Sequence
  mRNA product Design g-2 comprising derived and/or modified sequence from HRSV(A2)__F_DSCav1_mut1 (opt4)
gggagaguccgcucagccagguugcagaagcggcuuagcguguguccuaaucuucucucugcguguagguaggccugugccgcaaacaagcuuaccauggagcugcugauccugaaggccaacgccaucaccaccauccugaccgccgugaccuucugcuucgccagcggccagaacaucaccgaggaguucuaccagagcaccugcagcgccgugagcaagggcuaccugggcgcccugagaaccggcugguacaccagcgugaucaccaucgagcugagcaacaucaaggagaacaagugcaacggcaccgacgccaaggugaagcugaucaagcaggagcuggacaaguacaagaacgccgugaccgagcugcagcugcugaugcagagcacccccgccaccggcagcggcagcgccaucugcagcggcguggccgugugcaaggugcugcaccuggagggcgaggugaacaagaucaagagcgcccugcugagcaccaacaaggccguggugagccugagcaacggcgugagcgugcugaccuucaaggugcuggaccugaagaacuacaucgacaagcagcugcugcccauccugaacaagcagagcugcagcauccccaacaucgagaccgugaucgaguuccagcagaagaacaacagacugcuggagaucaccagagaguucagcgugaacgccggcgugaccacccccgugagcaccuacaugcugaccaacagcgagcugcugagccugaucaacgacaugcccaucaccaacgaccagaagaagcugaugagcaacaacgugcagaucgugagacagcagagcuacagcaucaugugcaucaucaaggaggaggugcuggccuacguggugcagcugccccuguacggcgugaucgacacccccugcuggaagcugcacaccagcccccugugcaccaccaacaccaaggagggcagcaacaucugccugaccagaaccgacagaggcugguacugcgacaacgccggcagcgugagcuucuucccccaggccgagaccugcaaggugcagagcaacagaguguucugcgacaccaugaacagccugacccugcccagcgaggugaaccugugcaacguggacaucuucaaccccaaguacgacugcaagaucaugaccagcaagaccgacgugagcagcagcgugaucaccagccugggcgccaucgugagcugcuacggcaagaccaagugcaccgccagcaacaagaacagaggcaucaucaagaccuucagcaacggcugcgacuacgugagcaacaagggcguggacaccgugagcgugggcaacacccuguacugcgugaacaagcaggagggccagagccuguacgugaagggcgagcccaucaucaacuucuacgacccccugguguuccccagcgacgaguucgacgccagcaucagccaggugaacgagaagaucaaccagagccuggccuucaucagaaagagcgacgagcugcugcacaacgugaacgccggcaagagcaccaccaacaucaugaucaccaccaucaucaucgugaucaucgugauccugcugagccugaucgccgugggccugcugcuguacugcaaggccagaagcacccccgugacccugagcaaggaccagcugagcggcaucaacaacaucgccuucagcaacugaggacuaguaauaaggaaacuguaugaaugucugugggcaggaagugaagagauccuucuguaaagguuuuuggaauuaugucugcugaauaauaaacuuuuuugaaauaauaaaucugguagaaaaaugagaucuaaaaaaaaaaaaaaaaaaaaaaaaaaaaaaaaaaaaaaaaaaaaaaaaaaaaaaaaaaaaaaaaugcaucccccccccccccccccccccccccccccccaaaggcucuuuucagagccaccagaauu

SEQ ID NO: 1906 - RNA, 1967 nt, Artificial Sequence
  mRNA product Design g-2 comprising derived and/or modified sequence from HRSV(A2)__F_DSCav1_mut1 (opt5)
gggagaguccgcucagccagguugcagaagcggcuuagcguguguccuaaucuucucucugcguguagguaggccugugccgcaaacaagcuuaccauggagcugcucauccugaaggccaacgcuauuaccacaauccuuacggccgugaccuucugcuuugcgagcggccagaauauuacagaagaguucuaccaauccaccuguucugcugucagcaaaggguaucugggagcccucagaacaggcugguacaccuccguuaucacaauugaacugucuaacaucaaggagaauaaaugcaacgggaccgacgccaaggugaaacuuaucaagcaggaacuggauaaguauaaaaaugcugugacggagcuccagcugcugaugcagagcacccccgccacaggauccggcucugcuauuuguagcggggucgccgugugcaagguucuccaccuggagggagaagugaacaaaaucaaguccgcgcuucugagcaccaauaaagccgucgugucucucuccaacggcguuagcgugcugacauuuaagguccuugaccugaagaauuacauugauaaacaacuccugccuauccugaacaagcagucuuguuccauuccgaauaucgagaccgugauugaguuccagcagaaaaacaaucggcuccuggaaaucacgcgcgaguuuagcgugaacgcuggcgucacaacccccguuucuacauauaugcuuaccaauuccgaacugcucagccugaucaacgacaugccuauuaccaacgaucaaaagaaacuuauguccaauaacgugcagaucgugagacagcagucuuacagcauuaugugcaucauuaaggaggaaguccuggccuaugugguucaacucccccuguacggggugaucgacacaccuuguuggaaacugcauacgagcccccucugcaccacaaauaccaaggagggauccaacaucugucugacacggaccgaucgcggcugguacugcgacaaugcugggucugucuccuucuuuccucaggccgaaacguguaaggugcagagcaacagaguuuucugcgauacaaugaacucucuuacccugccgagcgaggugaaucucugcaaugucgacauuuuuaaccccaaauaugauuguaagaucaugaccuccaaaacagacgugucuagcuccgucauuaccagccugggagcgaucgugucuugcuacggcaagacaaaauguacggccuccaauaagaaccgggggauuaucaagaccuucagcaauggaugcgauuauguuucuaacaaaggcguggacacagucuccgugggcaauacccuuuacuguguuaacaagcaagaggggcagagccuguaugugaaaggagaaccuaucauuaacuuuuacgacccccucgucuucccuuccgaugaguuugacgcuucuaucagccaggugaaugaaaagauuaaccagucccuggccuucauccgcaaaucugaugagcugcuccacaaugugaacgcuggcaagagcacaaccaauauuaugaucacgaccauuaucaucguuauuaucgucauucugcuuucccugaucgccguggggcuccugcuguauugcaaggccagaagcacacccgugacccuuucuaaagaccaacucuccggaauuaacaauaucgcuuucagcaacugaggacuaguaauaaggaaacuguaugaaugucugugggcaggaagugaagagauccuucuguaaagguuuuuggaauuaugucugcugaauaauaaacuuuuuugaaauaauaaaucugguagaaaaaugagaucuaaaaaaaaaaaaaaaaaaaaaaaaaaaaaaaaaaaaaaaaaaaaaaaaaaaaaaaaaaaaaaaaugcaucccccccccccccccccccccccccccccccaaaggcucuuuucagagccaccagaauu

SEQ ID NO: 1907 - RNA, 1967 nt, Artificial Sequence
  mRNA product Design g-2 comprising derived and/or modified sequence from HRSV(A2)__F_DSCav1_mut1 (opt6)
gggagaguccgcucagccagguugcagaagcggcuuagcguguguccuaaucuucucucugcguguagguaggccugugccgcaaacaagcuuaccauggaacuauuaauacuaaaagcaaacgcuauaacaacaauacuaacagcagucacauucugcuuugcaucaggccaaaacaucacagaagaauuuuaccaaucaacaugcuccgccguaucgaaaggauaccuaggcgcauuaagaaccggaugguauacaucagucauaacaauugaacuaucuaacauaaaagaaaacaaauguaacggcacagaugccaaaguaaaacucaucaaacaagaauuagauaaauacaaaaacgcagucacugaacuacaacucuuaaugcaaucaacaccugcaacaggaucaggaucagcaauaugcucaggaguagccguauguaaaguacuacaccuagaaggagaagucaacaaaauaaaaucagcccuccuaaguacaaacaaagcugucguaucacuauccaaugguguuucaguacuaacuuucaaaguucuagaccuaaaaaacuacauagacaaacaacuacuaccaauacuaaauaaacaaaguuguucuauacccaacauagaaaccgucauagaauuucaacaaaaaaauaauagacuccuagaaauaacaagagaauuuucaguuaacgcagguguaacaaccccaguauccaccuauaugcuaacaaauucagaauuacuuucccuaaucaacgacaugcccauaacaaaugaccaaaaaaaauuaaugucaaacaacguccaaauaguucgucaacaaucauauucaauaaugugcauaauaaaagaagaagucuuagccuacguaguacaacuuccccuuuauggaguuaucgacacacccugcuggaaacuccacacuucaccacuauguacuacaaacacaaaagaaggauccaacaucugccucacaagaaccgaucgaggaugguacugugauaacgccggauccgucucauucuucccacaagcagaaacaugcaaaguacaaucaaacagaguauuuugcgacacaaugaacucccucacauuaccuucugaaguaaaccuauguaauguagacauauucaaccccaaauacgauugcaaaauaaugacaucaaagacagauguaucaucaagugucaucacaucccuaggagcaauugucucauguuaugguaaaacaaaaugcaccgcaucaaauaaaaacagaggcauaauaaaaaccuucucaaacgguugugacuacguauccaauaaaggcgucgacacaguaucaguagguaacacauuauauuguguaaacaaacaagaaggacagucccuauauguaaaaggagaaccaauaaucaacuucuacgacccacuuguuuucccuucugaugaauuugacgcaaguauaucacaaguaaaugaaaaaaucaaucaaucacuagccuuuauaagaaaaucagaugaauuauuacacaacguaaacgccggaaaaucaacaaccaacauaaugauaaccacaauaauaaucgucauaauagucauccuacuaucacucauagcaguuggacuccuacuauacugcaaagcacgaucaacaccaguaacauuauccaaagaccaacuaagugguaucaauaacaucgccuuuucaaacugaggacuaguaauaaggaaacuguaugaaugucugugggcaggaagugaagagauccuucuguaaagguuuuuggaauuaugucugcugaauaauaaacuuuuuugaaauaauaaaucugguagaaaaaugagaucuaaaaaaaaaaaaaaaaaaaaaaaaaaaaaaaaaaaaaaaaaaaaaaaaaaaaaaaaaaaaaaaaugcaucccccccccccccccccccccccccccccccaaaggcucuuuucagagccaccagaauu

SEQ ID NO: 1908 - RNA, 1967 nt, Artificial Sequence
  mRNA product Design g-2 comprising derived and/or modified sequence from HRSV(A2)__F_DSCav1_mut1 (opt11)
gggagaguccgcucagccagguugcagaagcggcuuagcguguguccuaaucuucucucugcguguagguaggccugugccgcaaacaagcuuaccauggaacuccuaauccucaaagccaacgcaaucaccacaauccucacugccgucaccuucugcuucgccuccggccaaaacauaacagaagaauuuuaccaaucaaccuguucagcggucuccaaaggcuaccucggcgcccuccgcaccggcugguacaccuccgugaucaccauagaacucuccaacaucaaggaaaacaaaugcaacggcaccgacgcgaaggucaaacuuauuaaacaagaacucgacaaauacaaaaacgcagucaccgaacuacaacuccuaaugcaguccacgccagccaccggcucuggcucagccauaugcuccgguguggccguaugcaaaguccuacaccucgaaggagaagucaacaaaauaaaauccgcccuacuguccacaaacaaggccguagucucccucucaaacggcgucucaguacucaccuucaaaguccuagaccucaagaacuacaucgacaaacaacuccuacccauacuaaacaaacaauccugcucaauccccaacaucgaaaccguaauagaauuucaacaaaaaaacaacagacuccuggagaucacccgggaauuuuccguaaacgccggagucacaacacccgucucaaccuacaugcuaacgaacucagagcuccucucacuuaucaacgacaugcccauaacaaacgaccaaaaaaaacucauguccaacaacgugcaaaucguccgacaacaauccuacuccaucaugugcaucauuaaagaagaaguccucgcauacguaguccagcucccccucuacggcgucauagacacccccugcuggaaacuacacacaucaccccucugcacaacaaacaccaaagaaggcuccaacaucugccucacccgcaccgaccgaggcugguacugcgauaacgccggcagcgucuccuucuucccccaagcagaaaccugcaagguccaauccaaccgaguuuucugcgacacuaugaacucgcucacccuccccuccgaagucaaccucugcaacgucgacauuuucaaccccaaauacgacugcaaaaucaugaccuccaagaccgacguauccuccuccgucaucaccucccuaggcgccauaguaaguugcuacggcaaaaccaagugcacagcaagcaacaaaaaccgaggaauaaucaaaaccuucuccaacggcugcgacuacguauccaacaagggcgucgacaccguauccguagggaacacccuuuacugcguaaacaaacaagaaggacaaucacucuacguaaaaggcgaacccauaaucaacuucuacgacccccucguauuucccuccgacgaauuugacgcaucaaucucacaggucaacgaaaaaauaaaccaaucgcuagcauucaucagaaaaucagacgaacuccuacacaacgucaacgcaggcaagagcaccaccaacaucaugaucaccaccaucaucaucgucauaaucgucauacuacucucacucauagcagucggccuccuccuauacuguaaagcaaggucgaccccagucacccuauccaaagaccaacuaagcggcaucaacaacaucgcguucucaaacuaaggacuaguaauaaggaaacuguaugaaugucugugggcaggaagugaagagauccuucuguaaagguuuuuggaauuaugucugcugaauaauaaacuuuuuugaaauaauaaaucugguagaaaaaugagaucuaaaaaaaaaaaaaaaaaaaaaaaaaaaaaaaaaaaaaaaaaaaaaaaaaaaaaaaaaaaaaaaaugcaucccccccccccccccccccccccccccccccaaaggcucuuuucagagccaccagaauu

SEQ ID NO: 1909 - RNA, 2199 nt, Artificial Sequence
  mRNA product Design g-3 comprising derived and/or modified sequence from HRSV(A2)__F_DSCav1_mut1 (opt1)
gggagaguccgcucagccagguugcagaagcggcuuagcguguguccuaaucuucucucugcguguagguaggccugugccgcaaacaagcuuaccauggagcugcucauccugaaggccaacgccaucaccaccauccugacggcggugaccuucugcuucgccagcggccagaacaucaccgaggaguucuaccaguccacgugcagcgccgucuccaagggguaccucggcgcccugcggaccggcugguacaccuccgugaucaccaucgagcugagcaacaucaaggagaacaagugcaacgggaccgacgccaaggugaagcucaucaagcaggagcuggacaaguacaagaacgcggucacggagcugcagcuccugaugcaguccaccccggcaaccggcuccggcuccgccaucugcagcggcgucgccgugugcaaggugcugcaccucgagggggaggucaacaagaucaagagcgcccugcuguccaccaacaaggccguggugagccucuccaacggcgucagcgugcugaccuucaaggugcuggaccucaagaacuacaucgacaagcagcugcugcccauccugaacaagcagagcugcuccauccccaacaucgagacggugaucgaguuccagcagaagaacaaccggcuccuggagaucacccgcgaguucagcgugaacgccggggucaccacccccguguccacguacaugcugaccaacagcgagcuccugucccugaucaacgacaugccgaucaccaacgaccagaagaagcucaugagcaacaacgugcagaucguccggcagcaguccuacagcaucaugugcaucaucaaggaggaggugcuggcguacgugguccagcugccccucuacggcgugaucgacacccccugcuggaagcugcacacgagcccccugugcaccaccaacaccaaggagggguccaacaucugccucacgcgcaccgaccggggcugguacugcgacaacgccggcagcgucuccuucuucccgcaggccgagaccugcaaggugcagagcaaccgcguguucugcgacaccaugaacucccugacgcugcccagcgagguaaaccucugcaacgucgacaucuucaaccccaaguacgacugcaagaucaugaccuccaagaccgacgugagcuccagcgugaucaccucccugggggccaucgucagcugcuacggcaagacgaagugcaccgccagcaacaagaaccgggggaucaucaagaccuucuccaacggcugcgacuacgugagcaacaagggcguggacaccguguccgucgggaacacccuguacugcgugaacaagcaggagggccagagccucuacgugaagggggagcccaucaucaacuucuacgacccgcuggucuuccccuccgacgaguucgacgcgagcaucucccaggugaacgagaagaucaaccagagccuggccuucauccgcaaguccgacgagcugcuccacaacgugaacgccggcaagagcacgaccaacaucaugaucaccaccaucaucaucgucaucaucgugauccugcugucccucaucgccguggggcugcugcucuacugcaaggcccggagcacgcccgucacccuguccaaggaccagcugagcggcaucaacaacaucgcguucuccaacugaggacuagugaagggaacacccaaauuuaauucagccuuaagcacaauuaauuaagagugaaacguaauuguacaagcaguuggucacccaccauagggcaugaucaacaccgcaaccuuuccuuuuucccccagugauucugaaaaaccccucuucccuucagcuugcuuagauguuccaaauuuaguaagcuuaaggcggccuacagaagaaaaagaaaaaaaaggccacaaaaguucccucucacuuucaguaaauaaaauaaaagcagcaacagaaauaaagaaauaaaugaaauucaaaaugaaauaaauauuguguugugcagcauuaaaaaaucaauaaaaauuaaaaaugagcaagaucuaaaaaaaaaaaaaaaaaaaaaaaaaaaaaaaaaaaaaaaaaaaaaaaaaaaaaaaaaaaaaaaaugcaucccccccccccccccccccccccccccccccaaaggcucuuuucagagccaccagaauu

SEQ ID NO: 1910 - RNA, 2199 nt, Artificial Sequence
  mRNA product Design g-3 comprising derived and/or modified sequence from HRSV(A2)__F_DSCav1_mut1 (opt1)
gggagaguccgcucagccagguugcagaagcggcuuagcguguguccuaaucuucucucugcguguagguaggccugugccgcaaacaagcuuaccauggagcugcucauccugaaggccaacgccaucaccaccauccugacggcggugaccuucugcuucgccagcggccagaacaucaccgaggaguucuaccaguccacgugcagcgccgucuccaagggguaccucggcgcccugcgcaccgggugguacaccagcgugaucaccaucgagcuguccaacaucaaggagaacaagugcaacggcaccgacgccaaggugaagcucaucaagcaggagcuggacaaguacaagaacgcggucacggagcugcagcuccugaugcagagcacccccgccaccggguccggcagcgccaucugcuccggcguggccgugugcaagguccugcaccucgagggggaggugaacaagaucaagagcgcgcugcuguccaccaacaaggccguggucagccucuccaacggcgugagcgugcugacguucaagguccuggaccucaagaacuacaucgacaagcagcugcugccgauccucaacaagcaguccugcagcauccccaacaucgagaccgugaucgaguuccagcagaagaacaaccggcugcuggagaucacccgcgaguucuccgugaacgccggggucaccacgcccgugagcaccuacaugcucaccaacuccgagcugcugagccucaucaacgacaugcccaucaccaacgaccagaagaagcugaugagcaacaacgugcagaucguccggcagcaguccuacagcaucaugugcaucaucaaggaggaggugcuggccuacgugguccagcucccgcuguacggcgugaucgacacgcccugcuggaagcugcacaccagcccccucugcaccaccaacacgaaggagggguccaacaucugccugacccgcaccgaccggggcugguacugcgacaacgccggcuccgugagcuucuucccccaggcggagaccugcaagguccaguccaaccgcguguucugcgacacgaugaacagccugacccucccguccgaggucaaccugugcaacguggacaucuucaaccccaaguacgacugcaagaucaugaccagcaagaccgacguguccagcuccgucaucacgagccugggggccaucguguccugcuacggcaagaccaagugcaccgccagcaacaagaaccgggggaucaucaagaccuucuccaacggcugcgacuacgugagcaacaagggcgucgacacgguguccguggggaacacccucuacugcgucaacaagcaggagggccagagccuguacgugaagggggagcccaucaucaacuucuacgacccccugguguucccgagcgacgaguucgacgccuccaucagccaggucaacgagaagaucaaccagucccucgccuucauccgcaagagcgacgagcugcugcacaacgugaacgcgggcaaguccaccaccaacaucaugaucaccacgaucaucaucgugaucaucgucauccuccugagccugaucgccguggggcuccugcuguacugcaaggcccgguccacccccgugacccugagcaaggaccagcucuccggcaucaacaacaucgccuucagcaacugaggacuagugaagggaacacccaaauuuaauucagccuuaagcacaauuaauuaagagugaaacguaauuguacaagcaguuggucacccaccauagggcaugaucaacaccgcaaccuuuccuuuuucccccagugauucugaaaaaccccucuucccuucagcuugcuuagauguuccaaauuuaguaagcuuaaggcggccuacagaagaaaaagaaaaaaaaggccacaaaaguucccucucacuuucaguaaauaaaauaaaagcagcaacagaaauaaagaaauaaaugaaauucaaaaugaaauaaauauuguguugugcagcauuaaaaaaucaauaaaaauuaaaaaugagcaagaucuaaaaaaaaaaaaaaaaaaaaaaaaaaaaaaaaaaaaaaaaaaaaaaaaaaaaaaaaaaaaaaaaugcaucccccccccccccccccccccccccccccccaaaggcucuuuucagagccaccagaauu

SEQ ID NO: 1911 - RNA, 2199 nt, Artificial Sequence
  mRNA product Design g-3 comprising derived and/or modified sequence from HRSV(A2)__F_DSCav1_mut1 (opt2)
gggagaguccgcucagccagguugcagaagcggcuuagcguguguccuaaucuucucucugcguguagguaggccugugccgcaaacaagcuuaccauggagcuccucauccucaaggccaacgccaucaccaccauccucaccgccgucaccuucugcuucgccuccggccagaacaucaccgaggaguucuaccaguccaccugcuccgccgucuccaagggcuaccucggcgcccuccgcaccggcugguacaccuccgucaucaccaucgagcucuccaacaucaaggagaacaagugcaacggcaccgacgccaaggucaagcucaucaagcaggagcucgacaaguacaagaacgccgucaccgagcuccagcuccucaugcaguccacccccgccaccggcuccggcuccgccaucugcuccggcgucgccgucugcaagguccuccaccucgagggcgaggucaacaagaucaaguccgcccuccucuccaccaacaaggccgucgucucccucuccaacggcgucuccguccucaccuucaagguccucgaccucaagaacuacaucgacaagcagcuccuccccauccucaacaagcaguccugcuccauccccaacaucgagaccgucaucgaguuccagcagaagaacaaccgccuccucgagaucacccgcgaguucuccgucaacgccggcgucaccacccccgucuccaccuacaugcucaccaacuccgagcuccucucccucaucaacgacaugcccaucaccaacgaccagaagaagcucauguccaacaacguccagaucguccgccagcaguccuacuccaucaugugcaucaucaaggaggagguccucgccuacgucguccagcucccccucuacggcgucaucgacacccccugcuggaagcuccacaccuccccccucugcaccaccaacaccaaggagggcuccaacaucugccucacccgcaccgaccgcggcugguacugcgacaacgccggcuccgucuccuucuucccccaggccgagaccugcaagguccaguccaaccgcgucuucugcgacaccaugaacucccucacccuccccuccgaggucaaccucugcaacgucgacaucuucaaccccaaguacgacugcaagaucaugaccuccaagaccgacgucuccuccuccgucaucaccucccucggcgccaucgucuccugcuacggcaagaccaagugcaccgccuccaacaagaaccgcggcaucaucaagaccuucuccaacggcugcgacuacgucuccaacaagggcgucgacaccgucuccgucggcaacacccucuacugcgucaacaagcaggagggccagucccucuacgucaagggcgagcccaucaucaacuucuacgacccccucgucuuccccuccgacgaguucgacgccuccaucucccaggucaacgagaagaucaaccagucccucgccuucauccgcaaguccgacgagcuccuccacaacgucaacgccggcaaguccaccaccaacaucaugaucaccaccaucaucaucgucaucaucgucauccuccucucccucaucgccgucggccuccuccucuacugcaaggcccgcuccacccccgucacccucuccaaggaccagcucuccggcaucaacaacaucgccuucuccaacugaggacuagugaagggaacacccaaauuuaauucagccuuaagcacaauuaauuaagagugaaacguaauuguacaagcaguuggucacccaccauagggcaugaucaacaccgcaaccuuuccuuuuucccccagugauucugaaaaaccccucuucccuucagcuugcuuagauguuccaaauuuaguaagcuuaaggcggccuacagaagaaaaagaaaaaaaaggccacaaaaguucccucucacuuucaguaaauaaaauaaaagcagcaacagaaauaaagaaauaaaugaaauucaaaaugaaauaaauauuguguugugcagcauuaaaaaaucaauaaaaauuaaaaaugagcaagaucuaaaaaaaaaaaaaaaaaaaaaaaaaaaaaaaaaaaaaaaaaaaaaaaaaaaaaaaaaaaaaaaaugcaucccccccccccccccccccccccccccccccaaaggcucuuuucagagccaccagaauu

SEQ ID NO: 1912 - RNA, 2199 nt, Artificial Sequence
  mRNA product Design g-3 comprising derived and/or modified sequence from HRSV(A2)__F_DSCav1_mut1 (opt3)
gggagaguccgcucagccagguugcagaagcggcuuagcguguguccuaaucuucucucugcguguagguaggccugugccgcaaacaagcuuaccauggagcugcucauccuuaaggccaacgcuauuaccacaauacugacugcagugacguucugcuuugccagcggccagaauaucaccgaagaguucuaccaauccacauguucugcggucucaaaaggguauuugggagcuuuaagaacugguugguacaccaguguuauuacaaucgaacugagcaacauuaaggagaauaaaugcaacggcaccgacgccaaggugaaacuaaucaagcaggaacucgauaaguauaaaaaugcaguaacugagcugcagcuucugaugcaguccacacccgccaccgggucuggaucggcuauauguucaggcguggcagucugcaagguguugcaccucgagggugaaguuaacaaaaucaagagcgcccugcugaguacgaauaaagcuguggucucccucucuaacggggugagcguauuaacuuuuaagguucuggaccuuaagaauuacauugauaaacaauugcugccuauccuaaacaagcaguccuguucaauuccaaauaucgagaccgugauagaguuccagcagaaaaacaauaggcuccuggaaauuacacgggaguuuagugucaacgccggagugacuaccccggugagcacauauaugcuuaccaauucugaacuguugucccucaucaacgacaugcccauuacgaacgaucaaaagaaacugaugucaaauaacguccagaucguucgccagcagagcuacaguaucaugugcauuauaaaggaggaaguguuagcguauguagugcaacugccucucuacggcgucaucgacacuccauguuggaaacuucauacaucuccccugugcaccacuaauacaaaggagggcuccaacauuuguuugacccgaacggaucgugggugguacugcgacaaugcaggaagcgugucguucuuuccucaggccgaaaccuguaagguucagucuaacagaguguucugcgauacaaugaacucccuaacucugccaucagaggucaaucucugcaauguggacaucuuuaaccccaaauaugauuguaagauaaugaccaguaaaacagacguaagcuccucuguuauuacuagccugggugcuaucgugucaugcuacggcaagaccaaauguacagccaguaauaagaacagggggaucauuaagaccuucuccaauggaugcgauuaugucagcaacaaaggcguggacacugucucuguggguaauacgcuuuacuguguuaacaagcaagaggggcagucacuguaugugaaaggagaaccuaucauuaacuuuuacgacccauugguauucccgagugaugaguuugacgcaagcauaucccaggucaaugaaaagaucaaccagucucucgcuuucauucggaaaucggaugagcuguuacacaaugugaacgccggcaagagcacaaccaauaucaugaucacuaccauuauaaucguuauuaucgugauucugcuaucccucaucgcggucggccugcuuuuguauugcaaggcccgcucaacacccgugacccugaguaaagaccaacucucugggauaaacaauaucgcauucagcaacugaggacuagugaagggaacacccaaauuuaauucagccuuaagcacaauuaauuaagagugaaacguaauuguacaagcaguuggucacccaccauagggcaugaucaacaccgcaaccuuuccuuuuucccccagugauucugaaaaaccccucuucccuucagcuugcuuagauguuccaaauuuaguaagcuuaaggcggccuacagaagaaaaagaaaaaaaaggccacaaaaguucccucucacuuucaguaaauaaaauaaaagcagcaacagaaauaaagaaauaaaugaaauucaaaaugaaauaaauauuguguugugcagcauuaaaaaaucaauaaaaauuaaaaaugagcaagaucuaaaaaaaaaaaaaaaaaaaaaaaaaaaaaaaaaaaaaaaaaaaaaaaaaaaaaaaaaaaaaaaaugcaucccccccccccccccccccccccccccccccaaaggcucuuuucagagccaccagaauu

SEQ ID NO: 1913 - RNA, 2199 nt, Artificial Sequence
  mRNA product Design g-3 comprising derived and/or modified sequence from HRSV(A2)__F_DSCav1_mut1 (opt4)
gggagaguccgcucagccagguugcagaagcggcuuagcguguguccuaaucuucucucugcguguagguaggccugugccgcaaacaagcuuaccauggagcugcugauccugaaggccaacgccaucaccaccauccugaccgccgugaccuucugcuucgccagcggccagaacaucaccgaggaguucuaccagagcaccugcagcgccgugagcaagggcuaccugggcgcccugagaaccggcugguacaccagcgugaucaccaucgagcugagcaacaucaaggagaacaagugcaacggcaccgacgccaaggugaagcugaucaagcaggagcuggacaaguacaagaacgccgugaccgagcugcagcugcugaugcagagcacccccgccaccggcagcggcagcgccaucugcagcggcguggccgugugcaaggugcugcaccuggagggcgaggugaacaagaucaagagcgcccugcugagcaccaacaaggccguggugagccugagcaacggcgugagcgugcugaccuucaaggugcuggaccugaagaacuacaucgacaagcagcugcugcccauccugaacaagcagagcugcagcauccccaacaucgagaccgugaucgaguuccagcagaagaacaacagacugcuggagaucaccagagaguucagcgugaacgccggcgugaccacccccgugagcaccuacaugcugaccaacagcgagcugcugagccugaucaacgacaugcccaucaccaacgaccagaagaagcugaugagcaacaacgugcagaucgugagacagcagagcuacagcaucaugugcaucaucaaggaggaggugcuggccuacguggugcagcugccccuguacggcgugaucgacacccccugcuggaagcugcacaccagcccccugugcaccaccaacaccaaggagggcagcaacaucugccugaccagaaccgacagaggcugguacugcgacaacgccggcagcgugagcuucuucccccaggccgagaccugcaaggugcagagcaacagaguguucugcgacaccaugaacagccugacccugcccagcgaggugaaccugugcaacguggacaucuucaaccccaaguacgacugcaagaucaugaccagcaagaccgacgugagcagcagcgugaucaccagccugggcgccaucgugagcugcuacggcaagaccaagugcaccgccagcaacaagaacagaggcaucaucaagaccuucagcaacggcugcgacuacgugagcaacaagggcguggacaccgugagcgugggcaacacccuguacugcgugaacaagcaggagggccagagccuguacgugaagggcgagcccaucaucaacuucuacgacccccugguguuccccagcgacgaguucgacgccagcaucagccaggugaacgagaagaucaaccagagccuggccuucaucagaaagagcgacgagcugcugcacaacgugaacgccggcaagagcaccaccaacaucaugaucaccaccaucaucaucgugaucaucgugauccugcugagccugaucgccgugggccugcugcuguacugcaaggccagaagcacccccgugacccugagcaaggaccagcugagcggcaucaacaacaucgccuucagcaacugaggacuagugaagggaacacccaaauuuaauucagccuuaagcacaauuaauuaagagugaaacguaauuguacaagcaguuggucacccaccauagggcaugaucaacaccgcaaccuuuccuuuuucccccagugauucugaaaaaccccucuucccuucagcuugcuuagauguuccaaauuuaguaagcuuaaggcggccuacagaagaaaaagaaaaaaaaggccacaaaaguucccucucacuuucaguaaauaaaauaaaagcagcaacagaaauaaagaaauaaaugaaauucaaaaugaaauaaauauuguguugugcagcauuaaaaaaucaauaaaaauuaaaaaugagcaagaucuaaaaaaaaaaaaaaaaaaaaaaaaaaaaaaaaaaaaaaaaaaaaaaaaaaaaaaaaaaaaaaaaugcaucccccccccccccccccccccccccccccccaaaggcucuuuucagagccaccagaauu

SEQ ID NO: 1914 - RNA, 2199 nt, Artificial Sequence
  mRNA product Design g-3 comprising derived and/or modified sequence from HRSV(A2)__F_DSCav1_mut1 (opt5)
gggagaguccgcucagccagguugcagaagcggcuuagcguguguccuaaucuucucucugcguguagguaggccugugccgcaaacaagcuuaccauggagcugcucauccugaaggccaacgcuauuaccacaauccuuacggccgugaccuucugcuuugcgagcggccagaauauuacagaagaguucuaccaauccaccuguucugcugucagcaaaggguaucugggagcccucagaacaggcugguacaccuccguuaucacaauugaacugucuaacaucaaggagaauaaaugcaacgggaccgacgccaaggugaaacuuaucaagcaggaacuggauaaguauaaaaaugcugugacggagcuccagcugcugaugcagagcacccccgccacaggauccggcucugcuauuuguagcggggucgccgugugcaagguucuccaccuggagggagaagugaacaaaaucaaguccgcgcuucugagcaccaauaaagccgucgugucucucuccaacggcguuagcgugcugacauuuaagguccuugaccugaagaauuacauugauaaacaacuccugccuauccugaacaagcagucuuguuccauuccgaauaucgagaccgugauugaguuccagcagaaaaacaaucggcuccuggaaaucacgcgcgaguuuagcgugaacgcuggcgucacaacccccguuucuacauauaugcuuaccaauuccgaacugcucagccugaucaacgacaugccuauuaccaacgaucaaaagaaacuuauguccaauaacgugcagaucgugagacagcagucuuacagcauuaugugcaucauuaaggaggaaguccuggccuaugugguucaacucccccuguacggggugaucgacacaccuuguuggaaacugcauacgagcccccucugcaccacaaauaccaaggagggauccaacaucugucugacacggaccgaucgcggcugguacugcgacaaugcugggucugucuccuucuuuccucaggccgaaacguguaaggugcagagcaacagaguuuucugcgauacaaugaacucucuuacccugccgagcgaggugaaucucugcaaugucgacauuuuuaaccccaaauaugauuguaagaucaugaccuccaaaacagacgugucuagcuccgucauuaccagccugggagcgaucgugucuugcuacggcaagacaaaauguacggccuccaauaagaaccgggggauuaucaagaccuucagcaauggaugcgauuauguuucuaacaaaggcguggacacagucuccgugggcaauacccuuuacuguguuaacaagcaagaggggcagagccuguaugugaaaggagaaccuaucauuaacuuuuacgacccccucgucuucccuuccgaugaguuugacgcuucuaucagccaggugaaugaaaagauuaaccagucccuggccuucauccgcaaaucugaugagcugcuccacaaugugaacgcuggcaagagcacaaccaauauuaugaucacgaccauuaucaucguuauuaucgucauucugcuuucccugaucgccguggggcuccugcuguauugcaaggccagaagcacacccgugacccuuucuaaagaccaacucuccggaauuaacaauaucgcuuucagcaacugaggacuagugaagggaacacccaaauuuaauucagccuuaagcacaauuaauuaagagugaaacguaauuguacaagcaguuggucacccaccauagggcaugaucaacaccgcaaccuuuccuuuuucccccagugauucugaaaaaccccucuucccuucagcuugcuuagauguuccaaauuuaguaagcuuaaggcggccuacagaagaaaaagaaaaaaaaggccacaaaaguucccucucacuuucaguaaauaaaauaaaagcagcaacagaaauaaagaaauaaaugaaauucaaaaugaaauaaauauuguguugugcagcauuaaaaaaucaauaaaaauuaaaaaugagcaagaucuaaaaaaaaaaaaaaaaaaaaaaaaaaaaaaaaaaaaaaaaaaaaaaaaaaaaaaaaaaaaaaaaugcaucccccccccccccccccccccccccccccccaaaggcucuuuucagagccaccagaauu

SEQ ID NO: 1915 - RNA, 2199 nt, Artificial Sequence
  mRNA product Design g-3 comprising derived and/or modified sequence from HRSV(A2)__F_DSCav1_mut1 (opt6)
gggagaguccgcucagccagguugcagaagcggcuuagcguguguccuaaucuucucucugcguguagguaggccugugccgcaaacaagcuuaccauggaacuauuaauacuaaaagcaaacgcuauaacaacaauacuaacagcagucacauucugcuuugcaucaggccaaaacaucacagaagaauuuuaccaaucaacaugcuccgccguaucgaaaggauaccuaggcgcauuaagaaccggaugguauacaucagucauaacaauugaacuaucuaacauaaaagaaaacaaauguaacggcacagaugccaaaguaaaacucaucaaacaagaauuagauaaauacaaaaacgcagucacugaacuacaacucuuaaugcaaucaacaccugcaacaggaucaggaucagcaauaugcucaggaguagccguauguaaaguacuacaccuagaaggagaagucaacaaaauaaaaucagcccuccuaaguacaaacaaagcugucguaucacuauccaaugguguuucaguacuaacuuucaaaguucuagaccuaaaaaacuacauagacaaacaacuacuaccaauacuaaauaaacaaaguuguucuauacccaacauagaaaccgucauagaauuucaacaaaaaaauaauagacuccuagaaauaacaagagaauuuucaguuaacgcagguguaacaaccccaguauccaccuauaugcuaacaaauucagaauuacuuucccuaaucaacgacaugcccauaacaaaugaccaaaaaaaauuaaugucaaacaacguccaaauaguucgucaacaaucauauucaauaaugugcauaauaaaagaagaagucuuagccuacguaguacaacuuccccuuuauggaguuaucgacacacccugcuggaaacuccacacuucaccacuauguacuacaaacacaaaagaaggauccaacaucugccucacaagaaccgaucgaggaugguacugugauaacgccggauccgucucauucuucccacaagcagaaacaugcaaaguacaaucaaacagaguauuuugcgacacaaugaacucccucacauuaccuucugaaguaaaccuauguaauguagacauauucaaccccaaauacgauugcaaaauaaugacaucaaagacagauguaucaucaagugucaucacaucccuaggagcaauugucucauguuaugguaaaacaaaaugcaccgcaucaaauaaaaacagaggcauaauaaaaaccuucucaaacgguugugacuacguauccaauaaaggcgucgacacaguaucaguagguaacacauuauauuguguaaacaaacaagaaggacagucccuauauguaaaaggagaaccaauaaucaacuucuacgacccacuuguuuucccuucugaugaauuugacgcaaguauaucacaaguaaaugaaaaaaucaaucaaucacuagccuuuauaagaaaaucagaugaauuauuacacaacguaaacgccggaaaaucaacaaccaacauaaugauaaccacaauaauaaucgucauaauagucauccuacuaucacucauagcaguuggacuccuacuauacugcaaagcacgaucaacaccaguaacauuauccaaagaccaacuaagugguaucaauaacaucgccuuuucaaacugaggacuagugaagggaacacccaaauuuaauucagccuuaagcacaauuaauuaagagugaaacguaauuguacaagcaguuggucacccaccauagggcaugaucaacaccgcaaccuuuccuuuuucccccagugauucugaaaaaccccucuucccuucagcuugcuuagauguuccaaauuuaguaagcuuaaggcggccuacagaagaaaaagaaaaaaaaggccacaaaaguucccucucacuuucaguaaauaaaauaaaagcagcaacagaaauaaagaaauaaaugaaauucaaaaugaaauaaauauuguguugugcagcauuaaaaaaucaauaaaaauuaaaaaugagcaagaucuaaaaaaaaaaaaaaaaaaaaaaaaaaaaaaaaaaaaaaaaaaaaaaaaaaaaaaaaaaaaaaaaugcaucccccccccccccccccccccccccccccccaaaggcucuuuucagagccaccagaauu

SEQ ID NO: 1916 - RNA, 2199 nt, Artificial Sequence
  mRNA product Design g-3 comprising derived and/or modified sequence from HRSV(A2)__F_DSCav1_mut1 (opt11)
gggagaguccgcucagccagguugcagaagcggcuuagcguguguccuaaucuucucucugcguguagguaggccugugccgcaaacaagcuuaccauggaacuccuaauccucaaagccaacgcaaucaccacaauccucacugccgucaccuucugcuucgccuccggccaaaacauaacagaagaauuuuaccaaucaaccuguucagcggucuccaaaggcuaccucggcgcccuccgcaccggcugguacaccuccgugaucaccauagaacucuccaacaucaaggaaaacaaaugcaacggcaccgacgcgaaggucaaacuuauuaaacaagaacucgacaaauacaaaaacgcagucaccgaacuacaacuccuaaugcaguccacgccagccaccggcucuggcucagccauaugcuccgguguggccguaugcaaaguccuacaccucgaaggagaagucaacaaaauaaaauccgcccuacuguccacaaacaaggccguagucucccucucaaacggcgucucaguacucaccuucaaaguccuagaccucaagaacuacaucgacaaacaacuccuacccauacuaaacaaacaauccugcucaauccccaacaucgaaaccguaauagaauuucaacaaaaaaacaacagacuccuggagaucacccgggaauuuuccguaaacgccggagucacaacacccgucucaaccuacaugcuaacgaacucagagcuccucucacuuaucaacgacaugcccauaacaaacgaccaaaaaaaacucauguccaacaacgugcaaaucguccgacaacaauccuacuccaucaugugcaucauuaaagaagaaguccucgcauacguaguccagcucccccucuacggcgucauagacacccccugcuggaaacuacacacaucaccccucugcacaacaaacaccaaagaaggcuccaacaucugccucacccgcaccgaccgaggcugguacugcgauaacgccggcagcgucuccuucuucccccaagcagaaaccugcaagguccaauccaaccgaguuuucugcgacacuaugaacucgcucacccuccccuccgaagucaaccucugcaacgucgacauuuucaaccccaaauacgacugcaaaaucaugaccuccaagaccgacguauccuccuccgucaucaccucccuaggcgccauaguaaguugcuacggcaaaaccaagugcacagcaagcaacaaaaaccgaggaauaaucaaaaccuucuccaacggcugcgacuacguauccaacaagggcgucgacaccguauccguagggaacacccuuuacugcguaaacaaacaagaaggacaaucacucuacguaaaaggcgaacccauaaucaacuucuacgacccccucguauuucccuccgacgaauuugacgcaucaaucucacaggucaacgaaaaaauaaaccaaucgcuagcauucaucagaaaaucagacgaacuccuacacaacgucaacgcaggcaagagcaccaccaacaucaugaucaccaccaucaucaucgucauaaucgucauacuacucucacucauagcagucggccuccuccuauacuguaaagcaaggucgaccccagucacccuauccaaagaccaacuaagcggcaucaacaacaucgcguucucaaacuaaggacuagugaagggaacacccaaauuuaauucagccuuaagcacaauuaauuaagagugaaacguaauuguacaagcaguuggucacccaccauagggcaugaucaacaccgcaaccuuuccuuuuucccccagugauucugaaaaaccccucuucccuucagcuugcuuagauguuccaaauuuaguaagcuuaaggcggccuacagaagaaaaagaaaaaaaaggccacaaaaguucccucucacuuucaguaaauaaaauaaaagcagcaacagaaauaaagaaauaaaugaaauucaaaaugaaauaaauauuguguugugcagcauuaaaaaaucaauaaaaauuaaaaaugagcaagaucuaaaaaaaaaaaaaaaaaaaaaaaaaaaaaaaaaaaaaaaaaaaaaaaaaaaaaaaaaaaaaaaaugcaucccccccccccccccccccccccccccccccaaaggcucuuuucagagccaccagaauu

SEQ ID NO: 1917 - RNA, 1994 nt, Artificial Sequence
  mRNA product Design g-4 comprising derived and/or modified sequence from HRSV(A2)__F_DSCav1_mut1 (opt1)
gggagacuccugucgggcggaaguaggaggaguagaguuuaaaaacaguacucuuuuuccgguucgggacguaguugaagcaacgacaagccggauaaccgcucuugagacaggaagcuuaccauggagcugcucauccugaaggccaacgccaucaccaccauccugacggcggugaccuucugcuucgccagcggccagaacaucaccgaggaguucuaccaguccacgugcagcgccgucuccaagggguaccucggcgcccugcggaccggcugguacaccuccgugaucaccaucgagcugagcaacaucaaggagaacaagugcaacgggaccgacgccaaggugaagcucaucaagcaggagcuggacaaguacaagaacgcggucacggagcugcagcuccugaugcaguccaccccggcaaccggcuccggcuccgccaucugcagcggcgucgccgugugcaaggugcugcaccucgagggggaggucaacaagaucaagagcgcccugcuguccaccaacaaggccguggugagccucuccaacggcgucagcgugcugaccuucaaggugcuggaccucaagaacuacaucgacaagcagcugcugcccauccugaacaagcagagcugcuccauccccaacaucgagacggugaucgaguuccagcagaagaacaaccggcuccuggagaucacccgcgaguucagcgugaacgccggggucaccacccccguguccacguacaugcugaccaacagcgagcuccugucccugaucaacgacaugccgaucaccaacgaccagaagaagcucaugagcaacaacgugcagaucguccggcagcaguccuacagcaucaugugcaucaucaaggaggaggugcuggcguacgugguccagcugccccucuacggcgugaucgacacccccugcuggaagcugcacacgagcccccugugcaccaccaacaccaaggagggguccaacaucugccucacgcgcaccgaccggggcugguacugcgacaacgccggcagcgucuccuucuucccgcaggccgagaccugcaaggugcagagcaaccgcguguucugcgacaccaugaacucccugacgcugcccagcgagguaaaccucugcaacgucgacaucuucaaccccaaguacgacugcaagaucaugaccuccaagaccgacgugagcuccagcgugaucaccucccugggggccaucgucagcugcuacggcaagacgaagugcaccgccagcaacaagaaccgggggaucaucaagaccuucuccaacggcugcgacuacgugagcaacaagggcguggacaccguguccgucgggaacacccuguacugcgugaacaagcaggagggccagagccucuacgugaagggggagcccaucaucaacuucuacgacccgcuggucuuccccuccgacgaguucgacgcgagcaucucccaggugaacgagaagaucaaccagagccuggccuucauccgcaaguccgacgagcugcuccacaacgugaacgccggcaagagcacgaccaacaucaugaucaccaccaucaucaucgucaucaucgugauccugcugucccucaucgccguggggcugcugcucuacugcaaggcccggagcacgcccgucacccuguccaaggaccagcugagcggcaucaacaacaucgcguucuccaacugaggacuaguaauaaggaaacuguaugaaugucugugggcaggaagugaagagauccuucuguaaagguuuuuggaauuaugucugcugaauaauaaacuuuuuugaaauaauaaaucugguagaaaaaugagaucuaaaaaaaaaaaaaaaaaaaaaaaaaaaaaaaaaaaaaaaaaaaaaaaaaaaaaaaaaaaaaaaaugcaucccccccccccccccccccccccccccccccaaaggcucuuuucagagccaccagaauu

SEQ ID NO: 1918 - RNA, 1994 nt, Artificial Sequence
  mRNA product Design g-4 comprising derived and/or modified sequence from HRSV(A2)__F_DSCav1_mut1 (opt1)
gggagacuccugucgggcggaaguaggaggaguagaguuuaaaaacaguacucuuuuuccgguucgggacguaguugaagcaacgacaagccggauaaccgcucuugagacaggaagcuuaccauggagcugcucauccugaaggccaacgccaucaccaccauccugacggcggugaccuucugcuucgccagcggccagaacaucaccgaggaguucuaccaguccacgugcagcgccgucuccaagggguaccucggcgcccugcgcaccgggugguacaccagcgugaucaccaucgagcuguccaacaucaaggagaacaagugcaacggcaccgacgccaaggugaagcucaucaagcaggagcuggacaaguacaagaacgcggucacggagcugcagcuccugaugcagagcacccccgccaccggguccggcagcgccaucugcuccggcguggccgugugcaagguccugcaccucgagggggaggugaacaagaucaagagcgcgcugcuguccaccaacaaggccguggucagccucuccaacggcgugagcgugcugacguucaagguccuggaccucaagaacuacaucgacaagcagcugcugccgauccucaacaagcaguccugcagcauccccaacaucgagaccgugaucgaguuccagcagaagaacaaccggcugcuggagaucacccgcgaguucuccgugaacgccggggucaccacgcccgugagcaccuacaugcucaccaacuccgagcugcugagccucaucaacgacaugcccaucaccaacgaccagaagaagcugaugagcaacaacgugcagaucguccggcagcaguccuacagcaucaugugcaucaucaaggaggaggugcuggccuacgugguccagcucccgcuguacggcgugaucgacacgcccugcuggaagcugcacaccagcccccucugcaccaccaacacgaaggagggguccaacaucugccugacccgcaccgaccggggcugguacugcgacaacgccggcuccgugagcuucuucccccaggcggagaccugcaagguccaguccaaccgcguguucugcgacacgaugaacagccugacccucccguccgaggucaaccugugcaacguggacaucuucaaccccaaguacgacugcaagaucaugaccagcaagaccgacguguccagcuccgucaucacgagccugggggccaucguguccugcuacggcaagaccaagugcaccgccagcaacaagaaccgggggaucaucaagaccuucuccaacggcugcgacuacgugagcaacaagggcgucgacacgguguccguggggaacacccucuacugcgucaacaagcaggagggccagagccuguacgugaagggggagcccaucaucaacuucuacgacccccugguguucccgagcgacgaguucgacgccuccaucagccaggucaacgagaagaucaaccagucccucgccuucauccgcaagagcgacgagcugcugcacaacgugaacgcgggcaaguccaccaccaacaucaugaucaccacgaucaucaucgugaucaucgucauccuccugagccugaucgccguggggcuccugcuguacugcaaggcccgguccacccccgugacccugagcaaggaccagcucuccggcaucaacaacaucgccuucagcaacugaggacuaguaauaaggaaacuguaugaaugucugugggcaggaagugaagagauccuucuguaaagguuuuuggaauuaugucugcugaauaauaaacuuuuuugaaauaauaaaucugguagaaaaaugagaucuaaaaaaaaaaaaaaaaaaaaaaaaaaaaaaaaaaaaaaaaaaaaaaaaaaaaaaaaaaaaaaaaugcaucccccccccccccccccccccccccccccccaaaggcucuuuucagagccaccagaauu

SEQ ID NO: 1919 - RNA, 1994 nt, Artificial Sequence
  mRNA product Design g-4 comprising derived and/or modified sequence from HRSV(A2)__F_DSCav1_mut1 (opt2)
gggagacuccugucgggcggaaguaggaggaguagaguuuaaaaacaguacucuuuuuccgguucgggacguaguugaagcaacgacaagccggauaaccgcucuugagacaggaagcuuaccauggagcuccucauccucaaggccaacgccaucaccaccauccucaccgccgucaccuucugcuucgccuccggccagaacaucaccgaggaguucuaccaguccaccugcuccgccgucuccaagggcuaccucggcgcccuccgcaccggcugguacaccuccgucaucaccaucgagcucuccaacaucaaggagaacaagugcaacggcaccgacgccaaggucaagcucaucaagcaggagcucgacaaguacaagaacgccgucaccgagcuccagcuccucaugcaguccacccccgccaccggcuccggcuccgccaucugcuccggcgucgccgucugcaagguccuccaccucgagggcgaggucaacaagaucaaguccgcccuccucuccaccaacaaggccgucgucucccucuccaacggcgucuccguccucaccuucaagguccucgaccucaagaacuacaucgacaagcagcuccuccccauccucaacaagcaguccugcuccauccccaacaucgagaccgucaucgaguuccagcagaagaacaaccgccuccucgagaucacccgcgaguucuccgucaacgccggcgucaccacccccgucuccaccuacaugcucaccaacuccgagcuccucucccucaucaacgacaugcccaucaccaacgaccagaagaagcucauguccaacaacguccagaucguccgccagcaguccuacuccaucaugugcaucaucaaggaggagguccucgccuacgucguccagcucccccucuacggcgucaucgacacccccugcuggaagcuccacaccuccccccucugcaccaccaacaccaaggagggcuccaacaucugccucacccgcaccgaccgcggcugguacugcgacaacgccggcuccgucuccuucuucccccaggccgagaccugcaagguccaguccaaccgcgucuucugcgacaccaugaacucccucacccuccccuccgaggucaaccucugcaacgucgacaucuucaaccccaaguacgacugcaagaucaugaccuccaagaccgacgucuccuccuccgucaucaccucccucggcgccaucgucuccugcuacggcaagaccaagugcaccgccuccaacaagaaccgcggcaucaucaagaccuucuccaacggcugcgacuacgucuccaacaagggcgucgacaccgucuccgucggcaacacccucuacugcgucaacaagcaggagggccagucccucuacgucaagggcgagcccaucaucaacuucuacgacccccucgucuuccccuccgacgaguucgacgccuccaucucccaggucaacgagaagaucaaccagucccucgccuucauccgcaaguccgacgagcuccuccacaacgucaacgccggcaaguccaccaccaacaucaugaucaccaccaucaucaucgucaucaucgucauccuccucucccucaucgccgucggccuccuccucuacugcaaggcccgcuccacccccgucacccucuccaaggaccagcucuccggcaucaacaacaucgccuucuccaacugaggacuaguaauaaggaaacuguaugaaugucugugggcaggaagugaagagauccuucuguaaagguuuuuggaauuaugucugcugaauaauaaacuuuuuugaaauaauaaaucugguagaaaaaugagaucuaaaaaaaaaaaaaaaaaaaaaaaaaaaaaaaaaaaaaaaaaaaaaaaaaaaaaaaaaaaaaaaaugcaucccccccccccccccccccccccccccccccaaaggcucuuuucagagccaccagaauu

SEQ ID NO: 1920 - RNA, 1994 nt, Artificial Sequence
  mRNA product Design g-4 comprising derived and/or modified sequence from HRSV(A2)__F_DSCav1_mut1 (opt3)
gggagacuccugucgggcggaaguaggaggaguagaguuuaaaaacaguacucuuuuuccgguucgggacguaguugaagcaacgacaagccggauaaccgcucuugagacaggaagcuuaccauggagcugcucauccuuaaggccaacgcuauuaccacaauacugacugcagugacguucugcuuugccagcggccagaauaucaccgaagaguucuaccaauccacauguucugcggucucaaaaggguauuugggagcuuuaagaacugguugguacaccaguguuauuacaaucgaacugagcaacauuaaggagaauaaaugcaacggcaccgacgccaaggugaaacuaaucaagcaggaacucgauaaguauaaaaaugcaguaacugagcugcagcuucugaugcaguccacacccgccaccgggucuggaucggcuauauguucaggcguggcagucugcaagguguugcaccucgagggugaaguuaacaaaaucaagagcgcccugcugaguacgaauaaagcuguggucucccucucuaacggggugagcguauuaacuuuuaagguucuggaccuuaagaauuacauugauaaacaauugcugccuauccuaaacaagcaguccuguucaauuccaaauaucgagaccgugauagaguuccagcagaaaaacaauaggcuccuggaaauuacacgggaguuuagugucaacgccggagugacuaccccggugagcacauauaugcuuaccaauucugaacuguugucccucaucaacgacaugcccauuacgaacgaucaaaagaaacugaugucaaauaacguccagaucguucgccagcagagcuacaguaucaugugcauuauaaaggaggaaguguuagcguauguagugcaacugccucucuacggcgucaucgacacuccauguuggaaacuucauacaucuccccugugcaccacuaauacaaaggagggcuccaacauuuguuugacccgaacggaucgugggugguacugcgacaaugcaggaagcgugucguucuuuccucaggccgaaaccuguaagguucagucuaacagaguguucugcgauacaaugaacucccuaacucugccaucagaggucaaucucugcaauguggacaucuuuaaccccaaauaugauuguaagauaaugaccaguaaaacagacguaagcuccucuguuauuacuagccugggugcuaucgugucaugcuacggcaagaccaaauguacagccaguaauaagaacagggggaucauuaagaccuucuccaauggaugcgauuaugucagcaacaaaggcguggacacugucucuguggguaauacgcuuuacuguguuaacaagcaagaggggcagucacuguaugugaaaggagaaccuaucauuaacuuuuacgacccauugguauucccgagugaugaguuugacgcaagcauaucccaggucaaugaaaagaucaaccagucucucgcuuucauucggaaaucggaugagcuguuacacaaugugaacgccggcaagagcacaaccaauaucaugaucacuaccauuauaaucguuauuaucgugauucugcuaucccucaucgcggucggccugcuuuuguauugcaaggcccgcucaacacccgugacccugaguaaagaccaacucucugggauaaacaauaucgcauucagcaacugaggacuaguaauaaggaaacuguaugaaugucugugggcaggaagugaagagauccuucuguaaagguuuuuggaauuaugucugcugaauaauaaacuuuuuugaaauaauaaaucugguagaaaaaugagaucuaaaaaaaaaaaaaaaaaaaaaaaaaaaaaaaaaaaaaaaaaaaaaaaaaaaaaaaaaaaaaaaaugcaucccccccccccccccccccccccccccccccaaaggcucuuuucagagccaccagaauu

SEQ ID NO: 1921 - RNA, 1994 nt, Artificial Sequence
  mRNA product Design g-4 comprising derived and/or modified sequence from HRSV(A2)__F_DSCav1_mut1 (opt4)
gggagacuccugucgggcggaaguaggaggaguagaguuuaaaaacaguacucuuuuuccgguucgggacguaguugaagcaacgacaagccggauaaccgcucuugagacaggaagcuuaccauggagcugcugauccugaaggccaacgccaucaccaccauccugaccgccgugaccuucugcuucgccagcggccagaacaucaccgaggaguucuaccagagcaccugcagcgccgugagcaagggcuaccugggcgcccugagaaccggcugguacaccagcgugaucaccaucgagcugagcaacaucaaggagaacaagugcaacggcaccgacgccaaggugaagcugaucaagcaggagcuggacaaguacaagaacgccgugaccgagcugcagcugcugaugcagagcacccccgccaccggcagcggcagcgccaucugcagcggcguggccgugugcaaggugcugcaccuggagggcgaggugaacaagaucaagagcgcccugcugagcaccaacaaggccguggugagccugagcaacggcgugagcgugcugaccuucaaggugcuggaccugaagaacuacaucgacaagcagcugcugcccauccugaacaagcagagcugcagcauccccaacaucgagaccgugaucgaguuccagcagaagaacaacagacugcuggagaucaccagagaguucagcgugaacgccggcgugaccacccccgugagcaccuacaugcugaccaacagcgagcugcugagccugaucaacgacaugcccaucaccaacgaccagaagaagcugaugagcaacaacgugcagaucgugagacagcagagcuacagcaucaugugcaucaucaaggaggaggugcuggccuacguggugcagcugccccuguacggcgugaucgacacccccugcuggaagcugcacaccagcccccugugcaccaccaacaccaaggagggcagcaacaucugccugaccagaaccgacagaggcugguacugcgacaacgccggcagcgugagcuucuucccccaggccgagaccugcaaggugcagagcaacagaguguucugcgacaccaugaacagccugacccugcccagcgaggugaaccugugcaacguggacaucuucaaccccaaguacgacugcaagaucaugaccagcaagaccgacgugagcagcagcgugaucaccagccugggcgccaucgugagcugcuacggcaagaccaagugcaccgccagcaacaagaacagaggcaucaucaagaccuucagcaacggcugcgacuacgugagcaacaagggcguggacaccgugagcgugggcaacacccuguacugcgugaacaagcaggagggccagagccuguacgugaagggcgagcccaucaucaacuucuacgacccccugguguuccccagcgacgaguucgacgccagcaucagccaggugaacgagaagaucaaccagagccuggccuucaucagaaagagcgacgagcugcugcacaacgugaacgccggcaagagcaccaccaacaucaugaucaccaccaucaucaucgugaucaucgugauccugcugagccugaucgccgugggccugcugcuguacugcaaggccagaagcacccccgugacccugagcaaggaccagcugagcggcaucaacaacaucgccuucagcaacugaggacuaguaauaaggaaacuguaugaaugucugugggcaggaagugaagagauccuucuguaaagguuuuuggaauuaugucugcugaauaauaaacuuuuuugaaauaauaaaucugguagaaaaaugagaucuaaaaaaaaaaaaaaaaaaaaaaaaaaaaaaaaaaaaaaaaaaaaaaaaaaaaaaaaaaaaaaaaugcaucccccccccccccccccccccccccccccccaaaggcucuuuucagagccaccagaauu

SEQ ID NO: 1922 - RNA, 1994 nt, Artificial Sequence
  mRNA product Design g-4 comprising derived and/or modified sequence from HRSV(A2)__F_DSCav1_mut1 (opt5)
gggagacuccugucgggcggaaguaggaggaguagaguuuaaaaacaguacucuuuuuccgguucgggacguaguugaagcaacgacaagccggauaaccgcucuugagacaggaagcuuaccauggagcugcucauccugaaggccaacgcuauuaccacaauccuuacggccgugaccuucugcuuugcgagcggccagaauauuacagaagaguucuaccaauccaccuguucugcugucagcaaaggguaucugggagcccucagaacaggcugguacaccuccguuaucacaauugaacugucuaacaucaaggagaauaaaugcaacgggaccgacgccaaggugaaacuuaucaagcaggaacuggauaaguauaaaaaugcugugacggagcuccagcugcugaugcagagcacccccgccacaggauccggcucugcuauuuguagcggggucgccgugugcaagguucuccaccuggagggagaagugaacaaaaucaaguccgcgcuucugagcaccaauaaagccgucgugucucucuccaacggcguuagcgugcugacauuuaagguccuugaccugaagaauuacauugauaaacaacuccugccuauccugaacaagcagucuuguuccauuccgaauaucgagaccgugauugaguuccagcagaaaaacaaucggcuccuggaaaucacgcgcgaguuuagcgugaacgcuggcgucacaacccccguuucuacauauaugcuuaccaauuccgaacugcucagccugaucaacgacaugccuauuaccaacgaucaaaagaaacuuauguccaauaacgugcagaucgugagacagcagucuuacagcauuaugugcaucauuaaggaggaaguccuggccuaugugguucaacucccccuguacggggugaucgacacaccuuguuggaaacugcauacgagcccccucugcaccacaaauaccaaggagggauccaacaucugucugacacggaccgaucgcggcugguacugcgacaaugcugggucugucuccuucuuuccucaggccgaaacguguaaggugcagagcaacagaguuuucugcgauacaaugaacucucuuacccugccgagcgaggugaaucucugcaaugucgacauuuuuaaccccaaauaugauuguaagaucaugaccuccaaaacagacgugucuagcuccgucauuaccagccugggagcgaucgugucuugcuacggcaagacaaaauguacggccuccaauaagaaccgggggauuaucaagaccuucagcaauggaugcgauuauguuucuaacaaaggcguggacacagucuccgugggcaauacccuuuacuguguuaacaagcaagaggggcagagccuguaugugaaaggagaaccuaucauuaacuuuuacgacccccucgucuucccuuccgaugaguuugacgcuucuaucagccaggugaaugaaaagauuaaccagucccuggccuucauccgcaaaucugaugagcugcuccacaaugugaacgcuggcaagagcacaaccaauauuaugaucacgaccauuaucaucguuauuaucgucauucugcuuucccugaucgccguggggcuccugcuguauugcaaggccagaagcacacccgugacccuuucuaaagaccaacucuccggaauuaacaauaucgcuuucagcaacugaggacuaguaauaaggaaacuguaugaaugucugugggcaggaagugaagagauccuucuguaaagguuuuuggaauuaugucugcugaauaauaaacuuuuuugaaauaauaaaucugguagaaaaaugagaucuaaaaaaaaaaaaaaaaaaaaaaaaaaaaaaaaaaaaaaaaaaaaaaaaaaaaaaaaaaaaaaaaugcaucccccccccccccccccccccccccccccccaaaggcucuuuucagagccaccagaauu

SEQ ID NO: 1923 - RNA, 1994 nt, Artificial Sequence
  mRNA product Design g-4 comprising derived and/or modified sequence from HRSV(A2)__F_DSCav1_mut1 (opt6)
gggagacuccugucgggcggaaguaggaggaguagaguuuaaaaacaguacucuuuuuccgguucgggacguaguugaagcaacgacaagccggauaaccgcucuugagacaggaagcuuaccauggaacuauuaauacuaaaagcaaacgcuauaacaacaauacuaacagcagucacauucugcuuugcaucaggccaaaacaucacagaagaauuuuaccaaucaacaugcuccgccguaucgaaaggauaccuaggcgcauuaagaaccggaugguauacaucagucauaacaauugaacuaucuaacauaaaagaaaacaaauguaacggcacagaugccaaaguaaaacucaucaaacaagaauuagauaaauacaaaaacgcagucacugaacuacaacucuuaaugcaaucaacaccugcaacaggaucaggaucagcaauaugcucaggaguagccguauguaaaguacuacaccuagaaggagaagucaacaaaauaaaaucagcccuccuaaguacaaacaaagcugucguaucacuauccaaugguguuucaguacuaacuuucaaaguucuagaccuaaaaaacuacauagacaaacaacuacuaccaauacuaaauaaacaaaguuguucuauacccaacauagaaaccgucauagaauuucaacaaaaaaauaauagacuccuagaaauaacaagagaauuuucaguuaacgcagguguaacaaccccaguauccaccuauaugcuaacaaauucagaauuacuuucccuaaucaacgacaugcccauaacaaaugaccaaaaaaaauuaaugucaaacaacguccaaauaguucgucaacaaucauauucaauaaugugcauaauaaaagaagaagucuuagccuacguaguacaacuuccccuuuauggaguuaucgacacacccugcuggaaacuccacacuucaccacuauguacuacaaacacaaaagaaggauccaacaucugccucacaagaaccgaucgaggaugguacugugauaacgccggauccgucucauucuucccacaagcagaaacaugcaaaguacaaucaaacagaguauuuugcgacacaaugaacucccucacauuaccuucugaaguaaaccuauguaauguagacauauucaaccccaaauacgauugcaaaauaaugacaucaaagacagauguaucaucaagugucaucacaucccuaggagcaauugucucauguuaugguaaaacaaaaugcaccgcaucaaauaaaaacagaggcauaauaaaaaccuucucaaacgguugugacuacguauccaauaaaggcgucgacacaguaucaguagguaacacauuauauuguguaaacaaacaagaaggacagucccuauauguaaaaggagaaccaauaaucaacuucuacgacccacuuguuuucccuucugaugaauuugacgcaaguauaucacaaguaaaugaaaaaaucaaucaaucacuagccuuuauaagaaaaucagaugaauuauuacacaacguaaacgccggaaaaucaacaaccaacauaaugauaaccacaauaauaaucgucauaauagucauccuacuaucacucauagcaguuggacuccuacuauacugcaaagcacgaucaacaccaguaacauuauccaaagaccaacuaagugguaucaauaacaucgccuuuucaaacugaggacuaguaauaaggaaacuguaugaaugucugugggcaggaagugaagagauccuucuguaaagguuuuuggaauuaugucugcugaauaauaaacuuuuuugaaauaauaaaucugguagaaaaaugagaucuaaaaaaaaaaaaaaaaaaaaaaaaaaaaaaaaaaaaaaaaaaaaaaaaaaaaaaaaaaaaaaaaugcaucccccccccccccccccccccccccccccccaaaggcucuuuucagagccaccagaauu

SEQ ID NO: 1924 - RNA, 1994 nt, Artificial Sequence
  mRNA product Design g-4 comprising derived and/or modified sequence from HRSV(A2)__F_DSCav1_mut1 (opt11)
gggagacuccugucgggcggaaguaggaggaguagaguuuaaaaacaguacucuuuuuccgguucgggacguaguugaagcaacgacaagccggauaaccgcucuugagacaggaagcuuaccauggaacuccuaauccucaaagccaacgcaaucaccacaauccucacugccgucaccuucugcuucgccuccggccaaaacauaacagaagaauuuuaccaaucaaccuguucagcggucuccaaaggcuaccucggcgcccuccgcaccggcugguacaccuccgugaucaccauagaacucuccaacaucaaggaaaacaaaugcaacggcaccgacgcgaaggucaaacuuauuaaacaagaacucgacaaauacaaaaacgcagucaccgaacuacaacuccuaaugcaguccacgccagccaccggcucuggcucagccauaugcuccgguguggccguaugcaaaguccuacaccucgaaggagaagucaacaaaauaaaauccgcccuacuguccacaaacaaggccguagucucccucucaaacggcgucucaguacucaccuucaaaguccuagaccucaagaacuacaucgacaaacaacuccuacccauacuaaacaaacaauccugcucaauccccaacaucgaaaccguaauagaauuucaacaaaaaaacaacagacuccuggagaucacccgggaauuuuccguaaacgccggagucacaacacccgucucaaccuacaugcuaacgaacucagagcuccucucacuuaucaacgacaugcccauaacaaacgaccaaaaaaaacucauguccaacaacgugcaaaucguccgacaacaauccuacuccaucaugugcaucauuaaagaagaaguccucgcauacguaguccagcucccccucuacggcgucauagacacccccugcuggaaacuacacacaucaccccucugcacaacaaacaccaaagaaggcuccaacaucugccucacccgcaccgaccgaggcugguacugcgauaacgccggcagcgucuccuucuucccccaagcagaaaccugcaagguccaauccaaccgaguuuucugcgacacuaugaacucgcucacccuccccuccgaagucaaccucugcaacgucgacauuuucaaccccaaauacgacugcaaaaucaugaccuccaagaccgacguauccuccuccgucaucaccucccuaggcgccauaguaaguugcuacggcaaaaccaagugcacagcaagcaacaaaaaccgaggaauaaucaaaaccuucuccaacggcugcgacuacguauccaacaagggcgucgacaccguauccguagggaacacccuuuacugcguaaacaaacaagaaggacaaucacucuacguaaaaggcgaacccauaaucaacuucuacgacccccucguauuucccuccgacgaauuugacgcaucaaucucacaggucaacgaaaaaauaaaccaaucgcuagcauucaucagaaaaucagacgaacuccuacacaacgucaacgcaggcaagagcaccaccaacaucaugaucaccaccaucaucaucgucauaaucgucauacuacucucacucauagcagucggccuccuccuauacuguaaagcaaggucgaccccagucacccuauccaaagaccaacuaagcggcaucaacaacaucgcguucucaaacuaaggacuaguaauaaggaaacuguaugaaugucugugggcaggaagugaagagauccuucuguaaagguuuuuggaauuaugucugcugaauaauaaacuuuuuugaaauaauaaaucugguagaaaaaugagaucuaaaaaaaaaaaaaaaaaaaaaaaaaaaaaaaaaaaaaaaaaaaaaaaaaaaaaaaaaaaaaaaaugcaucccccccccccccccccccccccccccccccaaaggcucuuuucagagccaccagaauu

SEQ ID NO: 1925 - RNA, 1970 nt, Artificial Sequence
  mRNA product Design g-5 comprising derived and/or modified sequence from HRSV(A2)__F_DSCav1_mut1 (opt1)
gggagacccgugacccggaaguuguacggcuacgcgacuuucccucccacaaacccucgcgcccuuccuuuccuacuugggcccggcagaaagcuuaccauggagcugcucauccugaaggccaacgccaucaccaccauccugacggcggugaccuucugcuucgccagcggccagaacaucaccgaggaguucuaccaguccacgugcagcgccgucuccaagggguaccucggcgcccugcggaccggcugguacaccuccgugaucaccaucgagcugagcaacaucaaggagaacaagugcaacgggaccgacgccaaggugaagcucaucaagcaggagcuggacaaguacaagaacgcggucacggagcugcagcuccugaugcaguccaccccggcaaccggcuccggcuccgccaucugcagcggcgucgccgugugcaaggugcugcaccucgagggggaggucaacaagaucaagagcgcccugcuguccaccaacaaggccguggugagccucuccaacggcgucagcgugcugaccuucaaggugcuggaccucaagaacuacaucgacaagcagcugcugcccauccugaacaagcagagcugcuccauccccaacaucgagacggugaucgaguuccagcagaagaacaaccggcuccuggagaucacccgcgaguucagcgugaacgccggggucaccacccccguguccacguacaugcugaccaacagcgagcuccugucccugaucaacgacaugccgaucaccaacgaccagaagaagcucaugagcaacaacgugcagaucguccggcagcaguccuacagcaucaugugcaucaucaaggaggaggugcuggcguacgugguccagcugccccucuacggcgugaucgacacccccugcuggaagcugcacacgagcccccugugcaccaccaacaccaaggagggguccaacaucugccucacgcgcaccgaccggggcugguacugcgacaacgccggcagcgucuccuucuucccgcaggccgagaccugcaaggugcagagcaaccgcguguucugcgacaccaugaacucccugacgcugcccagcgagguaaaccucugcaacgucgacaucuucaaccccaaguacgacugcaagaucaugaccuccaagaccgacgugagcuccagcgugaucaccucccugggggccaucgucagcugcuacggcaagacgaagugcaccgccagcaacaagaaccgggggaucaucaagaccuucuccaacggcugcgacuacgugagcaacaagggcguggacaccguguccgucgggaacacccuguacugcgugaacaagcaggagggccagagccucuacgugaagggggagcccaucaucaacuucuacgacccgcuggucuuccccuccgacgaguucgacgcgagcaucucccaggugaacgagaagaucaaccagagccuggccuucauccgcaaguccgacgagcugcuccacaacgugaacgccggcaagagcacgaccaacaucaugaucaccaccaucaucaucgucaucaucgugauccugcugucccucaucgccguggggcugcugcucuacugcaaggcccggagcacgcccgucacccuguccaaggaccagcugagcggcaucaacaacaucgcguucuccaacugaggacuaguaauaaggaaacuguaugaaugucugugggcaggaagugaagagauccuucuguaaagguuuuuggaauuaugucugcugaauaauaaacuuuuuugaaauaauaaaucugguagaaaaaugagaucuaaaaaaaaaaaaaaaaaaaaaaaaaaaaaaaaaaaaaaaaaaaaaaaaaaaaaaaaaaaaaaaaugcaucccccccccccccccccccccccccccccccaaaggcucuuuucagagccaccagaauu

SEQ ID NO: 1926 - RNA, 1970 nt, Artificial Sequence
  mRNA product Design g-5 comprising derived and/or modified sequence from HRSV(A2)__F_DSCav1_mut1 (opt1)
gggagacccgugacccggaaguuguacggcuacgcgacuuucccucccacaaacccucgcgcccuuccuuuccuacuugggcccggcagaaagcuuaccauggagcugcucauccugaaggccaacgccaucaccaccauccugacggcggugaccuucugcuucgccagcggccagaacaucaccgaggaguucuaccaguccacgugcagcgccgucuccaagggguaccucggcgcccugcgcaccgggugguacaccagcgugaucaccaucgagcuguccaacaucaaggagaacaagugcaacggcaccgacgccaaggugaagcucaucaagcaggagcuggacaaguacaagaacgcggucacggagcugcagcuccugaugcagagcacccccgccaccggguccggcagcgccaucugcuccggcguggccgugugcaagguccugcaccucgagggggaggugaacaagaucaagagcgcgcugcuguccaccaacaaggccguggucagccucuccaacggcgugagcgugcugacguucaagguccuggaccucaagaacuacaucgacaagcagcugcugccgauccucaacaagcaguccugcagcauccccaacaucgagaccgugaucgaguuccagcagaagaacaaccggcugcuggagaucacccgcgaguucuccgugaacgccggggucaccacgcccgugagcaccuacaugcucaccaacuccgagcugcugagccucaucaacgacaugcccaucaccaacgaccagaagaagcugaugagcaacaacgugcagaucguccggcagcaguccuacagcaucaugugcaucaucaaggaggaggugcuggccuacgugguccagcucccgcuguacggcgugaucgacacgcccugcuggaagcugcacaccagcccccucugcaccaccaacacgaaggagggguccaacaucugccugacccgcaccgaccggggcugguacugcgacaacgccggcuccgugagcuucuucccccaggcggagaccugcaagguccaguccaaccgcguguucugcgacacgaugaacagccugacccucccguccgaggucaaccugugcaacguggacaucuucaaccccaaguacgacugcaagaucaugaccagcaagaccgacguguccagcuccgucaucacgagccugggggccaucguguccugcuacggcaagaccaagugcaccgccagcaacaagaaccgggggaucaucaagaccuucuccaacggcugcgacuacgugagcaacaagggcgucgacacgguguccguggggaacacccucuacugcgucaacaagcaggagggccagagccuguacgugaagggggagcccaucaucaacuucuacgacccccugguguucccgagcgacgaguucgacgccuccaucagccaggucaacgagaagaucaaccagucccucgccuucauccgcaagagcgacgagcugcugcacaacgugaacgcgggcaaguccaccaccaacaucaugaucaccacgaucaucaucgugaucaucgucauccuccugagccugaucgccguggggcuccugcuguacugcaaggcccgguccacccccgugacccugagcaaggaccagcucuccggcaucaacaacaucgccuucagcaacugaggacuaguaauaaggaaacuguaugaaugucugugggcaggaagugaagagauccuucuguaaagguuuuuggaauuaugucugcugaauaauaaacuuuuuugaaauaauaaaucugguagaaaaaugagaucuaaaaaaaaaaaaaaaaaaaaaaaaaaaaaaaaaaaaaaaaaaaaaaaaaaaaaaaaaaaaaaaaugcaucccccccccccccccccccccccccccccccaaaggcucuuuucagagccaccagaauu

SEQ ID NO: 1927 - RNA, 1970 nt, Artificial Sequence
  mRNA product Design g-5 comprising derived and/or modified sequence from HRSV(A2)__F_DSCav1_mut1 (opt2)
gggagacccgugacccggaaguuguacggcuacgcgacuuucccucccacaaacccucgcgcccuuccuuuccuacuugggcccggcagaaagcuuaccauggagcuccucauccucaaggccaacgccaucaccaccauccucaccgccgucaccuucugcuucgccuccggccagaacaucaccgaggaguucuaccaguccaccugcuccgccgucuccaagggcuaccucggcgcccuccgcaccggcugguacaccuccgucaucaccaucgagcucuccaacaucaaggagaacaagugcaacggcaccgacgccaaggucaagcucaucaagcaggagcucgacaaguacaagaacgccgucaccgagcuccagcuccucaugcaguccacccccgccaccggcuccggcuccgccaucugcuccggcgucgccgucugcaagguccuccaccucgagggcgaggucaacaagaucaaguccgcccuccucuccaccaacaaggccgucgucucccucuccaacggcgucuccguccucaccuucaagguccucgaccucaagaacuacaucgacaagcagcuccuccccauccucaacaagcaguccugcuccauccccaacaucgagaccgucaucgaguuccagcagaagaacaaccgccuccucgagaucacccgcgaguucuccgucaacgccggcgucaccacccccgucuccaccuacaugcucaccaacuccgagcuccucucccucaucaacgacaugcccaucaccaacgaccagaagaagcucauguccaacaacguccagaucguccgccagcaguccuacuccaucaugugcaucaucaaggaggagguccucgccuacgucguccagcucccccucuacggcgucaucgacacccccugcuggaagcuccacaccuccccccucugcaccaccaacaccaaggagggcuccaacaucugccucacccgcaccgaccgcggcugguacugcgacaacgccggcuccgucuccuucuucccccaggccgagaccugcaagguccaguccaaccgcgucuucugcgacaccaugaacucccucacccuccccuccgaggucaaccucugcaacgucgacaucuucaaccccaaguacgacugcaagaucaugaccuccaagaccgacgucuccuccuccgucaucaccucccucggcgccaucgucuccugcuacggcaagaccaagugcaccgccuccaacaagaaccgcggcaucaucaagaccuucuccaacggcugcgacuacgucuccaacaagggcgucgacaccgucuccgucggcaacacccucuacugcgucaacaagcaggagggccagucccucuacgucaagggcgagcccaucaucaacuucuacgacccccucgucuuccccuccgacgaguucgacgccuccaucucccaggucaacgagaagaucaaccagucccucgccuucauccgcaaguccgacgagcuccuccacaacgucaacgccggcaaguccaccaccaacaucaugaucaccaccaucaucaucgucaucaucgucauccuccucucccucaucgccgucggccuccuccucuacugcaaggcccgcuccacccccgucacccucuccaaggaccagcucuccggcaucaacaacaucgccuucuccaacugaggacuaguaauaaggaaacuguaugaaugucugugggcaggaagugaagagauccuucuguaaagguuuuuggaauuaugucugcugaauaauaaacuuuuuugaaauaauaaaucugguagaaaaaugagaucuaaaaaaaaaaaaaaaaaaaaaaaaaaaaaaaaaaaaaaaaaaaaaaaaaaaaaaaaaaaaaaaaugcaucccccccccccccccccccccccccccccccaaaggcucuuuucagagccaccagaauu

SEQ ID NO: 1928 - RNA, 1970 nt, Artificial Sequence
  mRNA product Design g-5 comprising derived and/or modified sequence from HRSV(A2)__F_DSCav1_mut1 (opt3)
gggagacccgugacccggaaguuguacggcuacgcgacuuucccucccacaaacccucgcgcccuuccuuuccuacuugggcccggcagaaagcuuaccauggagcugcucauccuuaaggccaacgcuauuaccacaauacugacugcagugacguucugcuuugccagcggccagaauaucaccgaagaguucuaccaauccacauguucugcggucucaaaaggguauuugggagcuuuaagaacugguugguacaccaguguuauuacaaucgaacugagcaacauuaaggagaauaaaugcaacggcaccgacgccaaggugaaacuaaucaagcaggaacucgauaaguauaaaaaugcaguaacugagcugcagcuucugaugcaguccacacccgccaccgggucuggaucggcuauauguucaggcguggcagucugcaagguguugcaccucgagggugaaguuaacaaaaucaagagcgcccugcugaguacgaauaaagcuguggucucccucucuaacggggugagcguauuaacuuuuaagguucuggaccuuaagaauuacauugauaaacaauugcugccuauccuaaacaagcaguccuguucaauuccaaauaucgagaccgugauagaguuccagcagaaaaacaauaggcuccuggaaauuacacgggaguuuagugucaacgccggagugacuaccccggugagcacauauaugcuuaccaauucugaacuguugucccucaucaacgacaugcccauuacgaacgaucaaaagaaacugaugucaaauaacguccagaucguucgccagcagagcuacaguaucaugugcauuauaaaggaggaaguguuagcguauguagugcaacugccucucuacggcgucaucgacacuccauguuggaaacuucauacaucuccccugugcaccacuaauacaaaggagggcuccaacauuuguuugacccgaacggaucgugggugguacugcgacaaugcaggaagcgugucguucuuuccucaggccgaaaccuguaagguucagucuaacagaguguucugcgauacaaugaacucccuaacucugccaucagaggucaaucucugcaauguggacaucuuuaaccccaaauaugauuguaagauaaugaccaguaaaacagacguaagcuccucuguuauuacuagccugggugcuaucgugucaugcuacggcaagaccaaauguacagccaguaauaagaacagggggaucauuaagaccuucuccaauggaugcgauuaugucagcaacaaaggcguggacacugucucuguggguaauacgcuuuacuguguuaacaagcaagaggggcagucacuguaugugaaaggagaaccuaucauuaacuuuuacgacccauugguauucccgagugaugaguuugacgcaagcauaucccaggucaaugaaaagaucaaccagucucucgcuuucauucggaaaucggaugagcuguuacacaaugugaacgccggcaagagcacaaccaauaucaugaucacuaccauuauaaucguuauuaucgugauucugcuaucccucaucgcggucggccugcuuuuguauugcaaggcccgcucaacacccgugacccugaguaaagaccaacucucugggauaaacaauaucgcauucagcaacugaggacuaguaauaaggaaacuguaugaaugucugugggcaggaagugaagagauccuucuguaaagguuuuuggaauuaugucugcugaauaauaaacuuuuuugaaauaauaaaucugguagaaaaaugagaucuaaaaaaaaaaaaaaaaaaaaaaaaaaaaaaaaaaaaaaaaaaaaaaaaaaaaaaaaaaaaaaaaugcaucccccccccccccccccccccccccccccccaaaggcucuuuucagagccaccagaauu

SEQ ID NO: 1929 - RNA, 1970 nt, Artificial Sequence
  mRNA product Design g-5 comprising derived and/or modified sequence from HRSV(A2)__F_DSCav1_mut1 (opt4)
gggagacccgugacccggaaguuguacggcuacgcgacuuucccucccacaaacccucgcgcccuuccuuuccuacuugggcccggcagaaagcuuaccauggagcugcugauccugaaggccaacgccaucaccaccauccugaccgccgugaccuucugcuucgccagcggccagaacaucaccgaggaguucuaccagagcaccugcagcgccgugagcaagggcuaccugggcgcccugagaaccggcugguacaccagcgugaucaccaucgagcugagcaacaucaaggagaacaagugcaacggcaccgacgccaaggugaagcugaucaagcaggagcuggacaaguacaagaacgccgugaccgagcugcagcugcugaugcagagcacccccgccaccggcagcggcagcgccaucugcagcggcguggccgugugcaaggugcugcaccuggagggcgaggugaacaagaucaagagcgcccugcugagcaccaacaaggccguggugagccugagcaacggcgugagcgugcugaccuucaaggugcuggaccugaagaacuacaucgacaagcagcugcugcccauccugaacaagcagagcugcagcauccccaacaucgagaccgugaucgaguuccagcagaagaacaacagacugcuggagaucaccagagaguucagcgugaacgccggcgugaccacccccgugagcaccuacaugcugaccaacagcgagcugcugagccugaucaacgacaugcccaucaccaacgaccagaagaagcugaugagcaacaacgugcagaucgugagacagcagagcuacagcaucaugugcaucaucaaggaggaggugcuggccuacguggugcagcugccccuguacggcgugaucgacacccccugcuggaagcugcacaccagcccccugugcaccaccaacaccaaggagggcagcaacaucugccugaccagaaccgacagaggcugguacugcgacaacgccggcagcgugagcuucuucccccaggccgagaccugcaaggugcagagcaacagaguguucugcgacaccaugaacagccugacccugcccagcgaggugaaccugugcaacguggacaucuucaaccccaaguacgacugcaagaucaugaccagcaagaccgacgugagcagcagcgugaucaccagccugggcgccaucgugagcugcuacggcaagaccaagugcaccgccagcaacaagaacagaggcaucaucaagaccuucagcaacggcugcgacuacgugagcaacaagggcguggacaccgugagcgugggcaacacccuguacugcgugaacaagcaggagggccagagccuguacgugaagggcgagcccaucaucaacuucuacgacccccugguguuccccagcgacgaguucgacgccagcaucagccaggugaacgagaagaucaaccagagccuggccuucaucagaaagagcgacgagcugcugcacaacgugaacgccggcaagagcaccaccaacaucaugaucaccaccaucaucaucgugaucaucgugauccugcugagccugaucgccgugggccugcugcuguacugcaaggccagaagcacccccgugacccugagcaaggaccagcugagcggcaucaacaacaucgccuucagcaacugaggacuaguaauaaggaaacuguaugaaugucugugggcaggaagugaagagauccuucuguaaagguuuuuggaauuaugucugcugaauaauaaacuuuuuugaaauaauaaaucugguagaaaaaugagaucuaaaaaaaaaaaaaaaaaaaaaaaaaaaaaaaaaaaaaaaaaaaaaaaaaaaaaaaaaaaaaaaaugcaucccccccccccccccccccccccccccccccaaaggcucuuuucagagccaccagaauu

SEQ ID NO: 1930 - RNA, 1970 nt, Artificial Sequence
  mRNA product Design g-5 comprising derived and/or modified sequence from HRSV(A2)__F_DSCav1_mut1 (opt5)
gggagacccgugacccggaaguuguacggcuacgcgacuuucccucccacaaacccucgcgcccuuccuuuccuacuugggcccggcagaaagcuuaccauggagcugcucauccugaaggccaacgcuauuaccacaauccuuacggccgugaccuucugcuuugcgagcggccagaauauuacagaagaguucuaccaauccaccuguucugcugucagcaaaggguaucugggagcccucagaacaggcugguacaccuccguuaucacaauugaacugucuaacaucaaggagaauaaaugcaacgggaccgacgccaaggugaaacuuaucaagcaggaacuggauaaguauaaaaaugcugugacggagcuccagcugcugaugcagagcacccccgccacaggauccggcucugcuauuuguagcggggucgccgugugcaagguucuccaccuggagggagaagugaacaaaaucaaguccgcgcuucugagcaccaauaaagccgucgugucucucuccaacggcguuagcgugcugacauuuaagguccuugaccugaagaauuacauugauaaacaacuccugccuauccugaacaagcagucuuguuccauuccgaauaucgagaccgugauugaguuccagcagaaaaacaaucggcuccuggaaaucacgcgcgaguuuagcgugaacgcuggcgucacaacccccguuucuacauauaugcuuaccaauuccgaacugcucagccugaucaacgacaugccuauuaccaacgaucaaaagaaacuuauguccaauaacgugcagaucgugagacagcagucuuacagcauuaugugcaucauuaaggaggaaguccuggccuaugugguucaacucccccuguacggggugaucgacacaccuuguuggaaacugcauacgagcccccucugcaccacaaauaccaaggagggauccaacaucugucugacacggaccgaucgcggcugguacugcgacaaugcugggucugucuccuucuuuccucaggccgaaacguguaaggugcagagcaacagaguuuucugcgauacaaugaacucucuuacccugccgagcgaggugaaucucugcaaugucgacauuuuuaaccccaaauaugauuguaagaucaugaccuccaaaacagacgugucuagcuccgucauuaccagccugggagcgaucgugucuugcuacggcaagacaaaauguacggccuccaauaagaaccgggggauuaucaagaccuucagcaauggaugcgauuauguuucuaacaaaggcguggacacagucuccgugggcaauacccuuuacuguguuaacaagcaagaggggcagagccuguaugugaaaggagaaccuaucauuaacuuuuacgacccccucgucuucccuuccgaugaguuugacgcuucuaucagccaggugaaugaaaagauuaaccagucccuggccuucauccgcaaaucugaugagcugcuccacaaugugaacgcuggcaagagcacaaccaauauuaugaucacgaccauuaucaucguuauuaucgucauucugcuuucccugaucgccguggggcuccugcuguauugcaaggccagaagcacacccgugacccuuucuaaagaccaacucuccggaauuaacaauaucgcuuucagcaacugaggacuaguaauaaggaaacuguaugaaugucugugggcaggaagugaagagauccuucuguaaagguuuuuggaauuaugucugcugaauaauaaacuuuuuugaaauaauaaaucugguagaaaaaugagaucuaaaaaaaaaaaaaaaaaaaaaaaaaaaaaaaaaaaaaaaaaaaaaaaaaaaaaaaaaaaaaaaaugcaucccccccccccccccccccccccccccccccaaaggcucuuuucagagccaccagaauu

SEQ ID NO: 1931 - RNA, 1970 nt, Artificial Sequence
  mRNA product Design g-5 comprising derived and/or modified sequence from HRSV(A2)__F_DSCav1_mut1 (opt6)
gggagacccgugacccggaaguuguacggcuacgcgacuuucccucccacaaacccucgcgcccuuccuuuccuacuugggcccggcagaaagcuuaccauggaacuauuaauacuaaaagcaaacgcuauaacaacaauacuaacagcagucacauucugcuuugcaucaggccaaaacaucacagaagaauuuuaccaaucaacaugcuccgccguaucgaaaggauaccuaggcgcauuaagaaccggaugguauacaucagucauaacaauugaacuaucuaacauaaaagaaaacaaauguaacggcacagaugccaaaguaaaacucaucaaacaagaauuagauaaauacaaaaacgcagucacugaacuacaacucuuaaugcaaucaacaccugcaacaggaucaggaucagcaauaugcucaggaguagccguauguaaaguacuacaccuagaaggagaagucaacaaaauaaaaucagcccuccuaaguacaaacaaagcugucguaucacuauccaaugguguuucaguacuaacuuucaaaguucuagaccuaaaaaacuacauagacaaacaacuacuaccaauacuaaauaaacaaaguuguucuauacccaacauagaaaccgucauagaauuucaacaaaaaaauaauagacuccuagaaauaacaagagaauuuucaguuaacgcagguguaacaaccccaguauccaccuauaugcuaacaaauucagaauuacuuucccuaaucaacgacaugcccauaacaaaugaccaaaaaaaauuaaugucaaacaacguccaaauaguucgucaacaaucauauucaauaaugugcauaauaaaagaagaagucuuagccuacguaguacaacuuccccuuuauggaguuaucgacacacccugcuggaaacuccacacuucaccacuauguacuacaaacacaaaagaaggauccaacaucugccucacaagaaccgaucgaggaugguacugugauaacgccggauccgucucauucuucccacaagcagaaacaugcaaaguacaaucaaacagaguauuuugcgacacaaugaacucccucacauuaccuucugaaguaaaccuauguaauguagacauauucaaccccaaauacgauugcaaaauaaugacaucaaagacagauguaucaucaagugucaucacaucccuaggagcaauugucucauguuaugguaaaacaaaaugcaccgcaucaaauaaaaacagaggcauaauaaaaaccuucucaaacgguugugacuacguauccaauaaaggcgucgacacaguaucaguagguaacacauuauauuguguaaacaaacaagaaggacagucccuauauguaaaaggagaaccaauaaucaacuucuacgacccacuuguuuucccuucugaugaauuugacgcaaguauaucacaaguaaaugaaaaaaucaaucaaucacuagccuuuauaagaaaaucagaugaauuauuacacaacguaaacgccggaaaaucaacaaccaacauaaugauaaccacaauaauaaucgucauaauagucauccuacuaucacucauagcaguuggacuccuacuauacugcaaagcacgaucaacaccaguaacauuauccaaagaccaacuaagugguaucaauaacaucgccuuuucaaacugaggacuaguaauaaggaaacuguaugaaugucugugggcaggaagugaagagauccuucuguaaagguuuuuggaauuaugucugcugaauaauaaacuuuuuugaaauaauaaaucugguagaaaaaugagaucuaaaaaaaaaaaaaaaaaaaaaaaaaaaaaaaaaaaaaaaaaaaaaaaaaaaaaaaaaaaaaaaaugcaucccccccccccccccccccccccccccccccaaaggcucuuuucagagccaccagaauu

SEQ ID NO: 1932 - RNA, 1970 nt, Artificial Sequence
  mRNA product Design g-5 comprising derived and/or modified sequence from HRSV(A2)__F_DSCav1_mut1 (opt11)
gggagacccgugacccggaaguuguacggcuacgcgacuuucccucccacaaacccucgcgcccuuccuuuccuacuugggcccggcagaaagcuuaccauggaacuccuaauccucaaagccaacgcaaucaccacaauccucacugccgucaccuucugcuucgccuccggccaaaacauaacagaagaauuuuaccaaucaaccuguucagcggucuccaaaggcuaccucggcgcccuccgcaccggcugguacaccuccgugaucaccauagaacucuccaacaucaaggaaaacaaaugcaacggcaccgacgcgaaggucaaacuuauuaaacaagaacucgacaaauacaaaaacgcagucaccgaacuacaacuccuaaugcaguccacgccagccaccggcucuggcucagccauaugcuccgguguggccguaugcaaaguccuacaccucgaaggagaagucaacaaaauaaaauccgcccuacuguccacaaacaaggccguagucucccucucaaacggcgucucaguacucaccuucaaaguccuagaccucaagaacuacaucgacaaacaacuccuacccauacuaaacaaacaauccugcucaauccccaacaucgaaaccguaauagaauuucaacaaaaaaacaacagacuccuggagaucacccgggaauuuuccguaaacgccggagucacaacacccgucucaaccuacaugcuaacgaacucagagcuccucucacuuaucaacgacaugcccauaacaaacgaccaaaaaaaacucauguccaacaacgugcaaaucguccgacaacaauccuacuccaucaugugcaucauuaaagaagaaguccucgcauacguaguccagcucccccucuacggcgucauagacacccccugcuggaaacuacacacaucaccccucugcacaacaaacaccaaagaaggcuccaacaucugccucacccgcaccgaccgaggcugguacugcgauaacgccggcagcgucuccuucuucccccaagcagaaaccugcaagguccaauccaaccgaguuuucugcgacacuaugaacucgcucacccuccccuccgaagucaaccucugcaacgucgacauuuucaaccccaaauacgacugcaaaaucaugaccuccaagaccgacguauccuccuccgucaucaccucccuaggcgccauaguaaguugcuacggcaaaaccaagugcacagcaagcaacaaaaaccgaggaauaaucaaaaccuucuccaacggcugcgacuacguauccaacaagggcgucgacaccguauccguagggaacacccuuuacugcguaaacaaacaagaaggacaaucacucuacguaaaaggcgaacccauaaucaacuucuacgacccccucguauuucccuccgacgaauuugacgcaucaaucucacaggucaacgaaaaaauaaaccaaucgcuagcauucaucagaaaaucagacgaacuccuacacaacgucaacgcaggcaagagcaccaccaacaucaugaucaccaccaucaucaucgucauaaucgucauacuacucucacucauagcagucggccuccuccuauacuguaaagcaaggucgaccccagucacccuauccaaagaccaacuaagcggcaucaacaacaucgcguucucaaacuaaggacuaguaauaaggaaacuguaugaaugucugugggcaggaagugaagagauccuucuguaaagguuuuuggaauuaugucugcugaauaauaaacuuuuuugaaauaauaaaucugguagaaaaaugagaucuaaaaaaaaaaaaaaaaaaaaaaaaaaaaaaaaaaaaaaaaaaaaaaaaaaaaaaaaaaaaaaaaugcaucccccccccccccccccccccccccccccccaaaggcucuuuucagagccaccagaauu

SEQ ID NO: 1933 - RNA, 1986 nt, Artificial Sequence
  mRNA product Design h-1 comprising derived and/or modified sequence from HRSV(A2)__F_DSCav1_mut1 (opt1)
gggagacccgugacccggaaguuguacggcuacgcgacuuucccucccacaaacccucgcgcccuuccuuuccuacuugggcccggcagaaagcuuaccauggagcugcucauccugaaggccaacgccaucaccaccauccugacggcggugaccuucugcuucgccagcggccagaacaucaccgaggaguucuaccaguccacgugcagcgccgucuccaagggguaccucggcgcccugcggaccggcugguacaccuccgugaucaccaucgagcugagcaacaucaaggagaacaagugcaacgggaccgacgccaaggugaagcucaucaagcaggagcuggacaaguacaagaacgcggucacggagcugcagcuccugaugcaguccaccccggcaaccggcuccggcuccgccaucugcagcggcgucgccgugugcaaggugcugcaccucgagggggaggucaacaagaucaagagcgcccugcuguccaccaacaaggccguggugagccucuccaacggcgucagcgugcugaccuucaaggugcuggaccucaagaacuacaucgacaagcagcugcugcccauccugaacaagcagagcugcuccauccccaacaucgagacggugaucgaguuccagcagaagaacaaccggcuccuggagaucacccgcgaguucagcgugaacgccggggucaccacccccguguccacguacaugcugaccaacagcgagcuccugucccugaucaacgacaugccgaucaccaacgaccagaagaagcucaugagcaacaacgugcagaucguccggcagcaguccuacagcaucaugugcaucaucaaggaggaggugcuggcguacgugguccagcugccccucuacggcgugaucgacacccccugcuggaagcugcacacgagcccccugugcaccaccaacaccaaggagggguccaacaucugccucacgcgcaccgaccggggcugguacugcgacaacgccggcagcgucuccuucuucccgcaggccgagaccugcaaggugcagagcaaccgcguguucugcgacaccaugaacucccugacgcugcccagcgagguaaaccucugcaacgucgacaucuucaaccccaaguacgacugcaagaucaugaccuccaagaccgacgugagcuccagcgugaucaccucccugggggccaucgucagcugcuacggcaagacgaagugcaccgccagcaacaagaaccgggggaucaucaagaccuucuccaacggcugcgacuacgugagcaacaagggcguggacaccguguccgucgggaacacccuguacugcgugaacaagcaggagggccagagccucuacgugaagggggagcccaucaucaacuucuacgacccgcuggucuuccccuccgacgaguucgacgcgagcaucucccaggugaacgagaagaucaaccagagccuggccuucauccgcaaguccgacgagcugcuccacaacgugaacgccggcaagagcacgaccaacaucaugaucaccaccaucaucaucgucaucaucgugauccugcugucccucaucgccguggggcugcugcucuacugcaaggcccggagcacgcccgucacccuguccaaggaccagcugagcggcaucaacaacaucgcguucuccaacugaggacuaguacuggcugcaucucccuuuccucuguccuccauccuucucccaggauggugaagggggaccugguacccagugauccccaccccaggauccuaaaucaugacuuaccugcuaauaaaaacucauuggaaaagugagaagaucuaaaaaaaaaaaaaaaaaaaaaaaaaaaaaaaaaaaaaaaaaaaaaaaaaaaaaaaaaaaaaaaaugcaucccccccccccccccccccccccccccccccaaaggcucuuuucagagccaccagaauu

SEQ ID NO: 1934 - RNA, 1986 nt, Artificial Sequence
  mRNA product Design h-1 comprising derived and/or modified sequence from HRSV(A2)__F_DSCav1_mut1 (opt1)
gggagacccgugacccggaaguuguacggcuacgcgacuuucccucccacaaacccucgcgcccuuccuuuccuacuugggcccggcagaaagcuuaccauggagcugcucauccugaaggccaacgccaucaccaccauccugacggcggugaccuucugcuucgccagcggccagaacaucaccgaggaguucuaccaguccacgugcagcgccgucuccaagggguaccucggcgcccugcgcaccgggugguacaccagcgugaucaccaucgagcuguccaacaucaaggagaacaagugcaacggcaccgacgccaaggugaagcucaucaagcaggagcuggacaaguacaagaacgcggucacggagcugcagcuccugaugcagagcacccccgccaccggguccggcagcgccaucugcuccggcguggccgugugcaagguccugcaccucgagggggaggugaacaagaucaagagcgcgcugcuguccaccaacaaggccguggucagccucuccaacggcgugagcgugcugacguucaagguccuggaccucaagaacuacaucgacaagcagcugcugccgauccucaacaagcaguccugcagcauccccaacaucgagaccgugaucgaguuccagcagaagaacaaccggcugcuggagaucacccgcgaguucuccgugaacgccggggucaccacgcccgugagcaccuacaugcucaccaacuccgagcugcugagccucaucaacgacaugcccaucaccaacgaccagaagaagcugaugagcaacaacgugcagaucguccggcagcaguccuacagcaucaugugcaucaucaaggaggaggugcuggccuacgugguccagcucccgcuguacggcgugaucgacacgcccugcuggaagcugcacaccagcccccucugcaccaccaacacgaaggagggguccaacaucugccugacccgcaccgaccggggcugguacugcgacaacgccggcuccgugagcuucuucccccaggcggagaccugcaagguccaguccaaccgcguguucugcgacacgaugaacagccugacccucccguccgaggucaaccugugcaacguggacaucuucaaccccaaguacgacugcaagaucaugaccagcaagaccgacguguccagcuccgucaucacgagccugggggccaucguguccugcuacggcaagaccaagugcaccgccagcaacaagaaccgggggaucaucaagaccuucuccaacggcugcgacuacgugagcaacaagggcgucgacacgguguccguggggaacacccucuacugcgucaacaagcaggagggccagagccuguacgugaagggggagcccaucaucaacuucuacgacccccugguguucccgagcgacgaguucgacgccuccaucagccaggucaacgagaagaucaaccagucccucgccuucauccgcaagagcgacgagcugcugcacaacgugaacgcgggcaaguccaccaccaacaucaugaucaccacgaucaucaucgugaucaucgucauccuccugagccugaucgccguggggcuccugcuguacugcaaggcccgguccacccccgugacccugagcaaggaccagcucuccggcaucaacaacaucgccuucagcaacugaggacuaguacuggcugcaucucccuuuccucuguccuccauccuucucccaggauggugaagggggaccugguacccagugauccccaccccaggauccuaaaucaugacuuaccugcuaauaaaaacucauuggaaaagugagaagaucuaaaaaaaaaaaaaaaaaaaaaaaaaaaaaaaaaaaaaaaaaaaaaaaaaaaaaaaaaaaaaaaaugcaucccccccccccccccccccccccccccccccaaaggcucuuuucagagccaccagaauu

SEQ ID NO: 1935 - RNA, 1986 nt, Artificial Sequence
  mRNA product Design h-1 comprising derived and/or modified sequence from HRSV(A2)__F_DSCav1_mut1 (opt2)
gggagacccgugacccggaaguuguacggcuacgcgacuuucccucccacaaacccucgcgcccuuccuuuccuacuugggcccggcagaaagcuuaccauggagcuccucauccucaaggccaacgccaucaccaccauccucaccgccgucaccuucugcuucgccuccggccagaacaucaccgaggaguucuaccaguccaccugcuccgccgucuccaagggcuaccucggcgcccuccgcaccggcugguacaccuccgucaucaccaucgagcucuccaacaucaaggagaacaagugcaacggcaccgacgccaaggucaagcucaucaagcaggagcucgacaaguacaagaacgccgucaccgagcuccagcuccucaugcaguccacccccgccaccggcuccggcuccgccaucugcuccggcgucgccgucugcaagguccuccaccucgagggcgaggucaacaagaucaaguccgcccuccucuccaccaacaaggccgucgucucccucuccaacggcgucuccguccucaccuucaagguccucgaccucaagaacuacaucgacaagcagcuccuccccauccucaacaagcaguccugcuccauccccaacaucgagaccgucaucgaguuccagcagaagaacaaccgccuccucgagaucacccgcgaguucuccgucaacgccggcgucaccacccccgucuccaccuacaugcucaccaacuccgagcuccucucccucaucaacgacaugcccaucaccaacgaccagaagaagcucauguccaacaacguccagaucguccgccagcaguccuacuccaucaugugcaucaucaaggaggagguccucgccuacgucguccagcucccccucuacggcgucaucgacacccccugcuggaagcuccacaccuccccccucugcaccaccaacaccaaggagggcuccaacaucugccucacccgcaccgaccgcggcugguacugcgacaacgccggcuccgucuccuucuucccccaggccgagaccugcaagguccaguccaaccgcgucuucugcgacaccaugaacucccucacccuccccuccgaggucaaccucugcaacgucgacaucuucaaccccaaguacgacugcaagaucaugaccuccaagaccgacgucuccuccuccgucaucaccucccucggcgccaucgucuccugcuacggcaagaccaagugcaccgccuccaacaagaaccgcggcaucaucaagaccuucuccaacggcugcgacuacgucuccaacaagggcgucgacaccgucuccgucggcaacacccucuacugcgucaacaagcaggagggccagucccucuacgucaagggcgagcccaucaucaacuucuacgacccccucgucuuccccuccgacgaguucgacgccuccaucucccaggucaacgagaagaucaaccagucccucgccuucauccgcaaguccgacgagcuccuccacaacgucaacgccggcaaguccaccaccaacaucaugaucaccaccaucaucaucgucaucaucgucauccuccucucccucaucgccgucggccuccuccucuacugcaaggcccgcuccacccccgucacccucuccaaggaccagcucuccggcaucaacaacaucgccuucuccaacugaggacuaguacuggcugcaucucccuuuccucuguccuccauccuucucccaggauggugaagggggaccugguacccagugauccccaccccaggauccuaaaucaugacuuaccugcuaauaaaaacucauuggaaaagugagaagaucuaaaaaaaaaaaaaaaaaaaaaaaaaaaaaaaaaaaaaaaaaaaaaaaaaaaaaaaaaaaaaaaaugcaucccccccccccccccccccccccccccccccaaaggcucuuuucagagccaccagaauu

SEQ ID NO: 1936 - RNA, 1986 nt, Artificial Sequence
  mRNA product Design h-1 comprising derived and/or modified sequence from HRSV(A2)__F_DSCav1_mut1 (opt3)
gggagacccgugacccggaaguuguacggcuacgcgacuuucccucccacaaacccucgcgcccuuccuuuccuacuugggcccggcagaaagcuuaccauggagcugcucauccuuaaggccaacgcuauuaccacaauacugacugcagugacguucugcuuugccagcggccagaauaucaccgaagaguucuaccaauccacauguucugcggucucaaaaggguauuugggagcuuuaagaacugguugguacaccaguguuauuacaaucgaacugagcaacauuaaggagaauaaaugcaacggcaccgacgccaaggugaaacuaaucaagcaggaacucgauaaguauaaaaaugcaguaacugagcugcagcuucugaugcaguccacacccgccaccgggucuggaucggcuauauguucaggcguggcagucugcaagguguugcaccucgagggugaaguuaacaaaaucaagagcgcccugcugaguacgaauaaagcuguggucucccucucuaacggggugagcguauuaacuuuuaagguucuggaccuuaagaauuacauugauaaacaauugcugccuauccuaaacaagcaguccuguucaauuccaaauaucgagaccgugauagaguuccagcagaaaaacaauaggcuccuggaaauuacacgggaguuuagugucaacgccggagugacuaccccggugagcacauauaugcuuaccaauucugaacuguugucccucaucaacgacaugcccauuacgaacgaucaaaagaaacugaugucaaauaacguccagaucguucgccagcagagcuacaguaucaugugcauuauaaaggaggaaguguuagcguauguagugcaacugccucucuacggcgucaucgacacuccauguuggaaacuucauacaucuccccugugcaccacuaauacaaaggagggcuccaacauuuguuugacccgaacggaucgugggugguacugcgacaaugcaggaagcgugucguucuuuccucaggccgaaaccuguaagguucagucuaacagaguguucugcgauacaaugaacucccuaacucugccaucagaggucaaucucugcaauguggacaucuuuaaccccaaauaugauuguaagauaaugaccaguaaaacagacguaagcuccucuguuauuacuagccugggugcuaucgugucaugcuacggcaagaccaaauguacagccaguaauaagaacagggggaucauuaagaccuucuccaauggaugcgauuaugucagcaacaaaggcguggacacugucucuguggguaauacgcuuuacuguguuaacaagcaagaggggcagucacuguaugugaaaggagaaccuaucauuaacuuuuacgacccauugguauucccgagugaugaguuugacgcaagcauaucccaggucaaugaaaagaucaaccagucucucgcuuucauucggaaaucggaugagcuguuacacaaugugaacgccggcaagagcacaaccaauaucaugaucacuaccauuauaaucguuauuaucgugauucugcuaucccucaucgcggucggccugcuuuuguauugcaaggcccgcucaacacccgugacccugaguaaagaccaacucucugggauaaacaauaucgcauucagcaacugaggacuaguacuggcugcaucucccuuuccucuguccuccauccuucucccaggauggugaagggggaccugguacccagugauccccaccccaggauccuaaaucaugacuuaccugcuaauaaaaacucauuggaaaagugagaagaucuaaaaaaaaaaaaaaaaaaaaaaaaaaaaaaaaaaaaaaaaaaaaaaaaaaaaaaaaaaaaaaaaugcaucccccccccccccccccccccccccccccccaaaggcucuuuucagagccaccagaauu

SEQ ID NO: 1937 - RNA, 1986 nt, Artificial Sequence
  mRNA product Design h-1 comprising derived and/or modified sequence from HRSV(A2)__F_DSCav1_mut1 (opt4)
gggagacccgugacccggaaguuguacggcuacgcgacuuucccucccacaaacccucgcgcccuuccuuuccuacuugggcccggcagaaagcuuaccauggagcugcugauccugaaggccaacgccaucaccaccauccugaccgccgugaccuucugcuucgccagcggccagaacaucaccgaggaguucuaccagagcaccugcagcgccgugagcaagggcuaccugggcgcccugagaaccggcugguacaccagcgugaucaccaucgagcugagcaacaucaaggagaacaagugcaacggcaccgacgccaaggugaagcugaucaagcaggagcuggacaaguacaagaacgccgugaccgagcugcagcugcugaugcagagcacccccgccaccggcagcggcagcgccaucugcagcggcguggccgugugcaaggugcugcaccuggagggcgaggugaacaagaucaagagcgcccugcugagcaccaacaaggccguggugagccugagcaacggcgugagcgugcugaccuucaaggugcuggaccugaagaacuacaucgacaagcagcugcugcccauccugaacaagcagagcugcagcauccccaacaucgagaccgugaucgaguuccagcagaagaacaacagacugcuggagaucaccagagaguucagcgugaacgccggcgugaccacccccgugagcaccuacaugcugaccaacagcgagcugcugagccugaucaacgacaugcccaucaccaacgaccagaagaagcugaugagcaacaacgugcagaucgugagacagcagagcuacagcaucaugugcaucaucaaggaggaggugcuggccuacguggugcagcugccccuguacggcgugaucgacacccccugcuggaagcugcacaccagcccccugugcaccaccaacaccaaggagggcagcaacaucugccugaccagaaccgacagaggcugguacugcgacaacgccggcagcgugagcuucuucccccaggccgagaccugcaaggugcagagcaacagaguguucugcgacaccaugaacagccugacccugcccagcgaggugaaccugugcaacguggacaucuucaaccccaaguacgacugcaagaucaugaccagcaagaccgacgugagcagcagcgugaucaccagccugggcgccaucgugagcugcuacggcaagaccaagugcaccgccagcaacaagaacagaggcaucaucaagaccuucagcaacggcugcgacuacgugagcaacaagggcguggacaccgugagcgugggcaacacccuguacugcgugaacaagcaggagggccagagccuguacgugaagggcgagcccaucaucaacuucuacgacccccugguguuccccagcgacgaguucgacgccagcaucagccaggugaacgagaagaucaaccagagccuggccuucaucagaaagagcgacgagcugcugcacaacgugaacgccggcaagagcaccaccaacaucaugaucaccaccaucaucaucgugaucaucgugauccugcugagccugaucgccgugggccugcugcuguacugcaaggccagaagcacccccgugacccugagcaaggaccagcugagcggcaucaacaacaucgccuucagcaacugaggacuaguacuggcugcaucucccuuuccucuguccuccauccuucucccaggauggugaagggggaccugguacccagugauccccaccccaggauccuaaaucaugacuuaccugcuaauaaaaacucauuggaaaagugagaagaucuaaaaaaaaaaaaaaaaaaaaaaaaaaaaaaaaaaaaaaaaaaaaaaaaaaaaaaaaaaaaaaaaugcaucccccccccccccccccccccccccccccccaaaggcucuuuucagagccaccagaauu

SEQ ID NO: 1938 - RNA, 1986 nt, Artificial Sequence
  mRNA product Design h-1 comprising derived and/or modified sequence from HRSV(A2)__F_DSCav1_mut1 (opt5)
gggagacccgugacccggaaguuguacggcuacgcgacuuucccucccacaaacccucgcgcccuuccuuuccuacuugggcccggcagaaagcuuaccauggagcugcucauccugaaggccaacgcuauuaccacaauccuuacggccgugaccuucugcuuugcgagcggccagaauauuacagaagaguucuaccaauccaccuguucugcugucagcaaaggguaucugggagcccucagaacaggcugguacaccuccguuaucacaauugaacugucuaacaucaaggagaauaaaugcaacgggaccgacgccaaggugaaacuuaucaagcaggaacuggauaaguauaaaaaugcugugacggagcuccagcugcugaugcagagcacccccgccacaggauccggcucugcuauuuguagcggggucgccgugugcaagguucuccaccuggagggagaagugaacaaaaucaaguccgcgcuucugagcaccaauaaagccgucgugucucucuccaacggcguuagcgugcugacauuuaagguccuugaccugaagaauuacauugauaaacaacuccugccuauccugaacaagcagucuuguuccauuccgaauaucgagaccgugauugaguuccagcagaaaaacaaucggcuccuggaaaucacgcgcgaguuuagcgugaacgcuggcgucacaacccccguuucuacauauaugcuuaccaauuccgaacugcucagccugaucaacgacaugccuauuaccaacgaucaaaagaaacuuauguccaauaacgugcagaucgugagacagcagucuuacagcauuaugugcaucauuaaggaggaaguccuggccuaugugguucaacucccccuguacggggugaucgacacaccuuguuggaaacugcauacgagcccccucugcaccacaaauaccaaggagggauccaacaucugucugacacggaccgaucgcggcugguacugcgacaaugcugggucugucuccuucuuuccucaggccgaaacguguaaggugcagagcaacagaguuuucugcgauacaaugaacucucuuacccugccgagcgaggugaaucucugcaaugucgacauuuuuaaccccaaauaugauuguaagaucaugaccuccaaaacagacgugucuagcuccgucauuaccagccugggagcgaucgugucuugcuacggcaagacaaaauguacggccuccaauaagaaccgggggauuaucaagaccuucagcaauggaugcgauuauguuucuaacaaaggcguggacacagucuccgugggcaauacccuuuacuguguuaacaagcaagaggggcagagccuguaugugaaaggagaaccuaucauuaacuuuuacgacccccucgucuucccuuccgaugaguuugacgcuucuaucagccaggugaaugaaaagauuaaccagucccuggccuucauccgcaaaucugaugagcugcuccacaaugugaacgcuggcaagagcacaaccaauauuaugaucacgaccauuaucaucguuauuaucgucauucugcuuucccugaucgccguggggcuccugcuguauugcaaggccagaagcacacccgugacccuuucuaaagaccaacucuccggaauuaacaauaucgcuuucagcaacugaggacuaguacuggcugcaucucccuuuccucuguccuccauccuucucccaggauggugaagggggaccugguacccagugauccccaccccaggauccuaaaucaugacuuaccugcuaauaaaaacucauuggaaaagugagaagaucuaaaaaaaaaaaaaaaaaaaaaaaaaaaaaaaaaaaaaaaaaaaaaaaaaaaaaaaaaaaaaaaaugcaucccccccccccccccccccccccccccccccaaaggcucuuuucagagccaccagaauu

SEQ ID NO: 1939 - RNA, 1986 nt, Artificial Sequence
  mRNA product Design h-1 comprising derived and/or modified sequence from HRSV(A2)__F_DSCav1_mut1 (opt6)
gggagacccgugacccggaaguuguacggcuacgcgacuuucccucccacaaacccucgcgcccuuccuuuccuacuugggcccggcagaaagcuuaccauggaacuauuaauacuaaaagcaaacgcuauaacaacaauacuaacagcagucacauucugcuuugcaucaggccaaaacaucacagaagaauuuuaccaaucaacaugcuccgccguaucgaaaggauaccuaggcgcauuaagaaccggaugguauacaucagucauaacaauugaacuaucuaacauaaaagaaaacaaauguaacggcacagaugccaaaguaaaacucaucaaacaagaauuagauaaauacaaaaacgcagucacugaacuacaacucuuaaugcaaucaacaccugcaacaggaucaggaucagcaauaugcucaggaguagccguauguaaaguacuacaccuagaaggagaagucaacaaaauaaaaucagcccuccuaaguacaaacaaagcugucguaucacuauccaaugguguuucaguacuaacuuucaaaguucuagaccuaaaaaacuacauagacaaacaacuacuaccaauacuaaauaaacaaaguuguucuauacccaacauagaaaccgucauagaauuucaacaaaaaaauaauagacuccuagaaauaacaagagaauuuucaguuaacgcagguguaacaaccccaguauccaccuauaugcuaacaaauucagaauuacuuucccuaaucaacgacaugcccauaacaaaugaccaaaaaaaauuaaugucaaacaacguccaaauaguucgucaacaaucauauucaauaaugugcauaauaaaagaagaagucuuagccuacguaguacaacuuccccuuuauggaguuaucgacacacccugcuggaaacuccacacuucaccacuauguacuacaaacacaaaagaaggauccaacaucugccucacaagaaccgaucgaggaugguacugugauaacgccggauccgucucauucuucccacaagcagaaacaugcaaaguacaaucaaacagaguauuuugcgacacaaugaacucccucacauuaccuucugaaguaaaccuauguaauguagacauauucaaccccaaauacgauugcaaaauaaugacaucaaagacagauguaucaucaagugucaucacaucccuaggagcaauugucucauguuaugguaaaacaaaaugcaccgcaucaaauaaaaacagaggcauaauaaaaaccuucucaaacgguugugacuacguauccaauaaaggcgucgacacaguaucaguagguaacacauuauauuguguaaacaaacaagaaggacagucccuauauguaaaaggagaaccaauaaucaacuucuacgacccacuuguuuucccuucugaugaauuugacgcaaguauaucacaaguaaaugaaaaaaucaaucaaucacuagccuuuauaagaaaaucagaugaauuauuacacaacguaaacgccggaaaaucaacaaccaacauaaugauaaccacaauaauaaucgucauaauagucauccuacuaucacucauagcaguuggacuccuacuauacugcaaagcacgaucaacaccaguaacauuauccaaagaccaacuaagugguaucaauaacaucgccuuuucaaacugaggacuaguacuggcugcaucucccuuuccucuguccuccauccuucucccaggauggugaagggggaccugguacccagugauccccaccccaggauccuaaaucaugacuuaccugcuaauaaaaacucauuggaaaagugagaagaucuaaaaaaaaaaaaaaaaaaaaaaaaaaaaaaaaaaaaaaaaaaaaaaaaaaaaaaaaaaaaaaaaugcaucccccccccccccccccccccccccccccccaaaggcucuuuucagagccaccagaauu

SEQ ID NO: 1940 - RNA, 1986 nt, Artificial Sequence
  mRNA product Design h-1 comprising derived and/or modified sequence from HRSV(A2)__F_DSCav1_mut1 (opt11)
gggagacccgugacccggaaguuguacggcuacgcgacuuucccucccacaaacccucgcgcccuuccuuuccuacuugggcccggcagaaagcuuaccauggaacuccuaauccucaaagccaacgcaaucaccacaauccucacugccgucaccuucugcuucgccuccggccaaaacauaacagaagaauuuuaccaaucaaccuguucagcggucuccaaaggcuaccucggcgcccuccgcaccggcugguacaccuccgugaucaccauagaacucuccaacaucaaggaaaacaaaugcaacggcaccgacgcgaaggucaaacuuauuaaacaagaacucgacaaauacaaaaacgcagucaccgaacuacaacuccuaaugcaguccacgccagccaccggcucuggcucagccauaugcuccgguguggccguaugcaaaguccuacaccucgaaggagaagucaacaaaauaaaauccgcccuacuguccacaaacaaggccguagucucccucucaaacggcgucucaguacucaccuucaaaguccuagaccucaagaacuacaucgacaaacaacuccuacccauacuaaacaaacaauccugcucaauccccaacaucgaaaccguaauagaauuucaacaaaaaaacaacagacuccuggagaucacccgggaauuuuccguaaacgccggagucacaacacccgucucaaccuacaugcuaacgaacucagagcuccucucacuuaucaacgacaugcccauaacaaacgaccaaaaaaaacucauguccaacaacgugcaaaucguccgacaacaauccuacuccaucaugugcaucauuaaagaagaaguccucgcauacguaguccagcucccccucuacggcgucauagacacccccugcuggaaacuacacacaucaccccucugcacaacaaacaccaaagaaggcuccaacaucugccucacccgcaccgaccgaggcugguacugcgauaacgccggcagcgucuccuucuucccccaagcagaaaccugcaagguccaauccaaccgaguuuucugcgacacuaugaacucgcucacccuccccuccgaagucaaccucugcaacgucgacauuuucaaccccaaauacgacugcaaaaucaugaccuccaagaccgacguauccuccuccgucaucaccucccuaggcgccauaguaaguugcuacggcaaaaccaagugcacagcaagcaacaaaaaccgaggaauaaucaaaaccuucuccaacggcugcgacuacguauccaacaagggcgucgacaccguauccguagggaacacccuuuacugcguaaacaaacaagaaggacaaucacucuacguaaaaggcgaacccauaaucaacuucuacgacccccucguauuucccuccgacgaauuugacgcaucaaucucacaggucaacgaaaaaauaaaccaaucgcuagcauucaucagaaaaucagacgaacuccuacacaacgucaacgcaggcaagagcaccaccaacaucaugaucaccaccaucaucaucgucauaaucgucauacuacucucacucauagcagucggccuccuccuauacuguaaagcaaggucgaccccagucacccuauccaaagaccaacuaagcggcaucaacaacaucgcguucucaaacuaaggacuaguacuggcugcaucucccuuuccucuguccuccauccuucucccaggauggugaagggggaccugguacccagugauccccaccccaggauccuaaaucaugacuuaccugcuaauaaaaacucauuggaaaagugagaagaucuaaaaaaaaaaaaaaaaaaaaaaaaaaaaaaaaaaaaaaaaaaaaaaaaaaaaaaaaaaaaaaaaugcaucccccccccccccccccccccccccccccccaaaggcucuuuucagagccaccagaauu

SEQ ID NO: 1941 - RNA, 2202 nt, Artificial Sequence
  mRNA product Design h-2 comprising derived and/or modified sequence from HRSV(A2)__F_DSCav1_mut1 (opt1)
gggagacccgugacccggaaguuguacggcuacgcgacuuucccucccacaaacccucgcgcccuuccuuuccuacuugggcccggcagaaagcuuaccauggagcugcucauccugaaggccaacgccaucaccaccauccugacggcggugaccuucugcuucgccagcggccagaacaucaccgaggaguucuaccaguccacgugcagcgccgucuccaagggguaccucggcgcccugcggaccggcugguacaccuccgugaucaccaucgagcugagcaacaucaaggagaacaagugcaacgggaccgacgccaaggugaagcucaucaagcaggagcuggacaaguacaagaacgcggucacggagcugcagcuccugaugcaguccaccccggcaaccggcuccggcuccgccaucugcagcggcgucgccgugugcaaggugcugcaccucgagggggaggucaacaagaucaagagcgcccugcuguccaccaacaaggccguggugagccucuccaacggcgucagcgugcugaccuucaaggugcuggaccucaagaacuacaucgacaagcagcugcugcccauccugaacaagcagagcugcuccauccccaacaucgagacggugaucgaguuccagcagaagaacaaccggcuccuggagaucacccgcgaguucagcgugaacgccggggucaccacccccguguccacguacaugcugaccaacagcgagcuccugucccugaucaacgacaugccgaucaccaacgaccagaagaagcucaugagcaacaacgugcagaucguccggcagcaguccuacagcaucaugugcaucaucaaggaggaggugcuggcguacgugguccagcugccccucuacggcgugaucgacacccccugcuggaagcugcacacgagcccccugugcaccaccaacaccaaggagggguccaacaucugccucacgcgcaccgaccggggcugguacugcgacaacgccggcagcgucuccuucuucccgcaggccgagaccugcaaggugcagagcaaccgcguguucugcgacaccaugaacucccugacgcugcccagcgagguaaaccucugcaacgucgacaucuucaaccccaaguacgacugcaagaucaugaccuccaagaccgacgugagcuccagcgugaucaccucccugggggccaucgucagcugcuacggcaagacgaagugcaccgccagcaacaagaaccgggggaucaucaagaccuucuccaacggcugcgacuacgugagcaacaagggcguggacaccguguccgucgggaacacccuguacugcgugaacaagcaggagggccagagccucuacgugaagggggagcccaucaucaacuucuacgacccgcuggucuuccccuccgacgaguucgacgcgagcaucucccaggugaacgagaagaucaaccagagccuggccuucauccgcaaguccgacgagcugcuccacaacgugaacgccggcaagagcacgaccaacaucaugaucaccaccaucaucaucgucaucaucgugauccugcugucccucaucgccguggggcugcugcucuacugcaaggcccggagcacgcccgucacccuguccaaggaccagcugagcggcaucaacaacaucgcguucuccaacugaggacuagugaagggaacacccaaauuuaauucagccuuaagcacaauuaauuaagagugaaacguaauuguacaagcaguuggucacccaccauagggcaugaucaacaccgcaaccuuuccuuuuucccccagugauucugaaaaaccccucuucccuucagcuugcuuagauguuccaaauuuaguaagcuuaaggcggccuacagaagaaaaagaaaaaaaaggccacaaaaguucccucucacuuucaguaaauaaaauaaaagcagcaacagaaauaaagaaauaaaugaaauucaaaaugaaauaaauauuguguugugcagcauuaaaaaaucaauaaaaauuaaaaaugagcaagaucuaaaaaaaaaaaaaaaaaaaaaaaaaaaaaaaaaaaaaaaaaaaaaaaaaaaaaaaaaaaaaaaaugcaucccccccccccccccccccccccccccccccaaaggcucuuuucagagccaccagaauu

SEQ ID NO: 1942 - RNA, 2202 nt, Artificial Sequence
  mRNA product Design h-2 comprising derived and/or modified sequence from HRSV(A2)__F_DSCav1_mut1 (opt1)
gggagacccgugacccggaaguuguacggcuacgcgacuuucccucccacaaacccucgcgcccuuccuuuccuacuugggcccggcagaaagcuuaccauggagcugcucauccugaaggccaacgccaucaccaccauccugacggcggugaccuucugcuucgccagcggccagaacaucaccgaggaguucuaccaguccacgugcagcgccgucuccaagggguaccucggcgcccugcgcaccgggugguacaccagcgugaucaccaucgagcuguccaacaucaaggagaacaagugcaacggcaccgacgccaaggugaagcucaucaagcaggagcuggacaaguacaagaacgcggucacggagcugcagcuccugaugcagagcacccccgccaccggguccggcagcgccaucugcuccggcguggccgugugcaagguccugcaccucgagggggaggugaacaagaucaagagcgcgcugcuguccaccaacaaggccguggucagccucuccaacggcgugagcgugcugacguucaagguccuggaccucaagaacuacaucgacaagcagcugcugccgauccucaacaagcaguccugcagcauccccaacaucgagaccgugaucgaguuccagcagaagaacaaccggcugcuggagaucacccgcgaguucuccgugaacgccggggucaccacgcccgugagcaccuacaugcucaccaacuccgagcugcugagccucaucaacgacaugcccaucaccaacgaccagaagaagcugaugagcaacaacgugcagaucguccggcagcaguccuacagcaucaugugcaucaucaaggaggaggugcuggccuacgugguccagcucccgcuguacggcgugaucgacacgcccugcuggaagcugcacaccagcccccucugcaccaccaacacgaaggagggguccaacaucugccugacccgcaccgaccggggcugguacugcgacaacgccggcuccgugagcuucuucccccaggcggagaccugcaagguccaguccaaccgcguguucugcgacacgaugaacagccugacccucccguccgaggucaaccugugcaacguggacaucuucaaccccaaguacgacugcaagaucaugaccagcaagaccgacguguccagcuccgucaucacgagccugggggccaucguguccugcuacggcaagaccaagugcaccgccagcaacaagaaccgggggaucaucaagaccuucuccaacggcugcgacuacgugagcaacaagggcgucgacacgguguccguggggaacacccucuacugcgucaacaagcaggagggccagagccuguacgugaagggggagcccaucaucaacuucuacgacccccugguguucccgagcgacgaguucgacgccuccaucagccaggucaacgagaagaucaaccagucccucgccuucauccgcaagagcgacgagcugcugcacaacgugaacgcgggcaaguccaccaccaacaucaugaucaccacgaucaucaucgugaucaucgucauccuccugagccugaucgccguggggcuccugcuguacugcaaggcccgguccacccccgugacccugagcaaggaccagcucuccggcaucaacaacaucgccuucagcaacugaggacuagugaagggaacacccaaauuuaauucagccuuaagcacaauuaauuaagagugaaacguaauuguacaagcaguuggucacccaccauagggcaugaucaacaccgcaaccuuuccuuuuucccccagugauucugaaaaaccccucuucccuucagcuugcuuagauguuccaaauuuaguaagcuuaaggcggccuacagaagaaaaagaaaaaaaaggccacaaaaguucccucucacuuucaguaaauaaaauaaaagcagcaacagaaauaaagaaauaaaugaaauucaaaaugaaauaaauauuguguugugcagcauuaaaaaaucaauaaaaauuaaaaaugagcaagaucuaaaaaaaaaaaaaaaaaaaaaaaaaaaaaaaaaaaaaaaaaaaaaaaaaaaaaaaaaaaaaaaaugcaucccccccccccccccccccccccccccccccaaaggcucuuuucagagccaccagaauu

SEQ ID NO: 1943 - RNA, 2202 nt, Artificial Sequence
  mRNA product Design h-2 comprising derived and/or modified sequence from HRSV(A2)__F_DSCav1_mut1 (opt2)
gggagacccgugacccggaaguuguacggcuacgcgacuuucccucccacaaacccucgcgcccuuccuuuccuacuugggcccggcagaaagcuuaccauggagcuccucauccucaaggccaacgccaucaccaccauccucaccgccgucaccuucugcuucgccuccggccagaacaucaccgaggaguucuaccaguccaccugcuccgccgucuccaagggcuaccucggcgcccuccgcaccggcugguacaccuccgucaucaccaucgagcucuccaacaucaaggagaacaagugcaacggcaccgacgccaaggucaagcucaucaagcaggagcucgacaaguacaagaacgccgucaccgagcuccagcuccucaugcaguccacccccgccaccggcuccggcuccgccaucugcuccggcgucgccgucugcaagguccuccaccucgagggcgaggucaacaagaucaaguccgcccuccucuccaccaacaaggccgucgucucccucuccaacggcgucuccguccucaccuucaagguccucgaccucaagaacuacaucgacaagcagcuccuccccauccucaacaagcaguccugcuccauccccaacaucgagaccgucaucgaguuccagcagaagaacaaccgccuccucgagaucacccgcgaguucuccgucaacgccggcgucaccacccccgucuccaccuacaugcucaccaacuccgagcuccucucccucaucaacgacaugcccaucaccaacgaccagaagaagcucauguccaacaacguccagaucguccgccagcaguccuacuccaucaugugcaucaucaaggaggagguccucgccuacgucguccagcucccccucuacggcgucaucgacacccccugcuggaagcuccacaccuccccccucugcaccaccaacaccaaggagggcuccaacaucugccucacccgcaccgaccgcggcugguacugcgacaacgccggcuccgucuccuucuucccccaggccgagaccugcaagguccaguccaaccgcgucuucugcgacaccaugaacucccucacccuccccuccgaggucaaccucugcaacgucgacaucuucaaccccaaguacgacugcaagaucaugaccuccaagaccgacgucuccuccuccgucaucaccucccucggcgccaucgucuccugcuacggcaagaccaagugcaccgccuccaacaagaaccgcggcaucaucaagaccuucuccaacggcugcgacuacgucuccaacaagggcgucgacaccgucuccgucggcaacacccucuacugcgucaacaagcaggagggccagucccucuacgucaagggcgagcccaucaucaacuucuacgacccccucgucuuccccuccgacgaguucgacgccuccaucucccaggucaacgagaagaucaaccagucccucgccuucauccgcaaguccgacgagcuccuccacaacgucaacgccggcaaguccaccaccaacaucaugaucaccaccaucaucaucgucaucaucgucauccuccucucccucaucgccgucggccuccuccucuacugcaaggcccgcuccacccccgucacccucuccaaggaccagcucuccggcaucaacaacaucgccuucuccaacugaggacuagugaagggaacacccaaauuuaauucagccuuaagcacaauuaauuaagagugaaacguaauuguacaagcaguuggucacccaccauagggcaugaucaacaccgcaaccuuuccuuuuucccccagugauucugaaaaaccccucuucccuucagcuugcuuagauguuccaaauuuaguaagcuuaaggcggccuacagaagaaaaagaaaaaaaaggccacaaaaguucccucucacuuucaguaaauaaaauaaaagcagcaacagaaauaaagaaauaaaugaaauucaaaaugaaauaaauauuguguugugcagcauuaaaaaaucaauaaaaauuaaaaaugagcaagaucuaaaaaaaaaaaaaaaaaaaaaaaaaaaaaaaaaaaaaaaaaaaaaaaaaaaaaaaaaaaaaaaaugcaucccccccccccccccccccccccccccccccaaaggcucuuuucagagccaccagaauu

SEQ ID NO: 1944 - RNA, 2202 nt, Artificial Sequence
  mRNA product Design h-2 comprising derived and/or modified sequence from HRSV(A2)__F_DSCav1_mut1 (opt3)
gggagacccgugacccggaaguuguacggcuacgcgacuuucccucccacaaacccucgcgcccuuccuuuccuacuugggcccggcagaaagcuuaccauggagcugcucauccuuaaggccaacgcuauuaccacaauacugacugcagugacguucugcuuugccagcggccagaauaucaccgaagaguucuaccaauccacauguucugcggucucaaaaggguauuugggagcuuuaagaacugguugguacaccaguguuauuacaaucgaacugagcaacauuaaggagaauaaaugcaacggcaccgacgccaaggugaaacuaaucaagcaggaacucgauaaguauaaaaaugcaguaacugagcugcagcuucugaugcaguccacacccgccaccgggucuggaucggcuauauguucaggcguggcagucugcaagguguugcaccucgagggugaaguuaacaaaaucaagagcgcccugcugaguacgaauaaagcuguggucucccucucuaacggggugagcguauuaacuuuuaagguucuggaccuuaagaauuacauugauaaacaauugcugccuauccuaaacaagcaguccuguucaauuccaaauaucgagaccgugauagaguuccagcagaaaaacaauaggcuccuggaaauuacacgggaguuuagugucaacgccggagugacuaccccggugagcacauauaugcuuaccaauucugaacuguugucccucaucaacgacaugcccauuacgaacgaucaaaagaaacugaugucaaauaacguccagaucguucgccagcagagcuacaguaucaugugcauuauaaaggaggaaguguuagcguauguagugcaacugccucucuacggcgucaucgacacuccauguuggaaacuucauacaucuccccugugcaccacuaauacaaaggagggcuccaacauuuguuugacccgaacggaucgugggugguacugcgacaaugcaggaagcgugucguucuuuccucaggccgaaaccuguaagguucagucuaacagaguguucugcgauacaaugaacucccuaacucugccaucagaggucaaucucugcaauguggacaucuuuaaccccaaauaugauuguaagauaaugaccaguaaaacagacguaagcuccucuguuauuacuagccugggugcuaucgugucaugcuacggcaagaccaaauguacagccaguaauaagaacagggggaucauuaagaccuucuccaauggaugcgauuaugucagcaacaaaggcguggacacugucucuguggguaauacgcuuuacuguguuaacaagcaagaggggcagucacuguaugugaaaggagaaccuaucauuaacuuuuacgacccauugguauucccgagugaugaguuugacgcaagcauaucccaggucaaugaaaagaucaaccagucucucgcuuucauucggaaaucggaugagcuguuacacaaugugaacgccggcaagagcacaaccaauaucaugaucacuaccauuauaaucguuauuaucgugauucugcuaucccucaucgcggucggccugcuuuuguauugcaaggcccgcucaacacccgugacccugaguaaagaccaacucucugggauaaacaauaucgcauucagcaacugaggacuagugaagggaacacccaaauuuaauucagccuuaagcacaauuaauuaagagugaaacguaauuguacaagcaguuggucacccaccauagggcaugaucaacaccgcaaccuuuccuuuuucccccagugauucugaaaaaccccucuucccuucagcuugcuuagauguuccaaauuuaguaagcuuaaggcggccuacagaagaaaaagaaaaaaaaggccacaaaaguucccucucacuuucaguaaauaaaauaaaagcagcaacagaaauaaagaaauaaaugaaauucaaaaugaaauaaauauuguguugugcagcauuaaaaaaucaauaaaaauuaaaaaugagcaagaucuaaaaaaaaaaaaaaaaaaaaaaaaaaaaaaaaaaaaaaaaaaaaaaaaaaaaaaaaaaaaaaaaugcaucccccccccccccccccccccccccccccccaaaggcucuuuucagagccaccagaauu

SEQ ID NO: 1945 - RNA, 2202 nt, Artificial Sequence
  mRNA product Design h-2 comprising derived and/or modified sequence from HRSV(A2)__F_DSCav1_mut1 (opt4)
gggagacccgugacccggaaguuguacggcuacgcgacuuucccucccacaaacccucgcgcccuuccuuuccuacuugggcccggcagaaagcuuaccauggagcugcugauccugaaggccaacgccaucaccaccauccugaccgccgugaccuucugcuucgccagcggccagaacaucaccgaggaguucuaccagagcaccugcagcgccgugagcaagggcuaccugggcgcccugagaaccggcugguacaccagcgugaucaccaucgagcugagcaacaucaaggagaacaagugcaacggcaccgacgccaaggugaagcugaucaagcaggagcuggacaaguacaagaacgccgugaccgagcugcagcugcugaugcagagcacccccgccaccggcagcggcagcgccaucugcagcggcguggccgugugcaaggugcugcaccuggagggcgaggugaacaagaucaagagcgcccugcugagcaccaacaaggccguggugagccugagcaacggcgugagcgugcugaccuucaaggugcuggaccugaagaacuacaucgacaagcagcugcugcccauccugaacaagcagagcugcagcauccccaacaucgagaccgugaucgaguuccagcagaagaacaacagacugcuggagaucaccagagaguucagcgugaacgccggcgugaccacccccgugagcaccuacaugcugaccaacagcgagcugcugagccugaucaacgacaugcccaucaccaacgaccagaagaagcugaugagcaacaacgugcagaucgugagacagcagagcuacagcaucaugugcaucaucaaggaggaggugcuggccuacguggugcagcugccccuguacggcgugaucgacacccccugcuggaagcugcacaccagcccccugugcaccaccaacaccaaggagggcagcaacaucugccugaccagaaccgacagaggcugguacugcgacaacgccggcagcgugagcuucuucccccaggccgagaccugcaaggugcagagcaacagaguguucugcgacaccaugaacagccugacccugcccagcgaggugaaccugugcaacguggacaucuucaaccccaaguacgacugcaagaucaugaccagcaagaccgacgugagcagcagcgugaucaccagccugggcgccaucgugagcugcuacggcaagaccaagugcaccgccagcaacaagaacagaggcaucaucaagaccuucagcaacggcugcgacuacgugagcaacaagggcguggacaccgugagcgugggcaacacccuguacugcgugaacaagcaggagggccagagccuguacgugaagggcgagcccaucaucaacuucuacgacccccugguguuccccagcgacgaguucgacgccagcaucagccaggugaacgagaagaucaaccagagccuggccuucaucagaaagagcgacgagcugcugcacaacgugaacgccggcaagagcaccaccaacaucaugaucaccaccaucaucaucgugaucaucgugauccugcugagccugaucgccgugggccugcugcuguacugcaaggccagaagcacccccgugacccugagcaaggaccagcugagcggcaucaacaacaucgccuucagcaacugaggacuagugaagggaacacccaaauuuaauucagccuuaagcacaauuaauuaagagugaaacguaauuguacaagcaguuggucacccaccauagggcaugaucaacaccgcaaccuuuccuuuuucccccagugauucugaaaaaccccucuucccuucagcuugcuuagauguuccaaauuuaguaagcuuaaggcggccuacagaagaaaaagaaaaaaaaggccacaaaaguucccucucacuuucaguaaauaaaauaaaagcagcaacagaaauaaagaaauaaaugaaauucaaaaugaaauaaauauuguguugugcagcauuaaaaaaucaauaaaaauuaaaaaugagcaagaucuaaaaaaaaaaaaaaaaaaaaaaaaaaaaaaaaaaaaaaaaaaaaaaaaaaaaaaaaaaaaaaaaugcaucccccccccccccccccccccccccccccccaaaggcucuuuucagagccaccagaauu

SEQ ID NO: 1946 - RNA, 2202 nt, Artificial Sequence
  mRNA product Design h-2 comprising derived and/or modified sequence from HRSV(A2)__F_DSCav1_mut1 (opt5)
gggagacccgugacccggaaguuguacggcuacgcgacuuucccucccacaaacccucgcgcccuuccuuuccuacuugggcccggcagaaagcuuaccauggagcugcucauccugaaggccaacgcuauuaccacaauccuuacggccgugaccuucugcuuugcgagcggccagaauauuacagaagaguucuaccaauccaccuguucugcugucagcaaaggguaucugggagcccucagaacaggcugguacaccuccguuaucacaauugaacugucuaacaucaaggagaauaaaugcaacgggaccgacgccaaggugaaacuuaucaagcaggaacuggauaaguauaaaaaugcugugacggagcuccagcugcugaugcagagcacccccgccacaggauccggcucugcuauuuguagcggggucgccgugugcaagguucuccaccuggagggagaagugaacaaaaucaaguccgcgcuucugagcaccaauaaagccgucgugucucucuccaacggcguuagcgugcugacauuuaagguccuugaccugaagaauuacauugauaaacaacuccugccuauccugaacaagcagucuuguuccauuccgaauaucgagaccgugauugaguuccagcagaaaaacaaucggcuccuggaaaucacgcgcgaguuuagcgugaacgcuggcgucacaacccccguuucuacauauaugcuuaccaauuccgaacugcucagccugaucaacgacaugccuauuaccaacgaucaaaagaaacuuauguccaauaacgugcagaucgugagacagcagucuuacagcauuaugugcaucauuaaggaggaaguccuggccuaugugguucaacucccccuguacggggugaucgacacaccuuguuggaaacugcauacgagcccccucugcaccacaaauaccaaggagggauccaacaucugucugacacggaccgaucgcggcugguacugcgacaaugcugggucugucuccuucuuuccucaggccgaaacguguaaggugcagagcaacagaguuuucugcgauacaaugaacucucuuacccugccgagcgaggugaaucucugcaaugucgacauuuuuaaccccaaauaugauuguaagaucaugaccuccaaaacagacgugucuagcuccgucauuaccagccugggagcgaucgugucuugcuacggcaagacaaaauguacggccuccaauaagaaccgggggauuaucaagaccuucagcaauggaugcgauuauguuucuaacaaaggcguggacacagucuccgugggcaauacccuuuacuguguuaacaagcaagaggggcagagccuguaugugaaaggagaaccuaucauuaacuuuuacgacccccucgucuucccuuccgaugaguuugacgcuucuaucagccaggugaaugaaaagauuaaccagucccuggccuucauccgcaaaucugaugagcugcuccacaaugugaacgcuggcaagagcacaaccaauauuaugaucacgaccauuaucaucguuauuaucgucauucugcuuucccugaucgccguggggcuccugcuguauugcaaggccagaagcacacccgugacccuuucuaaagaccaacucuccggaauuaacaauaucgcuuucagcaacugaggacuagugaagggaacacccaaauuuaauucagccuuaagcacaauuaauuaagagugaaacguaauuguacaagcaguuggucacccaccauagggcaugaucaacaccgcaaccuuuccuuuuucccccagugauucugaaaaaccccucuucccuucagcuugcuuagauguuccaaauuuaguaagcuuaaggcggccuacagaagaaaaagaaaaaaaaggccacaaaaguucccucucacuuucaguaaauaaaauaaaagcagcaacagaaauaaagaaauaaaugaaauucaaaaugaaauaaauauuguguugugcagcauuaaaaaaucaauaaaaauuaaaaaugagcaagaucuaaaaaaaaaaaaaaaaaaaaaaaaaaaaaaaaaaaaaaaaaaaaaaaaaaaaaaaaaaaaaaaaugcaucccccccccccccccccccccccccccccccaaaggcucuuuucagagccaccagaauu

SEQ ID NO: 1947 - RNA, 2202 nt, Artificial Sequence
  mRNA product Design h-2 comprising derived and/or modified sequence from HRSV(A2)__F_DSCav1_mut1 (opt6)
gggagacccgugacccggaaguuguacggcuacgcgacuuucccucccacaaacccucgcgcccuuccuuuccuacuugggcccggcagaaagcuuaccauggaacuauuaauacuaaaagcaaacgcuauaacaacaauacuaacagcagucacauucugcuuugcaucaggccaaaacaucacagaagaauuuuaccaaucaacaugcuccgccguaucgaaaggauaccuaggcgcauuaagaaccggaugguauacaucagucauaacaauugaacuaucuaacauaaaagaaaacaaauguaacggcacagaugccaaaguaaaacucaucaaacaagaauuagauaaauacaaaaacgcagucacugaacuacaacucuuaaugcaaucaacaccugcaacaggaucaggaucagcaauaugcucaggaguagccguauguaaaguacuacaccuagaaggagaagucaacaaaauaaaaucagcccuccuaaguacaaacaaagcugucguaucacuauccaaugguguuucaguacuaacuuucaaaguucuagaccuaaaaaacuacauagacaaacaacuacuaccaauacuaaauaaacaaaguuguucuauacccaacauagaaaccgucauagaauuucaacaaaaaaauaauagacuccuagaaauaacaagagaauuuucaguuaacgcagguguaacaaccccaguauccaccuauaugcuaacaaauucagaauuacuuucccuaaucaacgacaugcccauaacaaaugaccaaaaaaaauuaaugucaaacaacguccaaauaguucgucaacaaucauauucaauaaugugcauaauaaaagaagaagucuuagccuacguaguacaacuuccccuuuauggaguuaucgacacacccugcuggaaacuccacacuucaccacuauguacuacaaacacaaaagaaggauccaacaucugccucacaagaaccgaucgaggaugguacugugauaacgccggauccgucucauucuucccacaagcagaaacaugcaaaguacaaucaaacagaguauuuugcgacacaaugaacucccucacauuaccuucugaaguaaaccuauguaauguagacauauucaaccccaaauacgauugcaaaauaaugacaucaaagacagauguaucaucaagugucaucacaucccuaggagcaauugucucauguuaugguaaaacaaaaugcaccgcaucaaauaaaaacagaggcauaauaaaaaccuucucaaacgguugugacuacguauccaauaaaggcgucgacacaguaucaguagguaacacauuauauuguguaaacaaacaagaaggacagucccuauauguaaaaggagaaccaauaaucaacuucuacgacccacuuguuuucccuucugaugaauuugacgcaaguauaucacaaguaaaugaaaaaaucaaucaaucacuagccuuuauaagaaaaucagaugaauuauuacacaacguaaacgccggaaaaucaacaaccaacauaaugauaaccacaauaauaaucgucauaauagucauccuacuaucacucauagcaguuggacuccuacuauacugcaaagcacgaucaacaccaguaacauuauccaaagaccaacuaagugguaucaauaacaucgccuuuucaaacugaggacuagugaagggaacacccaaauuuaauucagccuuaagcacaauuaauuaagagugaaacguaauuguacaagcaguuggucacccaccauagggcaugaucaacaccgcaaccuuuccuuuuucccccagugauucugaaaaaccccucuucccuucagcuugcuuagauguuccaaauuuaguaagcuuaaggcggccuacagaagaaaaagaaaaaaaaggccacaaaaguucccucucacuuucaguaaauaaaauaaaagcagcaacagaaauaaagaaauaaaugaaauucaaaaugaaauaaauauuguguugugcagcauuaaaaaaucaauaaaaauuaaaaaugagcaagaucuaaaaaaaaaaaaaaaaaaaaaaaaaaaaaaaaaaaaaaaaaaaaaaaaaaaaaaaaaaaaaaaaugcaucccccccccccccccccccccccccccccccaaaggcucuuuucagagccaccagaauu

SEQ ID NO: 1948 - RNA, 2202 nt, Artificial Sequence
  mRNA product Design h-2 comprising derived and/or modified sequence from HRSV(A2)__F_DSCav1_mut1 (opt11)
gggagacccgugacccggaaguuguacggcuacgcgacuuucccucccacaaacccucgcgcccuuccuuuccuacuugggcccggcagaaagcuuaccauggaacuccuaauccucaaagccaacgcaaucaccacaauccucacugccgucaccuucugcuucgccuccggccaaaacauaacagaagaauuuuaccaaucaaccuguucagcggucuccaaaggcuaccucggcgcccuccgcaccggcugguacaccuccgugaucaccauagaacucuccaacaucaaggaaaacaaaugcaacggcaccgacgcgaaggucaaacuuauuaaacaagaacucgacaaauacaaaaacgcagucaccgaacuacaacuccuaaugcaguccacgccagccaccggcucuggcucagccauaugcuccgguguggccguaugcaaaguccuacaccucgaaggagaagucaacaaaauaaaauccgcccuacuguccacaaacaaggccguagucucccucucaaacggcgucucaguacucaccuucaaaguccuagaccucaagaacuacaucgacaaacaacuccuacccauacuaaacaaacaauccugcucaauccccaacaucgaaaccguaauagaauuucaacaaaaaaacaacagacuccuggagaucacccgggaauuuuccguaaacgccggagucacaacacccgucucaaccuacaugcuaacgaacucagagcuccucucacuuaucaacgacaugcccauaacaaacgaccaaaaaaaacucauguccaacaacgugcaaaucguccgacaacaauccuacuccaucaugugcaucauuaaagaagaaguccucgcauacguaguccagcucccccucuacggcgucauagacacccccugcuggaaacuacacacaucaccccucugcacaacaaacaccaaagaaggcuccaacaucugccucacccgcaccgaccgaggcugguacugcgauaacgccggcagcgucuccuucuucccccaagcagaaaccugcaagguccaauccaaccgaguuuucugcgacacuaugaacucgcucacccuccccuccgaagucaaccucugcaacgucgacauuuucaaccccaaauacgacugcaaaaucaugaccuccaagaccgacguauccuccuccgucaucaccucccuaggcgccauaguaaguugcuacggcaaaaccaagugcacagcaagcaacaaaaaccgaggaauaaucaaaaccuucuccaacggcugcgacuacguauccaacaagggcgucgacaccguauccguagggaacacccuuuacugcguaaacaaacaagaaggacaaucacucuacguaaaaggcgaacccauaaucaacuucuacgacccccucguauuucccuccgacgaauuugacgcaucaaucucacaggucaacgaaaaaauaaaccaaucgcuagcauucaucagaaaaucagacgaacuccuacacaacgucaacgcaggcaagagcaccaccaacaucaugaucaccaccaucaucaucgucauaaucgucauacuacucucacucauagcagucggccuccuccuauacuguaaagcaaggucgaccccagucacccuauccaaagaccaacuaagcggcaucaacaacaucgcguucucaaacuaaggacuagugaagggaacacccaaauuuaauucagccuuaagcacaauuaauuaagagugaaacguaauuguacaagcaguuggucacccaccauagggcaugaucaacaccgcaaccuuuccuuuuucccccagugauucugaaaaaccccucuucccuucagcuugcuuagauguuccaaauuuaguaagcuuaaggcggccuacagaagaaaaagaaaaaaaaggccacaaaaguucccucucacuuucaguaaauaaaauaaaagcagcaacagaaauaaagaaauaaaugaaauucaaaaugaaauaaauauuguguugugcagcauuaaaaaaucaauaaaaauuaaaaaugagcaagaucuaaaaaaaaaaaaaaaaaaaaaaaaaaaaaaaaaaaaaaaaaaaaaaaaaaaaaaaaaaaaaaaaugcaucccccccccccccccccccccccccccccccaaaggcucuuuucagagccaccagaauu

SEQ ID NO: 1949 - RNA, 1982 nt, Artificial Sequence
  mRNA product Design h-3 comprising derived and/or modified sequence from HRSV(A2)__F_DSCav1_mut1 (opt1)
gggagacccgugacccggaaguuguacggcuacgcgacuuucccucccacaaacccucgcgcccuuccuuuccuacuugggcccggcagaaagcuuaccauggagcugcucauccugaaggccaacgccaucaccaccauccugacggcggugaccuucugcuucgccagcggccagaacaucaccgaggaguucuaccaguccacgugcagcgccgucuccaagggguaccucggcgcccugcggaccggcugguacaccuccgugaucaccaucgagcugagcaacaucaaggagaacaagugcaacgggaccgacgccaaggugaagcucaucaagcaggagcuggacaaguacaagaacgcggucacggagcugcagcuccugaugcaguccaccccggcaaccggcuccggcuccgccaucugcagcggcgucgccgugugcaaggugcugcaccucgagggggaggucaacaagaucaagagcgcccugcuguccaccaacaaggccguggugagccucuccaacggcgucagcgugcugaccuucaaggugcuggaccucaagaacuacaucgacaagcagcugcugcccauccugaacaagcagagcugcuccauccccaacaucgagacggugaucgaguuccagcagaagaacaaccggcuccuggagaucacccgcgaguucagcgugaacgccggggucaccacccccguguccacguacaugcugaccaacagcgagcuccugucccugaucaacgacaugccgaucaccaacgaccagaagaagcucaugagcaacaacgugcagaucguccggcagcaguccuacagcaucaugugcaucaucaaggaggaggugcuggcguacgugguccagcugccccucuacggcgugaucgacacccccugcuggaagcugcacacgagcccccugugcaccaccaacaccaaggagggguccaacaucugccucacgcgcaccgaccggggcugguacugcgacaacgccggcagcgucuccuucuucccgcaggccgagaccugcaaggugcagagcaaccgcguguucugcgacaccaugaacucccugacgcugcccagcgagguaaaccucugcaacgucgacaucuucaaccccaaguacgacugcaagaucaugaccuccaagaccgacgugagcuccagcgugaucaccucccugggggccaucgucagcugcuacggcaagacgaagugcaccgccagcaacaagaaccgggggaucaucaagaccuucuccaacggcugcgacuacgugagcaacaagggcguggacaccguguccgucgggaacacccuguacugcgugaacaagcaggagggccagagccucuacgugaagggggagcccaucaucaacuucuacgacccgcuggucuuccccuccgacgaguucgacgcgagcaucucccaggugaacgagaagaucaaccagagccuggccuucauccgcaaguccgacgagcugcuccacaacgugaacgccggcaagagcacgaccaacaucaugaucaccaccaucaucaucgucaucaucgugauccugcugucccucaucgccguggggcugcugcucuacugcaaggcccggagcacgcccgucacccuguccaaggaccagcugagcggcaucaacaacaucgcguucuccaacugaggacuaguggaagcauuuuccuggcugauuaaaagaaauuacucagcuauggucaucuguuccuguuagaaggcuaugcagcauauuauauacuaugcgcauguuaugaaaugcauaauaaaaaauuuuaaaaaaucuaaaagaucuaaaaaaaaaaaaaaaaaaaaaaaaaaaaaaaaaaaaaaaaaaaaaaaaaaaaaaaaaaaaaaaaugcaucccccccccccccccccccccccccccccccaaaggcucuuuucagagccaccagaauu

SEQ ID NO: 1950 - RNA, 1982 nt, Artificial Sequence
  mRNA product Design h-3 comprising derived and/or modified sequence from HRSV(A2)__F_DSCav1_mut1 (opt1)
gggagacccgugacccggaaguuguacggcuacgcgacuuucccucccacaaacccucgcgcccuuccuuuccuacuugggcccggcagaaagcuuaccauggagcugcucauccugaaggccaacgccaucaccaccauccugacggcggugaccuucugcuucgccagcggccagaacaucaccgaggaguucuaccaguccacgugcagcgccgucuccaagggguaccucggcgcccugcgcaccgggugguacaccagcgugaucaccaucgagcuguccaacaucaaggagaacaagugcaacggcaccgacgccaaggugaagcucaucaagcaggagcuggacaaguacaagaacgcggucacggagcugcagcuccugaugcagagcacccccgccaccggguccggcagcgccaucugcuccggcguggccgugugcaagguccugcaccucgagggggaggugaacaagaucaagagcgcgcugcuguccaccaacaaggccguggucagccucuccaacggcgugagcgugcugacguucaagguccuggaccucaagaacuacaucgacaagcagcugcugccgauccucaacaagcaguccugcagcauccccaacaucgagaccgugaucgaguuccagcagaagaacaaccggcugcuggagaucacccgcgaguucuccgugaacgccggggucaccacgcccgugagcaccuacaugcucaccaacuccgagcugcugagccucaucaacgacaugcccaucaccaacgaccagaagaagcugaugagcaacaacgugcagaucguccggcagcaguccuacagcaucaugugcaucaucaaggaggaggugcuggccuacgugguccagcucccgcuguacggcgugaucgacacgcccugcuggaagcugcacaccagcccccucugcaccaccaacacgaaggagggguccaacaucugccugacccgcaccgaccggggcugguacugcgacaacgccggcuccgugagcuucuucccccaggcggagaccugcaagguccaguccaaccgcguguucugcgacacgaugaacagccugacccucccguccgaggucaaccugugcaacguggacaucuucaaccccaaguacgacugcaagaucaugaccagcaagaccgacguguccagcuccgucaucacgagccugggggccaucguguccugcuacggcaagaccaagugcaccgccagcaacaagaaccgggggaucaucaagaccuucuccaacggcugcgacuacgugagcaacaagggcgucgacacgguguccguggggaacacccucuacugcgucaacaagcaggagggccagagccuguacgugaagggggagcccaucaucaacuucuacgacccccugguguucccgagcgacgaguucgacgccuccaucagccaggucaacgagaagaucaaccagucccucgccuucauccgcaagagcgacgagcugcugcacaacgugaacgcgggcaaguccaccaccaacaucaugaucaccacgaucaucaucgugaucaucgucauccuccugagccugaucgccguggggcuccugcuguacugcaaggcccgguccacccccgugacccugagcaaggaccagcucuccggcaucaacaacaucgccuucagcaacugaggacuaguggaagcauuuuccuggcugauuaaaagaaauuacucagcuauggucaucuguuccuguuagaaggcuaugcagcauauuauauacuaugcgcauguuaugaaaugcauaauaaaaaauuuuaaaaaaucuaaaagaucuaaaaaaaaaaaaaaaaaaaaaaaaaaaaaaaaaaaaaaaaaaaaaaaaaaaaaaaaaaaaaaaaugcaucccccccccccccccccccccccccccccccaaaggcucuuuucagagccaccagaauu

SEQ ID NO: 1951 - RNA, 1982 nt, Artificial Sequence
  mRNA product Design h-3 comprising derived and/or modified sequence from HRSV(A2)__F_DSCav1_mut1 (opt2)
gggagacccgugacccggaaguuguacggcuacgcgacuuucccucccacaaacccucgcgcccuuccuuuccuacuugggcccggcagaaagcuuaccauggagcuccucauccucaaggccaacgccaucaccaccauccucaccgccgucaccuucugcuucgccuccggccagaacaucaccgaggaguucuaccaguccaccugcuccgccgucuccaagggcuaccucggcgcccuccgcaccggcugguacaccuccgucaucaccaucgagcucuccaacaucaaggagaacaagugcaacggcaccgacgccaaggucaagcucaucaagcaggagcucgacaaguacaagaacgccgucaccgagcuccagcuccucaugcaguccacccccgccaccggcuccggcuccgccaucugcuccggcgucgccgucugcaagguccuccaccucgagggcgaggucaacaagaucaaguccgcccuccucuccaccaacaaggccgucgucucccucuccaacggcgucuccguccucaccuucaagguccucgaccucaagaacuacaucgacaagcagcuccuccccauccucaacaagcaguccugcuccauccccaacaucgagaccgucaucgaguuccagcagaagaacaaccgccuccucgagaucacccgcgaguucuccgucaacgccggcgucaccacccccgucuccaccuacaugcucaccaacuccgagcuccucucccucaucaacgacaugcccaucaccaacgaccagaagaagcucauguccaacaacguccagaucguccgccagcaguccuacuccaucaugugcaucaucaaggaggagguccucgccuacgucguccagcucccccucuacggcgucaucgacacccccugcuggaagcuccacaccuccccccucugcaccaccaacaccaaggagggcuccaacaucugccucacccgcaccgaccgcggcugguacugcgacaacgccggcuccgucuccuucuucccccaggccgagaccugcaagguccaguccaaccgcgucuucugcgacaccaugaacucccucacccuccccuccgaggucaaccucugcaacgucgacaucuucaaccccaaguacgacugcaagaucaugaccuccaagaccgacgucuccuccuccgucaucaccucccucggcgccaucgucuccugcuacggcaagaccaagugcaccgccuccaacaagaaccgcggcaucaucaagaccuucuccaacggcugcgacuacgucuccaacaagggcgucgacaccgucuccgucggcaacacccucuacugcgucaacaagcaggagggccagucccucuacgucaagggcgagcccaucaucaacuucuacgacccccucgucuuccccuccgacgaguucgacgccuccaucucccaggucaacgagaagaucaaccagucccucgccuucauccgcaaguccgacgagcuccuccacaacgucaacgccggcaaguccaccaccaacaucaugaucaccaccaucaucaucgucaucaucgucauccuccucucccucaucgccgucggccuccuccucuacugcaaggcccgcuccacccccgucacccucuccaaggaccagcucuccggcaucaacaacaucgccuucuccaacugaggacuaguggaagcauuuuccuggcugauuaaaagaaauuacucagcuauggucaucuguuccuguuagaaggcuaugcagcauauuauauacuaugcgcauguuaugaaaugcauaauaaaaaauuuuaaaaaaucuaaaagaucuaaaaaaaaaaaaaaaaaaaaaaaaaaaaaaaaaaaaaaaaaaaaaaaaaaaaaaaaaaaaaaaaugcaucccccccccccccccccccccccccccccccaaaggcucuuuucagagccaccagaauu

SEQ ID NO: 1952 - RNA, 1982 nt, Artificial Sequence
  mRNA product Design h-3 comprising derived and/or modified sequence from HRSV(A2)__F_DSCav1_mut1 (opt3)
gggagacccgugacccggaaguuguacggcuacgcgacuuucccucccacaaacccucgcgcccuuccuuuccuacuugggcccggcagaaagcuuaccauggagcugcucauccuuaaggccaacgcuauuaccacaauacugacugcagugacguucugcuuugccagcggccagaauaucaccgaagaguucuaccaauccacauguucugcggucucaaaaggguauuugggagcuuuaagaacugguugguacaccaguguuauuacaaucgaacugagcaacauuaaggagaauaaaugcaacggcaccgacgccaaggugaaacuaaucaagcaggaacucgauaaguauaaaaaugcaguaacugagcugcagcuucugaugcaguccacacccgccaccgggucuggaucggcuauauguucaggcguggcagucugcaagguguugcaccucgagggugaaguuaacaaaaucaagagcgcccugcugaguacgaauaaagcuguggucucccucucuaacggggugagcguauuaacuuuuaagguucuggaccuuaagaauuacauugauaaacaauugcugccuauccuaaacaagcaguccuguucaauuccaaauaucgagaccgugauagaguuccagcagaaaaacaauaggcuccuggaaauuacacgggaguuuagugucaacgccggagugacuaccccggugagcacauauaugcuuaccaauucugaacuguugucccucaucaacgacaugcccauuacgaacgaucaaaagaaacugaugucaaauaacguccagaucguucgccagcagagcuacaguaucaugugcauuauaaaggaggaaguguuagcguauguagugcaacugccucucuacggcgucaucgacacuccauguuggaaacuucauacaucuccccugugcaccacuaauacaaaggagggcuccaacauuuguuugacccgaacggaucgugggugguacugcgacaaugcaggaagcgugucguucuuuccucaggccgaaaccuguaagguucagucuaacagaguguucugcgauacaaugaacucccuaacucugccaucagaggucaaucucugcaauguggacaucuuuaaccccaaauaugauuguaagauaaugaccaguaaaacagacguaagcuccucuguuauuacuagccugggugcuaucgugucaugcuacggcaagaccaaauguacagccaguaauaagaacagggggaucauuaagaccuucuccaauggaugcgauuaugucagcaacaaaggcguggacacugucucuguggguaauacgcuuuacuguguuaacaagcaagaggggcagucacuguaugugaaaggagaaccuaucauuaacuuuuacgacccauugguauucccgagugaugaguuugacgcaagcauaucccaggucaaugaaaagaucaaccagucucucgcuuucauucggaaaucggaugagcuguuacacaaugugaacgccggcaagagcacaaccaauaucaugaucacuaccauuauaaucguuauuaucgugauucugcuaucccucaucgcggucggccugcuuuuguauugcaaggcccgcucaacacccgugacccugaguaaagaccaacucucugggauaaacaauaucgcauucagcaacugaggacuaguggaagcauuuuccuggcugauuaaaagaaauuacucagcuauggucaucuguuccuguuagaaggcuaugcagcauauuauauacuaugcgcauguuaugaaaugcauaauaaaaaauuuuaaaaaaucuaaaagaucuaaaaaaaaaaaaaaaaaaaaaaaaaaaaaaaaaaaaaaaaaaaaaaaaaaaaaaaaaaaaaaaaugcaucccccccccccccccccccccccccccccccaaaggcucuuuucagagccaccagaauu

SEQ ID NO: 1953 - RNA, 1982 nt, Artificial Sequence
  mRNA product Design h-3 comprising derived and/or modified sequence from HRSV(A2)__F_DSCav1_mut1 (opt4)
gggagacccgugacccggaaguuguacggcuacgcgacuuucccucccacaaacccucgcgcccuuccuuuccuacuugggcccggcagaaagcuuaccauggagcugcugauccugaaggccaacgccaucaccaccauccugaccgccgugaccuucugcuucgccagcggccagaacaucaccgaggaguucuaccagagcaccugcagcgccgugagcaagggcuaccugggcgcccugagaaccggcugguacaccagcgugaucaccaucgagcugagcaacaucaaggagaacaagugcaacggcaccgacgccaaggugaagcugaucaagcaggagcuggacaaguacaagaacgccgugaccgagcugcagcugcugaugcagagcacccccgccaccggcagcggcagcgccaucugcagcggcguggccgugugcaaggugcugcaccuggagggcgaggugaacaagaucaagagcgcccugcugagcaccaacaaggccguggugagccugagcaacggcgugagcgugcugaccuucaaggugcuggaccugaagaacuacaucgacaagcagcugcugcccauccugaacaagcagagcugcagcauccccaacaucgagaccgugaucgaguuccagcagaagaacaacagacugcuggagaucaccagagaguucagcgugaacgccggcgugaccacccccgugagcaccuacaugcugaccaacagcgagcugcugagccugaucaacgacaugcccaucaccaacgaccagaagaagcugaugagcaacaacgugcagaucgugagacagcagagcuacagcaucaugugcaucaucaaggaggaggugcuggccuacguggugcagcugccccuguacggcgugaucgacacccccugcuggaagcugcacaccagcccccugugcaccaccaacaccaaggagggcagcaacaucugccugaccagaaccgacagaggcugguacugcgacaacgccggcagcgugagcuucuucccccaggccgagaccugcaaggugcagagcaacagaguguucugcgacaccaugaacagccugacccugcccagcgaggugaaccugugcaacguggacaucuucaaccccaaguacgacugcaagaucaugaccagcaagaccgacgugagcagcagcgugaucaccagccugggcgccaucgugagcugcuacggcaagaccaagugcaccgccagcaacaagaacagaggcaucaucaagaccuucagcaacggcugcgacuacgugagcaacaagggcguggacaccgugagcgugggcaacacccuguacugcgugaacaagcaggagggccagagccuguacgugaagggcgagcccaucaucaacuucuacgacccccugguguuccccagcgacgaguucgacgccagcaucagccaggugaacgagaagaucaaccagagccuggccuucaucagaaagagcgacgagcugcugcacaacgugaacgccggcaagagcaccaccaacaucaugaucaccaccaucaucaucgugaucaucgugauccugcugagccugaucgccgugggccugcugcuguacugcaaggccagaagcacccccgugacccugagcaaggaccagcugagcggcaucaacaacaucgccuucagcaacugaggacuaguggaagcauuuuccuggcugauuaaaagaaauuacucagcuauggucaucuguuccuguuagaaggcuaugcagcauauuauauacuaugcgcauguuaugaaaugcauaauaaaaaauuuuaaaaaaucuaaaagaucuaaaaaaaaaaaaaaaaaaaaaaaaaaaaaaaaaaaaaaaaaaaaaaaaaaaaaaaaaaaaaaaaugcaucccccccccccccccccccccccccccccccaaaggcucuuuucagagccaccagaauu

SEQ ID NO: 1954 - RNA, 1982 nt, Artificial Sequence
  mRNA product Design h-3 comprising derived and/or modified sequence from HRSV(A2)__F_DSCav1_mut1 (opt5)
gggagacccgugacccggaaguuguacggcuacgcgacuuucccucccacaaacccucgcgcccuuccuuuccuacuugggcccggcagaaagcuuaccauggagcugcucauccugaaggccaacgcuauuaccacaauccuuacggccgugaccuucugcuuugcgagcggccagaauauuacagaagaguucuaccaauccaccuguucugcugucagcaaaggguaucugggagcccucagaacaggcugguacaccuccguuaucacaauugaacugucuaacaucaaggagaauaaaugcaacgggaccgacgccaaggugaaacuuaucaagcaggaacuggauaaguauaaaaaugcugugacggagcuccagcugcugaugcagagcacccccgccacaggauccggcucugcuauuuguagcggggucgccgugugcaagguucuccaccuggagggagaagugaacaaaaucaaguccgcgcuucugagcaccaauaaagccgucgugucucucuccaacggcguuagcgugcugacauuuaagguccuugaccugaagaauuacauugauaaacaacuccugccuauccugaacaagcagucuuguuccauuccgaauaucgagaccgugauugaguuccagcagaaaaacaaucggcuccuggaaaucacgcgcgaguuuagcgugaacgcuggcgucacaacccccguuucuacauauaugcuuaccaauuccgaacugcucagccugaucaacgacaugccuauuaccaacgaucaaaagaaacuuauguccaauaacgugcagaucgugagacagcagucuuacagcauuaugugcaucauuaaggaggaaguccuggccuaugugguucaacucccccuguacggggugaucgacacaccuuguuggaaacugcauacgagcccccucugcaccacaaauaccaaggagggauccaacaucugucugacacggaccgaucgcggcugguacugcgacaaugcugggucugucuccuucuuuccucaggccgaaacguguaaggugcagagcaacagaguuuucugcgauacaaugaacucucuuacccugccgagcgaggugaaucucugcaaugucgacauuuuuaaccccaaauaugauuguaagaucaugaccuccaaaacagacgugucuagcuccgucauuaccagccugggagcgaucgugucuugcuacggcaagacaaaauguacggccuccaauaagaaccgggggauuaucaagaccuucagcaauggaugcgauuauguuucuaacaaaggcguggacacagucuccgugggcaauacccuuuacuguguuaacaagcaagaggggcagagccuguaugugaaaggagaaccuaucauuaacuuuuacgacccccucgucuucccuuccgaugaguuugacgcuucuaucagccaggugaaugaaaagauuaaccagucccuggccuucauccgcaaaucugaugagcugcuccacaaugugaacgcuggcaagagcacaaccaauauuaugaucacgaccauuaucaucguuauuaucgucauucugcuuucccugaucgccguggggcuccugcuguauugcaaggccagaagcacacccgugacccuuucuaaagaccaacucuccggaauuaacaauaucgcuuucagcaacugaggacuaguggaagcauuuuccuggcugauuaaaagaaauuacucagcuauggucaucuguuccuguuagaaggcuaugcagcauauuauauacuaugcgcauguuaugaaaugcauaauaaaaaauuuuaaaaaaucuaaaagaucuaaaaaaaaaaaaaaaaaaaaaaaaaaaaaaaaaaaaaaaaaaaaaaaaaaaaaaaaaaaaaaaaugcaucccccccccccccccccccccccccccccccaaaggcucuuuucagagccaccagaauu

SEQ ID NO: 1955 - RNA, 1982 nt, Artificial Sequence
  mRNA product Design h-3 comprising derived and/or modified sequence from HRSV(A2)__F_DSCav1_mut1 (opt6)
gggagacccgugacccggaaguuguacggcuacgcgacuuucccucccacaaacccucgcgcccuuccuuuccuacuugggcccggcagaaagcuuaccauggaacuauuaauacuaaaagcaaacgcuauaacaacaauacuaacagcagucacauucugcuuugcaucaggccaaaacaucacagaagaauuuuaccaaucaacaugcuccgccguaucgaaaggauaccuaggcgcauuaagaaccggaugguauacaucagucauaacaauugaacuaucuaacauaaaagaaaacaaauguaacggcacagaugccaaaguaaaacucaucaaacaagaauuagauaaauacaaaaacgcagucacugaacuacaacucuuaaugcaaucaacaccugcaacaggaucaggaucagcaauaugcucaggaguagccguauguaaaguacuacaccuagaaggagaagucaacaaaauaaaaucagcccuccuaaguacaaacaaagcugucguaucacuauccaaugguguuucaguacuaacuuucaaaguucuagaccuaaaaaacuacauagacaaacaacuacuaccaauacuaaauaaacaaaguuguucuauacccaacauagaaaccgucauagaauuucaacaaaaaaauaauagacuccuagaaauaacaagagaauuuucaguuaacgcagguguaacaaccccaguauccaccuauaugcuaacaaauucagaauuacuuucccuaaucaacgacaugcccauaacaaaugaccaaaaaaaauuaaugucaaacaacguccaaauaguucgucaacaaucauauucaauaaugugcauaauaaaagaagaagucuuagccuacguaguacaacuuccccuuuauggaguuaucgacacacccugcuggaaacuccacacuucaccacuauguacuacaaacacaaaagaaggauccaacaucugccucacaagaaccgaucgaggaugguacugugauaacgccggauccgucucauucuucccacaagcagaaacaugcaaaguacaaucaaacagaguauuuugcgacacaaugaacucccucacauuaccuucugaaguaaaccuauguaauguagacauauucaaccccaaauacgauugcaaaauaaugacaucaaagacagauguaucaucaagugucaucacaucccuaggagcaauugucucauguuaugguaaaacaaaaugcaccgcaucaaauaaaaacagaggcauaauaaaaaccuucucaaacgguugugacuacguauccaauaaaggcgucgacacaguaucaguagguaacacauuauauuguguaaacaaacaagaaggacagucccuauauguaaaaggagaaccaauaaucaacuucuacgacccacuuguuuucccuucugaugaauuugacgcaaguauaucacaaguaaaugaaaaaaucaaucaaucacuagccuuuauaagaaaaucagaugaauuauuacacaacguaaacgccggaaaaucaacaaccaacauaaugauaaccacaauaauaaucgucauaauagucauccuacuaucacucauagcaguuggacuccuacuauacugcaaagcacgaucaacaccaguaacauuauccaaagaccaacuaagugguaucaauaacaucgccuuuucaaacugaggacuaguggaagcauuuuccuggcugauuaaaagaaauuacucagcuauggucaucuguuccuguuagaaggcuaugcagcauauuauauacuaugcgcauguuaugaaaugcauaauaaaaaauuuuaaaaaaucuaaaagaucuaaaaaaaaaaaaaaaaaaaaaaaaaaaaaaaaaaaaaaaaaaaaaaaaaaaaaaaaaaaaaaaaugcaucccccccccccccccccccccccccccccccaaaggcucuuuucagagccaccagaauu

SEQ ID NO: 1956 - RNA, 1982 nt, Artificial Sequence
  mRNA product Design h-3 comprising derived and/or modified sequence from HRSV(A2)__F_DSCav1_mut1 (opt11)
gggagacccgugacccggaaguuguacggcuacgcgacuuucccucccacaaacccucgcgcccuuccuuuccuacuugggcccggcagaaagcuuaccauggaacuccuaauccucaaagccaacgcaaucaccacaauccucacugccgucaccuucugcuucgccuccggccaaaacauaacagaagaauuuuaccaaucaaccuguucagcggucuccaaaggcuaccucggcgcccuccgcaccggcugguacaccuccgugaucaccauagaacucuccaacaucaaggaaaacaaaugcaacggcaccgacgcgaaggucaaacuuauuaaacaagaacucgacaaauacaaaaacgcagucaccgaacuacaacuccuaaugcaguccacgccagccaccggcucuggcucagccauaugcuccgguguggccguaugcaaaguccuacaccucgaaggagaagucaacaaaauaaaauccgcccuacuguccacaaacaaggccguagucucccucucaaacggcgucucaguacucaccuucaaaguccuagaccucaagaacuacaucgacaaacaacuccuacccauacuaaacaaacaauccugcucaauccccaacaucgaaaccguaauagaauuucaacaaaaaaacaacagacuccuggagaucacccgggaauuuuccguaaacgccggagucacaacacccgucucaaccuacaugcuaacgaacucagagcuccucucacuuaucaacgacaugcccauaacaaacgaccaaaaaaaacucauguccaacaacgugcaaaucguccgacaacaauccuacuccaucaugugcaucauuaaagaagaaguccucgcauacguaguccagcucccccucuacggcgucauagacacccccugcuggaaacuacacacaucaccccucugcacaacaaacaccaaagaaggcuccaacaucugccucacccgcaccgaccgaggcugguacugcgauaacgccggcagcgucuccuucuucccccaagcagaaaccugcaagguccaauccaaccgaguuuucugcgacacuaugaacucgcucacccuccccuccgaagucaaccucugcaacgucgacauuuucaaccccaaauacgacugcaaaaucaugaccuccaagaccgacguauccuccuccgucaucaccucccuaggcgccauaguaaguugcuacggcaaaaccaagugcacagcaagcaacaaaaaccgaggaauaaucaaaaccuucuccaacggcugcgacuacguauccaacaagggcgucgacaccguauccguagggaacacccuuuacugcguaaacaaacaagaaggacaaucacucuacguaaaaggcgaacccauaaucaacuucuacgacccccucguauuucccuccgacgaauuugacgcaucaaucucacaggucaacgaaaaaauaaaccaaucgcuagcauucaucagaaaaucagacgaacuccuacacaacgucaacgcaggcaagagcaccaccaacaucaugaucaccaccaucaucaucgucauaaucgucauacuacucucacucauagcagucggccuccuccuauacuguaaagcaaggucgaccccagucacccuauccaaagaccaacuaagcggcaucaacaacaucgcguucucaaacuaaggacuaguggaagcauuuuccuggcugauuaaaagaaauuacucagcuauggucaucuguuccuguuagaaggcuaugcagcauauuauauacuaugcgcauguuaugaaaugcauaauaaaaaauuuuaaaaaaucuaaaagaucuaaaaaaaaaaaaaaaaaaaaaaaaaaaaaaaaaaaaaaaaaaaaaaaaaaaaaaaaaaaaaaaaugcaucccccccccccccccccccccccccccccccaaaggcucuuuucagagccaccagaauu

SEQ ID NO: 1957 - RNA, 2045 nt, Artificial Sequence
  mRNA product Design h-4 comprising derived and/or modified sequence from HRSV(A2)__F_DSCav1_mut1 (opt1)
gggagagggcgcuuggcuugcaaggacccugagcugcggcauugaagcacacccaacccaacucgacugaagucagccucacugaaccggaucugagaaucuucucucucugggcuugccagggcucuccgaaccuagcuagcauccucuucaauuccaacuagaaagcuuaccauggagcugcucauccugaaggccaacgccaucaccaccauccugacggcggugaccuucugcuucgccagcggccagaacaucaccgaggaguucuaccaguccacgugcagcgccgucuccaagggguaccucggcgcccugcggaccggcugguacaccuccgugaucaccaucgagcugagcaacaucaaggagaacaagugcaacgggaccgacgccaaggugaagcucaucaagcaggagcuggacaaguacaagaacgcggucacggagcugcagcuccugaugcaguccaccccggcaaccggcuccggcuccgccaucugcagcggcgucgccgugugcaaggugcugcaccucgagggggaggucaacaagaucaagagcgcccugcuguccaccaacaaggccguggugagccucuccaacggcgucagcgugcugaccuucaaggugcuggaccucaagaacuacaucgacaagcagcugcugcccauccugaacaagcagagcugcuccauccccaacaucgagacggugaucgaguuccagcagaagaacaaccggcuccuggagaucacccgcgaguucagcgugaacgccggggucaccacccccguguccacguacaugcugaccaacagcgagcuccugucccugaucaacgacaugccgaucaccaacgaccagaagaagcucaugagcaacaacgugcagaucguccggcagcaguccuacagcaucaugugcaucaucaaggaggaggugcuggcguacgugguccagcugccccucuacggcgugaucgacacccccugcuggaagcugcacacgagcccccugugcaccaccaacaccaaggagggguccaacaucugccucacgcgcaccgaccggggcugguacugcgacaacgccggcagcgucuccuucuucccgcaggccgagaccugcaaggugcagagcaaccgcguguucugcgacaccaugaacucccugacgcugcccagcgagguaaaccucugcaacgucgacaucuucaaccccaaguacgacugcaagaucaugaccuccaagaccgacgugagcuccagcgugaucaccucccugggggccaucgucagcugcuacggcaagacgaagugcaccgccagcaacaagaaccgggggaucaucaagaccuucuccaacggcugcgacuacgugagcaacaagggcguggacaccguguccgucgggaacacccuguacugcgugaacaagcaggagggccagagccucuacgugaagggggagcccaucaucaacuucuacgacccgcuggucuuccccuccgacgaguucgacgcgagcaucucccaggugaacgagaagaucaaccagagccuggccuucauccgcaaguccgacgagcugcuccacaacgugaacgccggcaagagcacgaccaacaucaugaucaccaccaucaucaucgucaucaucgugauccugcugucccucaucgccguggggcugcugcucuacugcaaggcccggagcacgcccgucacccuguccaaggaccagcugagcggcaucaacaacaucgcguucuccaacugaggacuaguaauaaggaaacuguaugaaugucugugggcaggaagugaagagauccuucuguaaagguuuuuggaauuaugucugcugaauaauaaacuuuuuugaaauaauaaaucugguagaaaaaugagaucuaaaaaaaaaaaaaaaaaaaaaaaaaaaaaaaaaaaaaaaaaaaaaaaaaaaaaaaaaaaaaaaaugcaucccccccccccccccccccccccccccccccaaaggcucuuuucagagccaccagaauu

SEQ ID NO: 1958 - RNA, 2045 nt, Artificial Sequence
  mRNA product Design h-4 comprising derived and/or modified sequence from HRSV(A2)__F_DSCav1_mut1 (opt1)
gggagagggcgcuuggcuugcaaggacccugagcugcggcauugaagcacacccaacccaacucgacugaagucagccucacugaaccggaucugagaaucuucucucucugggcuugccagggcucuccgaaccuagcuagcauccucuucaauuccaacuagaaagcuuaccauggagcugcucauccugaaggccaacgccaucaccaccauccugacggcggugaccuucugcuucgccagcggccagaacaucaccgaggaguucuaccaguccacgugcagcgccgucuccaagggguaccucggcgcccugcgcaccgggugguacaccagcgugaucaccaucgagcuguccaacaucaaggagaacaagugcaacggcaccgacgccaaggugaagcucaucaagcaggagcuggacaaguacaagaacgcggucacggagcugcagcuccugaugcagagcacccccgccaccggguccggcagcgccaucugcuccggcguggccgugugcaagguccugcaccucgagggggaggugaacaagaucaagagcgcgcugcuguccaccaacaaggccguggucagccucuccaacggcgugagcgugcugacguucaagguccuggaccucaagaacuacaucgacaagcagcugcugccgauccucaacaagcaguccugcagcauccccaacaucgagaccgugaucgaguuccagcagaagaacaaccggcugcuggagaucacccgcgaguucuccgugaacgccggggucaccacgcccgugagcaccuacaugcucaccaacuccgagcugcugagccucaucaacgacaugcccaucaccaacgaccagaagaagcugaugagcaacaacgugcagaucguccggcagcaguccuacagcaucaugugcaucaucaaggaggaggugcuggccuacgugguccagcucccgcuguacggcgugaucgacacgcccugcuggaagcugcacaccagcccccucugcaccaccaacacgaaggagggguccaacaucugccugacccgcaccgaccggggcugguacugcgacaacgccggcuccgugagcuucuucccccaggcggagaccugcaagguccaguccaaccgcguguucugcgacacgaugaacagccugacccucccguccgaggucaaccugugcaacguggacaucuucaaccccaaguacgacugcaagaucaugaccagcaagaccgacguguccagcuccgucaucacgagccugggggccaucguguccugcuacggcaagaccaagugcaccgccagcaacaagaaccgggggaucaucaagaccuucuccaacggcugcgacuacgugagcaacaagggcgucgacacgguguccguggggaacacccucuacugcgucaacaagcaggagggccagagccuguacgugaagggggagcccaucaucaacuucuacgacccccugguguucccgagcgacgaguucgacgccuccaucagccaggucaacgagaagaucaaccagucccucgccuucauccgcaagagcgacgagcugcugcacaacgugaacgcgggcaaguccaccaccaacaucaugaucaccacgaucaucaucgugaucaucgucauccuccugagccugaucgccguggggcuccugcuguacugcaaggcccgguccacccccgugacccugagcaaggaccagcucuccggcaucaacaacaucgccuucagcaacugaggacuaguaauaaggaaacuguaugaaugucugugggcaggaagugaagagauccuucuguaaagguuuuuggaauuaugucugcugaauaauaaacuuuuuugaaauaauaaaucugguagaaaaaugagaucuaaaaaaaaaaaaaaaaaaaaaaaaaaaaaaaaaaaaaaaaaaaaaaaaaaaaaaaaaaaaaaaaugcaucccccccccccccccccccccccccccccccaaaggcucuuuucagagccaccagaauu

SEQ ID NO: 1959 - RNA, 2045 nt, Artificial Sequence
  mRNA product Design h-4 comprising derived and/or modified sequence from HRSV(A2)__F_DSCav1_mut1 (opt2)
gggagagggcgcuuggcuugcaaggacccugagcugcggcauugaagcacacccaacccaacucgacugaagucagccucacugaaccggaucugagaaucuucucucucugggcuugccagggcucuccgaaccuagcuagcauccucuucaauuccaacuagaaagcuuaccauggagcuccucauccucaaggccaacgccaucaccaccauccucaccgccgucaccuucugcuucgccuccggccagaacaucaccgaggaguucuaccaguccaccugcuccgccgucuccaagggcuaccucggcgcccuccgcaccggcugguacaccuccgucaucaccaucgagcucuccaacaucaaggagaacaagugcaacggcaccgacgccaaggucaagcucaucaagcaggagcucgacaaguacaagaacgccgucaccgagcuccagcuccucaugcaguccacccccgccaccggcuccggcuccgccaucugcuccggcgucgccgucugcaagguccuccaccucgagggcgaggucaacaagaucaaguccgcccuccucuccaccaacaaggccgucgucucccucuccaacggcgucuccguccucaccuucaagguccucgaccucaagaacuacaucgacaagcagcuccuccccauccucaacaagcaguccugcuccauccccaacaucgagaccgucaucgaguuccagcagaagaacaaccgccuccucgagaucacccgcgaguucuccgucaacgccggcgucaccacccccgucuccaccuacaugcucaccaacuccgagcuccucucccucaucaacgacaugcccaucaccaacgaccagaagaagcucauguccaacaacguccagaucguccgccagcaguccuacuccaucaugugcaucaucaaggaggagguccucgccuacgucguccagcucccccucuacggcgucaucgacacccccugcuggaagcuccacaccuccccccucugcaccaccaacaccaaggagggcuccaacaucugccucacccgcaccgaccgcggcugguacugcgacaacgccggcuccgucuccuucuucccccaggccgagaccugcaagguccaguccaaccgcgucuucugcgacaccaugaacucccucacccuccccuccgaggucaaccucugcaacgucgacaucuucaaccccaaguacgacugcaagaucaugaccuccaagaccgacgucuccuccuccgucaucaccucccucggcgccaucgucuccugcuacggcaagaccaagugcaccgccuccaacaagaaccgcggcaucaucaagaccuucuccaacggcugcgacuacgucuccaacaagggcgucgacaccgucuccgucggcaacacccucuacugcgucaacaagcaggagggccagucccucuacgucaagggcgagcccaucaucaacuucuacgacccccucgucuuccccuccgacgaguucgacgccuccaucucccaggucaacgagaagaucaaccagucccucgccuucauccgcaaguccgacgagcuccuccacaacgucaacgccggcaaguccaccaccaacaucaugaucaccaccaucaucaucgucaucaucgucauccuccucucccucaucgccgucggccuccuccucuacugcaaggcccgcuccacccccgucacccucuccaaggaccagcucuccggcaucaacaacaucgccuucuccaacugaggacuaguaauaaggaaacuguaugaaugucugugggcaggaagugaagagauccuucuguaaagguuuuuggaauuaugucugcugaauaauaaacuuuuuugaaauaauaaaucugguagaaaaaugagaucuaaaaaaaaaaaaaaaaaaaaaaaaaaaaaaaaaaaaaaaaaaaaaaaaaaaaaaaaaaaaaaaaugcaucccccccccccccccccccccccccccccccaaaggcucuuuucagagccaccagaauu

SEQ ID NO: 1960 - RNA, 2045 nt, Artificial Sequence
  mRNA product Design h-4 comprising derived and/or modified sequence from HRSV(A2)__F_DSCav1_mut1 (opt3)
gggagagggcgcuuggcuugcaaggacccugagcugcggcauugaagcacacccaacccaacucgacugaagucagccucacugaaccggaucugagaaucuucucucucugggcuugccagggcucuccgaaccuagcuagcauccucuucaauuccaacuagaaagcuuaccauggagcugcucauccuuaaggccaacgcuauuaccacaauacugacugcagugacguucugcuuugccagcggccagaauaucaccgaagaguucuaccaauccacauguucugcggucucaaaaggguauuugggagcuuuaagaacugguugguacaccaguguuauuacaaucgaacugagcaacauuaaggagaauaaaugcaacggcaccgacgccaaggugaaacuaaucaagcaggaacucgauaaguauaaaaaugcaguaacugagcugcagcuucugaugcaguccacacccgccaccgggucuggaucggcuauauguucaggcguggcagucugcaagguguugcaccucgagggugaaguuaacaaaaucaagagcgcccugcugaguacgaauaaagcuguggucucccucucuaacggggugagcguauuaacuuuuaagguucuggaccuuaagaauuacauugauaaacaauugcugccuauccuaaacaagcaguccuguucaauuccaaauaucgagaccgugauagaguuccagcagaaaaacaauaggcuccuggaaauuacacgggaguuuagugucaacgccggagugacuaccccggugagcacauauaugcuuaccaauucugaacuguugucccucaucaacgacaugcccauuacgaacgaucaaaagaaacugaugucaaauaacguccagaucguucgccagcagagcuacaguaucaugugcauuauaaaggaggaaguguuagcguauguagugcaacugccucucuacggcgucaucgacacuccauguuggaaacuucauacaucuccccugugcaccacuaauacaaaggagggcuccaacauuuguuugacccgaacggaucgugggugguacugcgacaaugcaggaagcgugucguucuuuccucaggccgaaaccuguaagguucagucuaacagaguguucugcgauacaaugaacucccuaacucugccaucagaggucaaucucugcaauguggacaucuuuaaccccaaauaugauuguaagauaaugaccaguaaaacagacguaagcuccucuguuauuacuagccugggugcuaucgugucaugcuacggcaagaccaaauguacagccaguaauaagaacagggggaucauuaagaccuucuccaauggaugcgauuaugucagcaacaaaggcguggacacugucucuguggguaauacgcuuuacuguguuaacaagcaagaggggcagucacuguaugugaaaggagaaccuaucauuaacuuuuacgacccauugguauucccgagugaugaguuugacgcaagcauaucccaggucaaugaaaagaucaaccagucucucgcuuucauucggaaaucggaugagcuguuacacaaugugaacgccggcaagagcacaaccaauaucaugaucacuaccauuauaaucguuauuaucgugauucugcuaucccucaucgcggucggccugcuuuuguauugcaaggcccgcucaacacccgugacccugaguaaagaccaacucucugggauaaacaauaucgcauucagcaacugaggacuaguaauaaggaaacuguaugaaugucugugggcaggaagugaagagauccuucuguaaagguuuuuggaauuaugucugcugaauaauaaacuuuuuugaaauaauaaaucugguagaaaaaugagaucuaaaaaaaaaaaaaaaaaaaaaaaaaaaaaaaaaaaaaaaaaaaaaaaaaaaaaaaaaaaaaaaaugcaucccccccccccccccccccccccccccccccaaaggcucuuuucagagccaccagaauu

SEQ ID NO: 1961 - RNA, 2045 nt, Artificial Sequence
  mRNA product Design h-4 comprising derived and/or modified sequence from HRSV(A2)__F_DSCav1_mut1 (opt4)
gggagagggcgcuuggcuugcaaggacccugagcugcggcauugaagcacacccaacccaacucgacugaagucagccucacugaaccggaucugagaaucuucucucucugggcuugccagggcucuccgaaccuagcuagcauccucuucaauuccaacuagaaagcuuaccauggagcugcugauccugaaggccaacgccaucaccaccauccugaccgccgugaccuucugcuucgccagcggccagaacaucaccgaggaguucuaccagagcaccugcagcgccgugagcaagggcuaccugggcgcccugagaaccggcugguacaccagcgugaucaccaucgagcugagcaacaucaaggagaacaagugcaacggcaccgacgccaaggugaagcugaucaagcaggagcuggacaaguacaagaacgccgugaccgagcugcagcugcugaugcagagcacccccgccaccggcagcggcagcgccaucugcagcggcguggccgugugcaaggugcugcaccuggagggcgaggugaacaagaucaagagcgcccugcugagcaccaacaaggccguggugagccugagcaacggcgugagcgugcugaccuucaaggugcuggaccugaagaacuacaucgacaagcagcugcugcccauccugaacaagcagagcugcagcauccccaacaucgagaccgugaucgaguuccagcagaagaacaacagacugcuggagaucaccagagaguucagcgugaacgccggcgugaccacccccgugagcaccuacaugcugaccaacagcgagcugcugagccugaucaacgacaugcccaucaccaacgaccagaagaagcugaugagcaacaacgugcagaucgugagacagcagagcuacagcaucaugugcaucaucaaggaggaggugcuggccuacguggugcagcugccccuguacggcgugaucgacacccccugcuggaagcugcacaccagcccccugugcaccaccaacaccaaggagggcagcaacaucugccugaccagaaccgacagaggcugguacugcgacaacgccggcagcgugagcuucuucccccaggccgagaccugcaaggugcagagcaacagaguguucugcgacaccaugaacagccugacccugcccagcgaggugaaccugugcaacguggacaucuucaaccccaaguacgacugcaagaucaugaccagcaagaccgacgugagcagcagcgugaucaccagccugggcgccaucgugagcugcuacggcaagaccaagugcaccgccagcaacaagaacagaggcaucaucaagaccuucagcaacggcugcgacuacgugagcaacaagggcguggacaccgugagcgugggcaacacccuguacugcgugaacaagcaggagggccagagccuguacgugaagggcgagcccaucaucaacuucuacgacccccugguguuccccagcgacgaguucgacgccagcaucagccaggugaacgagaagaucaaccagagccuggccuucaucagaaagagcgacgagcugcugcacaacgugaacgccggcaagagcaccaccaacaucaugaucaccaccaucaucaucgugaucaucgugauccugcugagccugaucgccgugggccugcugcuguacugcaaggccagaagcacccccgugacccugagcaaggaccagcugagcggcaucaacaacaucgccuucagcaacugaggacuaguaauaaggaaacuguaugaaugucugugggcaggaagugaagagauccuucuguaaagguuuuuggaauuaugucugcugaauaauaaacuuuuuugaaauaauaaaucugguagaaaaaugagaucuaaaaaaaaaaaaaaaaaaaaaaaaaaaaaaaaaaaaaaaaaaaaaaaaaaaaaaaaaaaaaaaaugcaucccccccccccccccccccccccccccccccaaaggcucuuuucagagccaccagaauu

SEQ ID NO: 1962 - RNA, 2045 nt, Artificial Sequence
  mRNA product Design h-4 comprising derived and/or modified sequence from HRSV(A2)__F_DSCav1_mut1 (opt5)
gggagagggcgcuuggcuugcaaggacccugagcugcggcauugaagcacacccaacccaacucgacugaagucagccucacugaaccggaucugagaaucuucucucucugggcuugccagggcucuccgaaccuagcuagcauccucuucaauuccaacuagaaagcuuaccauggagcugcucauccugaaggccaacgcuauuaccacaauccuuacggccgugaccuucugcuuugcgagcggccagaauauuacagaagaguucuaccaauccaccuguucugcugucagcaaaggguaucugggagcccucagaacaggcugguacaccuccguuaucacaauugaacugucuaacaucaaggagaauaaaugcaacgggaccgacgccaaggugaaacuuaucaagcaggaacuggauaaguauaaaaaugcugugacggagcuccagcugcugaugcagagcacccccgccacaggauccggcucugcuauuuguagcggggucgccgugugcaagguucuccaccuggagggagaagugaacaaaaucaaguccgcgcuucugagcaccaauaaagccgucgugucucucuccaacggcguuagcgugcugacauuuaagguccuugaccugaagaauuacauugauaaacaacuccugccuauccugaacaagcagucuuguuccauuccgaauaucgagaccgugauugaguuccagcagaaaaacaaucggcuccuggaaaucacgcgcgaguuuagcgugaacgcuggcgucacaacccccguuucuacauauaugcuuaccaauuccgaacugcucagccugaucaacgacaugccuauuaccaacgaucaaaagaaacuuauguccaauaacgugcagaucgugagacagcagucuuacagcauuaugugcaucauuaaggaggaaguccuggccuaugugguucaacucccccuguacggggugaucgacacaccuuguuggaaacugcauacgagcccccucugcaccacaaauaccaaggagggauccaacaucugucugacacggaccgaucgcggcugguacugcgacaaugcugggucugucuccuucuuuccucaggccgaaacguguaaggugcagagcaacagaguuuucugcgauacaaugaacucucuuacccugccgagcgaggugaaucucugcaaugucgacauuuuuaaccccaaauaugauuguaagaucaugaccuccaaaacagacgugucuagcuccgucauuaccagccugggagcgaucgugucuugcuacggcaagacaaaauguacggccuccaauaagaaccgggggauuaucaagaccuucagcaauggaugcgauuauguuucuaacaaaggcguggacacagucuccgugggcaauacccuuuacuguguuaacaagcaagaggggcagagccuguaugugaaaggagaaccuaucauuaacuuuuacgacccccucgucuucccuuccgaugaguuugacgcuucuaucagccaggugaaugaaaagauuaaccagucccuggccuucauccgcaaaucugaugagcugcuccacaaugugaacgcuggcaagagcacaaccaauauuaugaucacgaccauuaucaucguuauuaucgucauucugcuuucccugaucgccguggggcuccugcuguauugcaaggccagaagcacacccgugacccuuucuaaagaccaacucuccggaauuaacaauaucgcuuucagcaacugaggacuaguaauaaggaaacuguaugaaugucugugggcaggaagugaagagauccuucuguaaagguuuuuggaauuaugucugcugaauaauaaacuuuuuugaaauaauaaaucugguagaaaaaugagaucuaaaaaaaaaaaaaaaaaaaaaaaaaaaaaaaaaaaaaaaaaaaaaaaaaaaaaaaaaaaaaaaaugcaucccccccccccccccccccccccccccccccaaaggcucuuuucagagccaccagaauu

SEQ ID NO: 1963 - RNA, 2045 nt, Artificial Sequence
  mRNA product Design h-4 comprising derived and/or modified sequence from HRSV(A2)__F_DSCav1_mut1 (opt6)
gggagagggcgcuuggcuugcaaggacccugagcugcggcauugaagcacacccaacccaacucgacugaagucagccucacugaaccggaucugagaaucuucucucucugggcuugccagggcucuccgaaccuagcuagcauccucuucaauuccaacuagaaagcuuaccauggaacuauuaauacuaaaagcaaacgcuauaacaacaauacuaacagcagucacauucugcuuugcaucaggccaaaacaucacagaagaauuuuaccaaucaacaugcuccgccguaucgaaaggauaccuaggcgcauuaagaaccggaugguauacaucagucauaacaauugaacuaucuaacauaaaagaaaacaaauguaacggcacagaugccaaaguaaaacucaucaaacaagaauuagauaaauacaaaaacgcagucacugaacuacaacucuuaaugcaaucaacaccugcaacaggaucaggaucagcaauaugcucaggaguagccguauguaaaguacuacaccuagaaggagaagucaacaaaauaaaaucagcccuccuaaguacaaacaaagcugucguaucacuauccaaugguguuucaguacuaacuuucaaaguucuagaccuaaaaaacuacauagacaaacaacuacuaccaauacuaaauaaacaaaguuguucuauacccaacauagaaaccgucauagaauuucaacaaaaaaauaauagacuccuagaaauaacaagagaauuuucaguuaacgcagguguaacaaccccaguauccaccuauaugcuaacaaauucagaauuacuuucccuaaucaacgacaugcccauaacaaaugaccaaaaaaaauuaaugucaaacaacguccaaauaguucgucaacaaucauauucaauaaugugcauaauaaaagaagaagucuuagccuacguaguacaacuuccccuuuauggaguuaucgacacacccugcuggaaacuccacacuucaccacuauguacuacaaacacaaaagaaggauccaacaucugccucacaagaaccgaucgaggaugguacugugauaacgccggauccgucucauucuucccacaagcagaaacaugcaaaguacaaucaaacagaguauuuugcgacacaaugaacucccucacauuaccuucugaaguaaaccuauguaauguagacauauucaaccccaaauacgauugcaaaauaaugacaucaaagacagauguaucaucaagugucaucacaucccuaggagcaauugucucauguuaugguaaaacaaaaugcaccgcaucaaauaaaaacagaggcauaauaaaaaccuucucaaacgguugugacuacguauccaauaaaggcgucgacacaguaucaguagguaacacauuauauuguguaaacaaacaagaaggacagucccuauauguaaaaggagaaccaauaaucaacuucuacgacccacuuguuuucccuucugaugaauuugacgcaaguauaucacaaguaaaugaaaaaaucaaucaaucacuagccuuuauaagaaaaucagaugaauuauuacacaacguaaacgccggaaaaucaacaaccaacauaaugauaaccacaauaauaaucgucauaauagucauccuacuaucacucauagcaguuggacuccuacuauacugcaaagcacgaucaacaccaguaacauuauccaaagaccaacuaagugguaucaauaacaucgccuuuucaaacugaggacuaguaauaaggaaacuguaugaaugucugugggcaggaagugaagagauccuucuguaaagguuuuuggaauuaugucugcugaauaauaaacuuuuuugaaauaauaaaucugguagaaaaaugagaucuaaaaaaaaaaaaaaaaaaaaaaaaaaaaaaaaaaaaaaaaaaaaaaaaaaaaaaaaaaaaaaaaugcaucccccccccccccccccccccccccccccccaaaggcucuuuucagagccaccagaauu

SEQ ID NO: 1964 - RNA, 2045 nt, Artificial Sequence
  mRNA product Design h-4 comprising derived and/or modified sequence from HRSV(A2)__F_DSCav1_mut1 (opt11)
gggagagggcgcuuggcuugcaaggacccugagcugcggcauugaagcacacccaacccaacucgacugaagucagccucacugaaccggaucugagaaucuucucucucugggcuugccagggcucuccgaaccuagcuagcauccucuucaauuccaacuagaaagcuuaccauggaacuccuaauccucaaagccaacgcaaucaccacaauccucacugccgucaccuucugcuucgccuccggccaaaacauaacagaagaauuuuaccaaucaaccuguucagcggucuccaaaggcuaccucggcgcccuccgcaccggcugguacaccuccgugaucaccauagaacucuccaacaucaaggaaaacaaaugcaacggcaccgacgcgaaggucaaacuuauuaaacaagaacucgacaaauacaaaaacgcagucaccgaacuacaacuccuaaugcaguccacgccagccaccggcucuggcucagccauaugcuccgguguggccguaugcaaaguccuacaccucgaaggagaagucaacaaaauaaaauccgcccuacuguccacaaacaaggccguagucucccucucaaacggcgucucaguacucaccuucaaaguccuagaccucaagaacuacaucgacaaacaacuccuacccauacuaaacaaacaauccugcucaauccccaacaucgaaaccguaauagaauuucaacaaaaaaacaacagacuccuggagaucacccgggaauuuuccguaaacgccggagucacaacacccgucucaaccuacaugcuaacgaacucagagcuccucucacuuaucaacgacaugcccauaacaaacgaccaaaaaaaacucauguccaacaacgugcaaaucguccgacaacaauccuacuccaucaugugcaucauuaaagaagaaguccucgcauacguaguccagcucccccucuacggcgucauagacacccccugcuggaaacuacacacaucaccccucugcacaacaaacaccaaagaaggcuccaacaucugccucacccgcaccgaccgaggcugguacugcgauaacgccggcagcgucuccuucuucccccaagcagaaaccugcaagguccaauccaaccgaguuuucugcgacacuaugaacucgcucacccuccccuccgaagucaaccucugcaacgucgacauuuucaaccccaaauacgacugcaaaaucaugaccuccaagaccgacguauccuccuccgucaucaccucccuaggcgccauaguaaguugcuacggcaaaaccaagugcacagcaagcaacaaaaaccgaggaauaaucaaaaccuucuccaacggcugcgacuacguauccaacaagggcgucgacaccguauccguagggaacacccuuuacugcguaaacaaacaagaaggacaaucacucuacguaaaaggcgaacccauaaucaacuucuacgacccccucguauuucccuccgacgaauuugacgcaucaaucucacaggucaacgaaaaaauaaaccaaucgcuagcauucaucagaaaaucagacgaacuccuacacaacgucaacgcaggcaagagcaccaccaacaucaugaucaccaccaucaucaucgucauaaucgucauacuacucucacucauagcagucggccuccuccuauacuguaaagcaaggucgaccccagucacccuauccaaagaccaacuaagcggcaucaacaacaucgcguucucaaacuaaggacuaguaauaaggaaacuguaugaaugucugugggcaggaagugaagagauccuucuguaaagguuuuuggaauuaugucugcugaauaauaaacuuuuuugaaauaauaaaucugguagaaaaaugagaucuaaaaaaaaaaaaaaaaaaaaaaaaaaaaaaaaaaaaaaaaaaaaaaaaaaaaaaaaaaaaaaaaugcaucccccccccccccccccccccccccccccccaaaggcucuuuucagagccaccagaauu

SEQ ID NO: 1965 - RNA, 2061 nt, Artificial Sequence
  mRNA product Design h-5 comprising derived and/or modified sequence from HRSV(A2)__F_DSCav1_mut1 (opt1)
gggagagggcgcuuggcuugcaaggacccugagcugcggcauugaagcacacccaacccaacucgacugaagucagccucacugaaccggaucugagaaucuucucucucugggcuugccagggcucuccgaaccuagcuagcauccucuucaauuccaacuagaaagcuuaccauggagcugcucauccugaaggccaacgccaucaccaccauccugacggcggugaccuucugcuucgccagcggccagaacaucaccgaggaguucuaccaguccacgugcagcgccgucuccaagggguaccucggcgcccugcggaccggcugguacaccuccgugaucaccaucgagcugagcaacaucaaggagaacaagugcaacgggaccgacgccaaggugaagcucaucaagcaggagcuggacaaguacaagaacgcggucacggagcugcagcuccugaugcaguccaccccggcaaccggcuccggcuccgccaucugcagcggcgucgccgugugcaaggugcugcaccucgagggggaggucaacaagaucaagagcgcccugcuguccaccaacaaggccguggugagccucuccaacggcgucagcgugcugaccuucaaggugcuggaccucaagaacuacaucgacaagcagcugcugcccauccugaacaagcagagcugcuccauccccaacaucgagacggugaucgaguuccagcagaagaacaaccggcuccuggagaucacccgcgaguucagcgugaacgccggggucaccacccccguguccacguacaugcugaccaacagcgagcuccugucccugaucaacgacaugccgaucaccaacgaccagaagaagcucaugagcaacaacgugcagaucguccggcagcaguccuacagcaucaugugcaucaucaaggaggaggugcuggcguacgugguccagcugccccucuacggcgugaucgacacccccugcuggaagcugcacacgagcccccugugcaccaccaacaccaaggagggguccaacaucugccucacgcgcaccgaccggggcugguacugcgacaacgccggcagcgucuccuucuucccgcaggccgagaccugcaaggugcagagcaaccgcguguucugcgacaccaugaacucccugacgcugcccagcgagguaaaccucugcaacgucgacaucuucaaccccaaguacgacugcaagaucaugaccuccaagaccgacgugagcuccagcgugaucaccucccugggggccaucgucagcugcuacggcaagacgaagugcaccgccagcaacaagaaccgggggaucaucaagaccuucuccaacggcugcgacuacgugagcaacaagggcguggacaccguguccgucgggaacacccuguacugcgugaacaagcaggagggccagagccucuacgugaagggggagcccaucaucaacuucuacgacccgcuggucuuccccuccgacgaguucgacgcgagcaucucccaggugaacgagaagaucaaccagagccuggccuucauccgcaaguccgacgagcugcuccacaacgugaacgccggcaagagcacgaccaacaucaugaucaccaccaucaucaucgucaucaucgugauccugcugucccucaucgccguggggcugcugcucuacugcaaggcccggagcacgcccgucacccuguccaaggaccagcugagcggcaucaacaacaucgcguucuccaacugaggacuaguacuggcugcaucucccuuuccucuguccuccauccuucucccaggauggugaagggggaccugguacccagugauccccaccccaggauccuaaaucaugacuuaccugcuaauaaaaacucauuggaaaagugagaagaucuaaaaaaaaaaaaaaaaaaaaaaaaaaaaaaaaaaaaaaaaaaaaaaaaaaaaaaaaaaaaaaaaugcaucccccccccccccccccccccccccccccccaaaggcucuuuucagagccaccagaauu

SEQ ID NO: 1966 - RNA, 2061 nt, Artificial Sequence
  mRNA product Design h-5 comprising derived and/or modified sequence from HRSV(A2)__F_DSCav1_mut1 (opt1)
gggagagggcgcuuggcuugcaaggacccugagcugcggcauugaagcacacccaacccaacucgacugaagucagccucacugaaccggaucugagaaucuucucucucugggcuugccagggcucuccgaaccuagcuagcauccucuucaauuccaacuagaaagcuuaccauggagcugcucauccugaaggccaacgccaucaccaccauccugacggcggugaccuucugcuucgccagcggccagaacaucaccgaggaguucuaccaguccacgugcagcgccgucuccaagggguaccucggcgcccugcgcaccgggugguacaccagcgugaucaccaucgagcuguccaacaucaaggagaacaagugcaacggcaccgacgccaaggugaagcucaucaagcaggagcuggacaaguacaagaacgcggucacggagcugcagcuccugaugcagagcacccccgccaccggguccggcagcgccaucugcuccggcguggccgugugcaagguccugcaccucgagggggaggugaacaagaucaagagcgcgcugcuguccaccaacaaggccguggucagccucuccaacggcgugagcgugcugacguucaagguccuggaccucaagaacuacaucgacaagcagcugcugccgauccucaacaagcaguccugcagcauccccaacaucgagaccgugaucgaguuccagcagaagaacaaccggcugcuggagaucacccgcgaguucuccgugaacgccggggucaccacgcccgugagcaccuacaugcucaccaacuccgagcugcugagccucaucaacgacaugcccaucaccaacgaccagaagaagcugaugagcaacaacgugcagaucguccggcagcaguccuacagcaucaugugcaucaucaaggaggaggugcuggccuacgugguccagcucccgcuguacggcgugaucgacacgcccugcuggaagcugcacaccagcccccucugcaccaccaacacgaaggagggguccaacaucugccugacccgcaccgaccggggcugguacugcgacaacgccggcuccgugagcuucuucccccaggcggagaccugcaagguccaguccaaccgcguguucugcgacacgaugaacagccugacccucccguccgaggucaaccugugcaacguggacaucuucaaccccaaguacgacugcaagaucaugaccagcaagaccgacguguccagcuccgucaucacgagccugggggccaucguguccugcuacggcaagaccaagugcaccgccagcaacaagaaccgggggaucaucaagaccuucuccaacggcugcgacuacgugagcaacaagggcgucgacacgguguccguggggaacacccucuacugcgucaacaagcaggagggccagagccuguacgugaagggggagcccaucaucaacuucuacgacccccugguguucccgagcgacgaguucgacgccuccaucagccaggucaacgagaagaucaaccagucccucgccuucauccgcaagagcgacgagcugcugcacaacgugaacgcgggcaaguccaccaccaacaucaugaucaccacgaucaucaucgugaucaucgucauccuccugagccugaucgccguggggcuccugcuguacugcaaggcccgguccacccccgugacccugagcaaggaccagcucuccggcaucaacaacaucgccuucagcaacugaggacuaguacuggcugcaucucccuuuccucuguccuccauccuucucccaggauggugaagggggaccugguacccagugauccccaccccaggauccuaaaucaugacuuaccugcuaauaaaaacucauuggaaaagugagaagaucuaaaaaaaaaaaaaaaaaaaaaaaaaaaaaaaaaaaaaaaaaaaaaaaaaaaaaaaaaaaaaaaaugcaucccccccccccccccccccccccccccccccaaaggcucuuuucagagccaccagaauu

SEQ ID NO: 1967 - RNA, 2061 nt, Artificial Sequence
  mRNA product Design h-5 comprising derived and/or modified sequence from HRSV(A2)__F_DSCav1_mut1 (opt2)
gggagagggcgcuuggcuugcaaggacccugagcugcggcauugaagcacacccaacccaacucgacugaagucagccucacugaaccggaucugagaaucuucucucucugggcuugccagggcucuccgaaccuagcuagcauccucuucaauuccaacuagaaagcuuaccauggagcuccucauccucaaggccaacgccaucaccaccauccucaccgccgucaccuucugcuucgccuccggccagaacaucaccgaggaguucuaccaguccaccugcuccgccgucuccaagggcuaccucggcgcccuccgcaccggcugguacaccuccgucaucaccaucgagcucuccaacaucaaggagaacaagugcaacggcaccgacgccaaggucaagcucaucaagcaggagcucgacaaguacaagaacgccgucaccgagcuccagcuccucaugcaguccacccccgccaccggcuccggcuccgccaucugcuccggcgucgccgucugcaagguccuccaccucgagggcgaggucaacaagaucaaguccgcccuccucuccaccaacaaggccgucgucucccucuccaacggcgucuccguccucaccuucaagguccucgaccucaagaacuacaucgacaagcagcuccuccccauccucaacaagcaguccugcuccauccccaacaucgagaccgucaucgaguuccagcagaagaacaaccgccuccucgagaucacccgcgaguucuccgucaacgccggcgucaccacccccgucuccaccuacaugcucaccaacuccgagcuccucucccucaucaacgacaugcccaucaccaacgaccagaagaagcucauguccaacaacguccagaucguccgccagcaguccuacuccaucaugugcaucaucaaggaggagguccucgccuacgucguccagcucccccucuacggcgucaucgacacccccugcuggaagcuccacaccuccccccucugcaccaccaacaccaaggagggcuccaacaucugccucacccgcaccgaccgcggcugguacugcgacaacgccggcuccgucuccuucuucccccaggccgagaccugcaagguccaguccaaccgcgucuucugcgacaccaugaacucccucacccuccccuccgaggucaaccucugcaacgucgacaucuucaaccccaaguacgacugcaagaucaugaccuccaagaccgacgucuccuccuccgucaucaccucccucggcgccaucgucuccugcuacggcaagaccaagugcaccgccuccaacaagaaccgcggcaucaucaagaccuucuccaacggcugcgacuacgucuccaacaagggcgucgacaccgucuccgucggcaacacccucuacugcgucaacaagcaggagggccagucccucuacgucaagggcgagcccaucaucaacuucuacgacccccucgucuuccccuccgacgaguucgacgccuccaucucccaggucaacgagaagaucaaccagucccucgccuucauccgcaaguccgacgagcuccuccacaacgucaacgccggcaaguccaccaccaacaucaugaucaccaccaucaucaucgucaucaucgucauccuccucucccucaucgccgucggccuccuccucuacugcaaggcccgcuccacccccgucacccucuccaaggaccagcucuccggcaucaacaacaucgccuucuccaacugaggacuaguacuggcugcaucucccuuuccucuguccuccauccuucucccaggauggugaagggggaccugguacccagugauccccaccccaggauccuaaaucaugacuuaccugcuaauaaaaacucauuggaaaagugagaagaucuaaaaaaaaaaaaaaaaaaaaaaaaaaaaaaaaaaaaaaaaaaaaaaaaaaaaaaaaaaaaaaaaugcaucccccccccccccccccccccccccccccccaaaggcucuuuucagagccaccagaauu

SEQ ID NO: 1968 - RNA, 2061 nt, Artificial Sequence
  mRNA product Design h-5 comprising derived and/or modified sequence from HRSV(A2)__F_DSCav1_mut1 (opt3)
gggagagggcgcuuggcuugcaaggacccugagcugcggcauugaagcacacccaacccaacucgacugaagucagccucacugaaccggaucugagaaucuucucucucugggcuugccagggcucuccgaaccuagcuagcauccucuucaauuccaacuagaaagcuuaccauggagcugcucauccuuaaggccaacgcuauuaccacaauacugacugcagugacguucugcuuugccagcggccagaauaucaccgaagaguucuaccaauccacauguucugcggucucaaaaggguauuugggagcuuuaagaacugguugguacaccaguguuauuacaaucgaacugagcaacauuaaggagaauaaaugcaacggcaccgacgccaaggugaaacuaaucaagcaggaacucgauaaguauaaaaaugcaguaacugagcugcagcuucugaugcaguccacacccgccaccgggucuggaucggcuauauguucaggcguggcagucugcaagguguugcaccucgagggugaaguuaacaaaaucaagagcgcccugcugaguacgaauaaagcuguggucucccucucuaacggggugagcguauuaacuuuuaagguucuggaccuuaagaauuacauugauaaacaauugcugccuauccuaaacaagcaguccuguucaauuccaaauaucgagaccgugauagaguuccagcagaaaaacaauaggcuccuggaaauuacacgggaguuuagugucaacgccggagugacuaccccggugagcacauauaugcuuaccaauucugaacuguugucccucaucaacgacaugcccauuacgaacgaucaaaagaaacugaugucaaauaacguccagaucguucgccagcagagcuacaguaucaugugcauuauaaaggaggaaguguuagcguauguagugcaacugccucucuacggcgucaucgacacuccauguuggaaacuucauacaucuccccugugcaccacuaauacaaaggagggcuccaacauuuguuugacccgaacggaucgugggugguacugcgacaaugcaggaagcgugucguucuuuccucaggccgaaaccuguaagguucagucuaacagaguguucugcgauacaaugaacucccuaacucugccaucagaggucaaucucugcaauguggacaucuuuaaccccaaauaugauuguaagauaaugaccaguaaaacagacguaagcuccucuguuauuacuagccugggugcuaucgugucaugcuacggcaagaccaaauguacagccaguaauaagaacagggggaucauuaagaccuucuccaauggaugcgauuaugucagcaacaaaggcguggacacugucucuguggguaauacgcuuuacuguguuaacaagcaagaggggcagucacuguaugugaaaggagaaccuaucauuaacuuuuacgacccauugguauucccgagugaugaguuugacgcaagcauaucccaggucaaugaaaagaucaaccagucucucgcuuucauucggaaaucggaugagcuguuacacaaugugaacgccggcaagagcacaaccaauaucaugaucacuaccauuauaaucguuauuaucgugauucugcuaucccucaucgcggucggccugcuuuuguauugcaaggcccgcucaacacccgugacccugaguaaagaccaacucucugggauaaacaauaucgcauucagcaacugaggacuaguacuggcugcaucucccuuuccucuguccuccauccuucucccaggauggugaagggggaccugguacccagugauccccaccccaggauccuaaaucaugacuuaccugcuaauaaaaacucauuggaaaagugagaagaucuaaaaaaaaaaaaaaaaaaaaaaaaaaaaaaaaaaaaaaaaaaaaaaaaaaaaaaaaaaaaaaaaugcaucccccccccccccccccccccccccccccccaaaggcucuuuucagagccaccagaauu

SEQ ID NO: 1969 - RNA, 2061 nt, Artificial Sequence
  mRNA product Design h-5 comprising derived and/or modified sequence from HRSV(A2)__F_DSCav1_mut1 (opt4)
gggagagggcgcuuggcuugcaaggacccugagcugcggcauugaagcacacccaacccaacucgacugaagucagccucacugaaccggaucugagaaucuucucucucugggcuugccagggcucuccgaaccuagcuagcauccucuucaauuccaacuagaaagcuuaccauggagcugcugauccugaaggccaacgccaucaccaccauccugaccgccgugaccuucugcuucgccagcggccagaacaucaccgaggaguucuaccagagcaccugcagcgccgugagcaagggcuaccugggcgcccugagaaccggcugguacaccagcgugaucaccaucgagcugagcaacaucaaggagaacaagugcaacggcaccgacgccaaggugaagcugaucaagcaggagcuggacaaguacaagaacgccgugaccgagcugcagcugcugaugcagagcacccccgccaccggcagcggcagcgccaucugcagcggcguggccgugugcaaggugcugcaccuggagggcgaggugaacaagaucaagagcgcccugcugagcaccaacaaggccguggugagccugagcaacggcgugagcgugcugaccuucaaggugcuggaccugaagaacuacaucgacaagcagcugcugcccauccugaacaagcagagcugcagcauccccaacaucgagaccgugaucgaguuccagcagaagaacaacagacugcuggagaucaccagagaguucagcgugaacgccggcgugaccacccccgugagcaccuacaugcugaccaacagcgagcugcugagccugaucaacgacaugcccaucaccaacgaccagaagaagcugaugagcaacaacgugcagaucgugagacagcagagcuacagcaucaugugcaucaucaaggaggaggugcuggccuacguggugcagcugccccuguacggcgugaucgacacccccugcuggaagcugcacaccagcccccugugcaccaccaacaccaaggagggcagcaacaucugccugaccagaaccgacagaggcugguacugcgacaacgccggcagcgugagcuucuucccccaggccgagaccugcaaggugcagagcaacagaguguucugcgacaccaugaacagccugacccugcccagcgaggugaaccugugcaacguggacaucuucaaccccaaguacgacugcaagaucaugaccagcaagaccgacgugagcagcagcgugaucaccagccugggcgccaucgugagcugcuacggcaagaccaagugcaccgccagcaacaagaacagaggcaucaucaagaccuucagcaacggcugcgacuacgugagcaacaagggcguggacaccgugagcgugggcaacacccuguacugcgugaacaagcaggagggccagagccuguacgugaagggcgagcccaucaucaacuucuacgacccccugguguuccccagcgacgaguucgacgccagcaucagccaggugaacgagaagaucaaccagagccuggccuucaucagaaagagcgacgagcugcugcacaacgugaacgccggcaagagcaccaccaacaucaugaucaccaccaucaucaucgugaucaucgugauccugcugagccugaucgccgugggccugcugcuguacugcaaggccagaagcacccccgugacccugagcaaggaccagcugagcggcaucaacaacaucgccuucagcaacugaggacuaguacuggcugcaucucccuuuccucuguccuccauccuucucccaggauggugaagggggaccugguacccagugauccccaccccaggauccuaaaucaugacuuaccugcuaauaaaaacucauuggaaaagugagaagaucuaaaaaaaaaaaaaaaaaaaaaaaaaaaaaaaaaaaaaaaaaaaaaaaaaaaaaaaaaaaaaaaaugcaucccccccccccccccccccccccccccccccaaaggcucuuuucagagccaccagaauu

SEQ ID NO: 1970 - RNA, 2061 nt, Artificial Sequence
  mRNA product Design h-5 comprising derived and/or modified sequence from HRSV(A2)__F_DSCav1_mut1 (opt5)
gggagagggcgcuuggcuugcaaggacccugagcugcggcauugaagcacacccaacccaacucgacugaagucagccucacugaaccggaucugagaaucuucucucucugggcuugccagggcucuccgaaccuagcuagcauccucuucaauuccaacuagaaagcuuaccauggagcugcucauccugaaggccaacgcuauuaccacaauccuuacggccgugaccuucugcuuugcgagcggccagaauauuacagaagaguucuaccaauccaccuguucugcugucagcaaaggguaucugggagcccucagaacaggcugguacaccuccguuaucacaauugaacugucuaacaucaaggagaauaaaugcaacgggaccgacgccaaggugaaacuuaucaagcaggaacuggauaaguauaaaaaugcugugacggagcuccagcugcugaugcagagcacccccgccacaggauccggcucugcuauuuguagcggggucgccgugugcaagguucuccaccuggagggagaagugaacaaaaucaaguccgcgcuucugagcaccaauaaagccgucgugucucucuccaacggcguuagcgugcugacauuuaagguccuugaccugaagaauuacauugauaaacaacuccugccuauccugaacaagcagucuuguuccauuccgaauaucgagaccgugauugaguuccagcagaaaaacaaucggcuccuggaaaucacgcgcgaguuuagcgugaacgcuggcgucacaacccccguuucuacauauaugcuuaccaauuccgaacugcucagccugaucaacgacaugccuauuaccaacgaucaaaagaaacuuauguccaauaacgugcagaucgugagacagcagucuuacagcauuaugugcaucauuaaggaggaaguccuggccuaugugguucaacucccccuguacggggugaucgacacaccuuguuggaaacugcauacgagcccccucugcaccacaaauaccaaggagggauccaacaucugucugacacggaccgaucgcggcugguacugcgacaaugcugggucugucuccuucuuuccucaggccgaaacguguaaggugcagagcaacagaguuuucugcgauacaaugaacucucuuacccugccgagcgaggugaaucucugcaaugucgacauuuuuaaccccaaauaugauuguaagaucaugaccuccaaaacagacgugucuagcuccgucauuaccagccugggagcgaucgugucuugcuacggcaagacaaaauguacggccuccaauaagaaccgggggauuaucaagaccuucagcaauggaugcgauuauguuucuaacaaaggcguggacacagucuccgugggcaauacccuuuacuguguuaacaagcaagaggggcagagccuguaugugaaaggagaaccuaucauuaacuuuuacgacccccucgucuucccuuccgaugaguuugacgcuucuaucagccaggugaaugaaaagauuaaccagucccuggccuucauccgcaaaucugaugagcugcuccacaaugugaacgcuggcaagagcacaaccaauauuaugaucacgaccauuaucaucguuauuaucgucauucugcuuucccugaucgccguggggcuccugcuguauugcaaggccagaagcacacccgugacccuuucuaaagaccaacucuccggaauuaacaauaucgcuuucagcaacugaggacuaguacuggcugcaucucccuuuccucuguccuccauccuucucccaggauggugaagggggaccugguacccagugauccccaccccaggauccuaaaucaugacuuaccugcuaauaaaaacucauuggaaaagugagaagaucuaaaaaaaaaaaaaaaaaaaaaaaaaaaaaaaaaaaaaaaaaaaaaaaaaaaaaaaaaaaaaaaaugcaucccccccccccccccccccccccccccccccaaaggcucuuuucagagccaccagaauu

SEQ ID NO: 1971 - RNA, 2061 nt, Artificial Sequence
  mRNA product Design h-5 comprising derived and/or modified sequence from HRSV(A2)__F_DSCav1_mut1 (opt6)
gggagagggcgcuuggcuugcaaggacccugagcugcggcauugaagcacacccaacccaacucgacugaagucagccucacugaaccggaucugagaaucuucucucucugggcuugccagggcucuccgaaccuagcuagcauccucuucaauuccaacuagaaagcuuaccauggaacuauuaauacuaaaagcaaacgcuauaacaacaauacuaacagcagucacauucugcuuugcaucaggccaaaacaucacagaagaauuuuaccaaucaacaugcuccgccguaucgaaaggauaccuaggcgcauuaagaaccggaugguauacaucagucauaacaauugaacuaucuaacauaaaagaaaacaaauguaacggcacagaugccaaaguaaaacucaucaaacaagaauuagauaaauacaaaaacgcagucacugaacuacaacucuuaaugcaaucaacaccugcaacaggaucaggaucagcaauaugcucaggaguagccguauguaaaguacuacaccuagaaggagaagucaacaaaauaaaaucagcccuccuaaguacaaacaaagcugucguaucacuauccaaugguguuucaguacuaacuuucaaaguucuagaccuaaaaaacuacauagacaaacaacuacuaccaauacuaaauaaacaaaguuguucuauacccaacauagaaaccgucauagaauuucaacaaaaaaauaauagacuccuagaaauaacaagagaauuuucaguuaacgcagguguaacaaccccaguauccaccuauaugcuaacaaauucagaauuacuuucccuaaucaacgacaugcccauaacaaaugaccaaaaaaaauuaaugucaaacaacguccaaauaguucgucaacaaucauauucaauaaugugcauaauaaaagaagaagucuuagccuacguaguacaacuuccccuuuauggaguuaucgacacacccugcuggaaacuccacacuucaccacuauguacuacaaacacaaaagaaggauccaacaucugccucacaagaaccgaucgaggaugguacugugauaacgccggauccgucucauucuucccacaagcagaaacaugcaaaguacaaucaaacagaguauuuugcgacacaaugaacucccucacauuaccuucugaaguaaaccuauguaauguagacauauucaaccccaaauacgauugcaaaauaaugacaucaaagacagauguaucaucaagugucaucacaucccuaggagcaauugucucauguuaugguaaaacaaaaugcaccgcaucaaauaaaaacagaggcauaauaaaaaccuucucaaacgguugugacuacguauccaauaaaggcgucgacacaguaucaguagguaacacauuauauuguguaaacaaacaagaaggacagucccuauauguaaaaggagaaccaauaaucaacuucuacgacccacuuguuuucccuucugaugaauuugacgcaaguauaucacaaguaaaugaaaaaaucaaucaaucacuagccuuuauaagaaaaucagaugaauuauuacacaacguaaacgccggaaaaucaacaaccaacauaaugauaaccacaauaauaaucgucauaauagucauccuacuaucacucauagcaguuggacuccuacuauacugcaaagcacgaucaacaccaguaacauuauccaaagaccaacuaagugguaucaauaacaucgccuuuucaaacugaggacuaguacuggcugcaucucccuuuccucuguccuccauccuucucccaggauggugaagggggaccugguacccagugauccccaccccaggauccuaaaucaugacuuaccugcuaauaaaaacucauuggaaaagugagaagaucuaaaaaaaaaaaaaaaaaaaaaaaaaaaaaaaaaaaaaaaaaaaaaaaaaaaaaaaaaaaaaaaaugcaucccccccccccccccccccccccccccccccaaaggcucuuuucagagccaccagaauu

SEQ ID NO: 1972 - RNA, 2061 nt, Artificial Sequence
  mRNA product Design h-5 comprising derived and/or modified sequence from HRSV(A2)__F_DSCav1_mut1 (opt11)
gggagagggcgcuuggcuugcaaggacccugagcugcggcauugaagcacacccaacccaacucgacugaagucagccucacugaaccggaucugagaaucuucucucucugggcuugccagggcucuccgaaccuagcuagcauccucuucaauuccaacuagaaagcuuaccauggaacuccuaauccucaaagccaacgcaaucaccacaauccucacugccgucaccuucugcuucgccuccggccaaaacauaacagaagaauuuuaccaaucaaccuguucagcggucuccaaaggcuaccucggcgcccuccgcaccggcugguacaccuccgugaucaccauagaacucuccaacaucaaggaaaacaaaugcaacggcaccgacgcgaaggucaaacuuauuaaacaagaacucgacaaauacaaaaacgcagucaccgaacuacaacuccuaaugcaguccacgccagccaccggcucuggcucagccauaugcuccgguguggccguaugcaaaguccuacaccucgaaggagaagucaacaaaauaaaauccgcccuacuguccacaaacaaggccguagucucccucucaaacggcgucucaguacucaccuucaaaguccuagaccucaagaacuacaucgacaaacaacuccuacccauacuaaacaaacaauccugcucaauccccaacaucgaaaccguaauagaauuucaacaaaaaaacaacagacuccuggagaucacccgggaauuuuccguaaacgccggagucacaacacccgucucaaccuacaugcuaacgaacucagagcuccucucacuuaucaacgacaugcccauaacaaacgaccaaaaaaaacucauguccaacaacgugcaaaucguccgacaacaauccuacuccaucaugugcaucauuaaagaagaaguccucgcauacguaguccagcucccccucuacggcgucauagacacccccugcuggaaacuacacacaucaccccucugcacaacaaacaccaaagaaggcuccaacaucugccucacccgcaccgaccgaggcugguacugcgauaacgccggcagcgucuccuucuucccccaagcagaaaccugcaagguccaauccaaccgaguuuucugcgacacuaugaacucgcucacccuccccuccgaagucaaccucugcaacgucgacauuuucaaccccaaauacgacugcaaaaucaugaccuccaagaccgacguauccuccuccgucaucaccucccuaggcgccauaguaaguugcuacggcaaaaccaagugcacagcaagcaacaaaaaccgaggaauaaucaaaaccuucuccaacggcugcgacuacguauccaacaagggcgucgacaccguauccguagggaacacccuuuacugcguaaacaaacaagaaggacaaucacucuacguaaaaggcgaacccauaaucaacuucuacgacccccucguauuucccuccgacgaauuugacgcaucaaucucacaggucaacgaaaaaauaaaccaaucgcuagcauucaucagaaaaucagacgaacuccuacacaacgucaacgcaggcaagagcaccaccaacaucaugaucaccaccaucaucaucgucauaaucgucauacuacucucacucauagcagucggccuccuccuauacuguaaagcaaggucgaccccagucacccuauccaaagaccaacuaagcggcaucaacaacaucgcguucucaaacuaaggacuaguacuggcugcaucucccuuuccucuguccuccauccuucucccaggauggugaagggggaccugguacccagugauccccaccccaggauccuaaaucaugacuuaccugcuaauaaaaacucauuggaaaagugagaagaucuaaaaaaaaaaaaaaaaaaaaaaaaaaaaaaaaaaaaaaaaaaaaaaaaaaaaaaaaaaaaaaaaugcaucccccccccccccccccccccccccccccccaaaggcucuuuucagagccaccagaauu

SEQ ID NO: 1973 - RNA, 1994 nt, Artificial Sequence
  mRNA product Design i-1 comprising derived and/or modified sequence from HRSV(A2)__F_DSCav1_mut1 (opt1)
gggagagggcgcuuggcuugcaaggacccugagcugcggcauugaagcacacccaacccaacucgacugaagucagccucacugaaccggaucugagaaucuucucucucugggcuugccagggcucuccgaaccuagcuagcauccucuucaauuccaacuagaaagcuuaccauggagcugcucauccugaaggccaacgccaucaccaccauccugacggcggugaccuucugcuucgccagcggccagaacaucaccgaggaguucuaccaguccacgugcagcgccgucuccaagggguaccucggcgcccugcggaccggcugguacaccuccgugaucaccaucgagcugagcaacaucaaggagaacaagugcaacgggaccgacgccaaggugaagcucaucaagcaggagcuggacaaguacaagaacgcggucacggagcugcagcuccugaugcaguccaccccggcaaccggcuccggcuccgccaucugcagcggcgucgccgugugcaaggugcugcaccucgagggggaggucaacaagaucaagagcgcccugcuguccaccaacaaggccguggugagccucuccaacggcgucagcgugcugaccuucaaggugcuggaccucaagaacuacaucgacaagcagcugcugcccauccugaacaagcagagcugcuccauccccaacaucgagacggugaucgaguuccagcagaagaacaaccggcuccuggagaucacccgcgaguucagcgugaacgccggggucaccacccccguguccacguacaugcugaccaacagcgagcuccugucccugaucaacgacaugccgaucaccaacgaccagaagaagcucaugagcaacaacgugcagaucguccggcagcaguccuacagcaucaugugcaucaucaaggaggaggugcuggcguacgugguccagcugccccucuacggcgugaucgacacccccugcuggaagcugcacacgagcccccugugcaccaccaacaccaaggagggguccaacaucugccucacgcgcaccgaccggggcugguacugcgacaacgccggcagcgucuccuucuucccgcaggccgagaccugcaaggugcagagcaaccgcguguucugcgacaccaugaacucccugacgcugcccagcgagguaaaccucugcaacgucgacaucuucaaccccaaguacgacugcaagaucaugaccuccaagaccgacgugagcuccagcgugaucaccucccugggggccaucgucagcugcuacggcaagacgaagugcaccgccagcaacaagaaccgggggaucaucaagaccuucuccaacggcugcgacuacgugagcaacaagggcguggacaccguguccgucgggaacacccuguacugcgugaacaagcaggagggccagagccucuacgugaagggggagcccaucaucaacuucuacgacccgcuggucuuccccuccgacgaguucgacgcgagcaucucccaggugaacgagaagaucaaccagagccuggccuucauccgcaaguccgacgagcugcuccacaacgugaacgccggcaagagcacgaccaacaucaugaucaccaccaucaucaucgucaucaucgugauccugcugucccucaucgccguggggcugcugcucuacugcaaggcccggagcacgcccgucacccuguccaaggaccagcugagcggcaucaacaacaucgcguucuccaacugaggacuaguguccaccugucccuccugggcugcuggauugucucguuuuccugccaaauaaacaggaucagcgcuuuacagaucuaaaaaaaaaaaaaaaaaaaaaaaaaaaaaaaaaaaaaaaaaaaaaaaaaaaaaaaaaaaaaaaaugcaucccccccccccccccccccccccccccccccaaaggcucuuuucagagccaccagaauu

SEQ ID NO: 1974 - RNA, 1994 nt, Artificial Sequence
  mRNA product Design i-1 comprising derived and/or modified sequence from HRSV(A2)__F_DSCav1_mut1 (opt1)
gggagagggcgcuuggcuugcaaggacccugagcugcggcauugaagcacacccaacccaacucgacugaagucagccucacugaaccggaucugagaaucuucucucucugggcuugccagggcucuccgaaccuagcuagcauccucuucaauuccaacuagaaagcuuaccauggagcugcucauccugaaggccaacgccaucaccaccauccugacggcggugaccuucugcuucgccagcggccagaacaucaccgaggaguucuaccaguccacgugcagcgccgucuccaagggguaccucggcgcccugcgcaccgggugguacaccagcgugaucaccaucgagcuguccaacaucaaggagaacaagugcaacggcaccgacgccaaggugaagcucaucaagcaggagcuggacaaguacaagaacgcggucacggagcugcagcuccugaugcagagcacccccgccaccggguccggcagcgccaucugcuccggcguggccgugugcaagguccugcaccucgagggggaggugaacaagaucaagagcgcgcugcuguccaccaacaaggccguggucagccucuccaacggcgugagcgugcugacguucaagguccuggaccucaagaacuacaucgacaagcagcugcugccgauccucaacaagcaguccugcagcauccccaacaucgagaccgugaucgaguuccagcagaagaacaaccggcugcuggagaucacccgcgaguucuccgugaacgccggggucaccacgcccgugagcaccuacaugcucaccaacuccgagcugcugagccucaucaacgacaugcccaucaccaacgaccagaagaagcugaugagcaacaacgugcagaucguccggcagcaguccuacagcaucaugugcaucaucaaggaggaggugcuggccuacgugguccagcucccgcuguacggcgugaucgacacgcccugcuggaagcugcacaccagcccccucugcaccaccaacacgaaggagggguccaacaucugccugacccgcaccgaccggggcugguacugcgacaacgccggcuccgugagcuucuucccccaggcggagaccugcaagguccaguccaaccgcguguucugcgacacgaugaacagccugacccucccguccgaggucaaccugugcaacguggacaucuucaaccccaaguacgacugcaagaucaugaccagcaagaccgacguguccagcuccgucaucacgagccugggggccaucguguccugcuacggcaagaccaagugcaccgccagcaacaagaaccgggggaucaucaagaccuucuccaacggcugcgacuacgugagcaacaagggcgucgacacgguguccguggggaacacccucuacugcgucaacaagcaggagggccagagccuguacgugaagggggagcccaucaucaacuucuacgacccccugguguucccgagcgacgaguucgacgccuccaucagccaggucaacgagaagaucaaccagucccucgccuucauccgcaagagcgacgagcugcugcacaacgugaacgcgggcaaguccaccaccaacaucaugaucaccacgaucaucaucgugaucaucgucauccuccugagccugaucgccguggggcuccugcuguacugcaaggcccgguccacccccgugacccugagcaaggaccagcucuccggcaucaacaacaucgccuucagcaacugaggacuaguguccaccugucccuccugggcugcuggauugucucguuuuccugccaaauaaacaggaucagcgcuuuacagaucuaaaaaaaaaaaaaaaaaaaaaaaaaaaaaaaaaaaaaaaaaaaaaaaaaaaaaaaaaaaaaaaaugcaucccccccccccccccccccccccccccccccaaaggcucuuuucagagccaccagaauu

SEQ ID NO: 1975 - RNA, 1994 nt, Artificial Sequence
  mRNA product Design i-1 comprising derived and/or modified sequence from HRSV(A2)__F_DSCav1_mut1 (opt2)
gggagagggcgcuuggcuugcaaggacccugagcugcggcauugaagcacacccaacccaacucgacugaagucagccucacugaaccggaucugagaaucuucucucucugggcuugccagggcucuccgaaccuagcuagcauccucuucaauuccaacuagaaagcuuaccauggagcuccucauccucaaggccaacgccaucaccaccauccucaccgccgucaccuucugcuucgccuccggccagaacaucaccgaggaguucuaccaguccaccugcuccgccgucuccaagggcuaccucggcgcccuccgcaccggcugguacaccuccgucaucaccaucgagcucuccaacaucaaggagaacaagugcaacggcaccgacgccaaggucaagcucaucaagcaggagcucgacaaguacaagaacgccgucaccgagcuccagcuccucaugcaguccacccccgccaccggcuccggcuccgccaucugcuccggcgucgccgucugcaagguccuccaccucgagggcgaggucaacaagaucaaguccgcccuccucuccaccaacaaggccgucgucucccucuccaacggcgucuccguccucaccuucaagguccucgaccucaagaacuacaucgacaagcagcuccuccccauccucaacaagcaguccugcuccauccccaacaucgagaccgucaucgaguuccagcagaagaacaaccgccuccucgagaucacccgcgaguucuccgucaacgccggcgucaccacccccgucuccaccuacaugcucaccaacuccgagcuccucucccucaucaacgacaugcccaucaccaacgaccagaagaagcucauguccaacaacguccagaucguccgccagcaguccuacuccaucaugugcaucaucaaggaggagguccucgccuacgucguccagcucccccucuacggcgucaucgacacccccugcuggaagcuccacaccuccccccucugcaccaccaacaccaaggagggcuccaacaucugccucacccgcaccgaccgcggcugguacugcgacaacgccggcuccgucuccuucuucccccaggccgagaccugcaagguccaguccaaccgcgucuucugcgacaccaugaacucccucacccuccccuccgaggucaaccucugcaacgucgacaucuucaaccccaaguacgacugcaagaucaugaccuccaagaccgacgucuccuccuccgucaucaccucccucggcgccaucgucuccugcuacggcaagaccaagugcaccgccuccaacaagaaccgcggcaucaucaagaccuucuccaacggcugcgacuacgucuccaacaagggcgucgacaccgucuccgucggcaacacccucuacugcgucaacaagcaggagggccagucccucuacgucaagggcgagcccaucaucaacuucuacgacccccucgucuuccccuccgacgaguucgacgccuccaucucccaggucaacgagaagaucaaccagucccucgccuucauccgcaaguccgacgagcuccuccacaacgucaacgccggcaaguccaccaccaacaucaugaucaccaccaucaucaucgucaucaucgucauccuccucucccucaucgccgucggccuccuccucuacugcaaggcccgcuccacccccgucacccucuccaaggaccagcucuccggcaucaacaacaucgccuucuccaacugaggacuaguguccaccugucccuccugggcugcuggauugucucguuuuccugccaaauaaacaggaucagcgcuuuacagaucuaaaaaaaaaaaaaaaaaaaaaaaaaaaaaaaaaaaaaaaaaaaaaaaaaaaaaaaaaaaaaaaaugcaucccccccccccccccccccccccccccccccaaaggcucuuuucagagccaccagaauu

SEQ ID NO: 1976 - RNA, 1994 nt, Artificial Sequence
  mRNA product Design i-1 comprising derived and/or modified sequence from HRSV(A2)__F_DSCav1_mut1 (opt3)
gggagagggcgcuuggcuugcaaggacccugagcugcggcauugaagcacacccaacccaacucgacugaagucagccucacugaaccggaucugagaaucuucucucucugggcuugccagggcucuccgaaccuagcuagcauccucuucaauuccaacuagaaagcuuaccauggagcugcucauccuuaaggccaacgcuauuaccacaauacugacugcagugacguucugcuuugccagcggccagaauaucaccgaagaguucuaccaauccacauguucugcggucucaaaaggguauuugggagcuuuaagaacugguugguacaccaguguuauuacaaucgaacugagcaacauuaaggagaauaaaugcaacggcaccgacgccaaggugaaacuaaucaagcaggaacucgauaaguauaaaaaugcaguaacugagcugcagcuucugaugcaguccacacccgccaccgggucuggaucggcuauauguucaggcguggcagucugcaagguguugcaccucgagggugaaguuaacaaaaucaagagcgcccugcugaguacgaauaaagcuguggucucccucucuaacggggugagcguauuaacuuuuaagguucuggaccuuaagaauuacauugauaaacaauugcugccuauccuaaacaagcaguccuguucaauuccaaauaucgagaccgugauagaguuccagcagaaaaacaauaggcuccuggaaauuacacgggaguuuagugucaacgccggagugacuaccccggugagcacauauaugcuuaccaauucugaacuguugucccucaucaacgacaugcccauuacgaacgaucaaaagaaacugaugucaaauaacguccagaucguucgccagcagagcuacaguaucaugugcauuauaaaggaggaaguguuagcguauguagugcaacugccucucuacggcgucaucgacacuccauguuggaaacuucauacaucuccccugugcaccacuaauacaaaggagggcuccaacauuuguuugacccgaacggaucgugggugguacugcgacaaugcaggaagcgugucguucuuuccucaggccgaaaccuguaagguucagucuaacagaguguucugcgauacaaugaacucccuaacucugccaucagaggucaaucucugcaauguggacaucuuuaaccccaaauaugauuguaagauaaugaccaguaaaacagacguaagcuccucuguuauuacuagccugggugcuaucgugucaugcuacggcaagaccaaauguacagccaguaauaagaacagggggaucauuaagaccuucuccaauggaugcgauuaugucagcaacaaaggcguggacacugucucuguggguaauacgcuuuacuguguuaacaagcaagaggggcagucacuguaugugaaaggagaaccuaucauuaacuuuuacgacccauugguauucccgagugaugaguuugacgcaagcauaucccaggucaaugaaaagaucaaccagucucucgcuuucauucggaaaucggaugagcuguuacacaaugugaacgccggcaagagcacaaccaauaucaugaucacuaccauuauaaucguuauuaucgugauucugcuaucccucaucgcggucggccugcuuuuguauugcaaggcccgcucaacacccgugacccugaguaaagaccaacucucugggauaaacaauaucgcauucagcaacugaggacuaguguccaccugucccuccugggcugcuggauugucucguuuuccugccaaauaaacaggaucagcgcuuuacagaucuaaaaaaaaaaaaaaaaaaaaaaaaaaaaaaaaaaaaaaaaaaaaaaaaaaaaaaaaaaaaaaaaugcaucccccccccccccccccccccccccccccccaaaggcucuuuucagagccaccagaauu

SEQ ID NO: 1977 - RNA, 1994 nt, Artificial Sequence
  mRNA product Design i-1 comprising derived and/or modified sequence from HRSV(A2)__F_DSCav1_mut1 (opt4)
gggagagggcgcuuggcuugcaaggacccugagcugcggcauugaagcacacccaacccaacucgacugaagucagccucacugaaccggaucugagaaucuucucucucugggcuugccagggcucuccgaaccuagcuagcauccucuucaauuccaacuagaaagcuuaccauggagcugcugauccugaaggccaacgccaucaccaccauccugaccgccgugaccuucugcuucgccagcggccagaacaucaccgaggaguucuaccagagcaccugcagcgccgugagcaagggcuaccugggcgcccugagaaccggcugguacaccagcgugaucaccaucgagcugagcaacaucaaggagaacaagugcaacggcaccgacgccaaggugaagcugaucaagcaggagcuggacaaguacaagaacgccgugaccgagcugcagcugcugaugcagagcacccccgccaccggcagcggcagcgccaucugcagcggcguggccgugugcaaggugcugcaccuggagggcgaggugaacaagaucaagagcgcccugcugagcaccaacaaggccguggugagccugagcaacggcgugagcgugcugaccuucaaggugcuggaccugaagaacuacaucgacaagcagcugcugcccauccugaacaagcagagcugcagcauccccaacaucgagaccgugaucgaguuccagcagaagaacaacagacugcuggagaucaccagagaguucagcgugaacgccggcgugaccacccccgugagcaccuacaugcugaccaacagcgagcugcugagccugaucaacgacaugcccaucaccaacgaccagaagaagcugaugagcaacaacgugcagaucgugagacagcagagcuacagcaucaugugcaucaucaaggaggaggugcuggccuacguggugcagcugccccuguacggcgugaucgacacccccugcuggaagcugcacaccagcccccugugcaccaccaacaccaaggagggcagcaacaucugccugaccagaaccgacagaggcugguacugcgacaacgccggcagcgugagcuucuucccccaggccgagaccugcaaggugcagagcaacagaguguucugcgacaccaugaacagccugacccugcccagcgaggugaaccugugcaacguggacaucuucaaccccaaguacgacugcaagaucaugaccagcaagaccgacgugagcagcagcgugaucaccagccugggcgccaucgugagcugcuacggcaagaccaagugcaccgccagcaacaagaacagaggcaucaucaagaccuucagcaacggcugcgacuacgugagcaacaagggcguggacaccgugagcgugggcaacacccuguacugcgugaacaagcaggagggccagagccuguacgugaagggcgagcccaucaucaacuucuacgacccccugguguuccccagcgacgaguucgacgccagcaucagccaggugaacgagaagaucaaccagagccuggccuucaucagaaagagcgacgagcugcugcacaacgugaacgccggcaagagcaccaccaacaucaugaucaccaccaucaucaucgugaucaucgugauccugcugagccugaucgccgugggccugcugcuguacugcaaggccagaagcacccccgugacccugagcaaggaccagcugagcggcaucaacaacaucgccuucagcaacugaggacuaguguccaccugucccuccugggcugcuggauugucucguuuuccugccaaauaaacaggaucagcgcuuuacagaucuaaaaaaaaaaaaaaaaaaaaaaaaaaaaaaaaaaaaaaaaaaaaaaaaaaaaaaaaaaaaaaaaugcaucccccccccccccccccccccccccccccccaaaggcucuuuucagagccaccagaauu

SEQ ID NO: 1978 - RNA, 1994 nt, Artificial Sequence
  mRNA product Design i-1 comprising derived and/or modified sequence from HRSV(A2)__F_DSCav1_mut1 (opt5)
gggagagggcgcuuggcuugcaaggacccugagcugcggcauugaagcacacccaacccaacucgacugaagucagccucacugaaccggaucugagaaucuucucucucugggcuugccagggcucuccgaaccuagcuagcauccucuucaauuccaacuagaaagcuuaccauggagcugcucauccugaaggccaacgcuauuaccacaauccuuacggccgugaccuucugcuuugcgagcggccagaauauuacagaagaguucuaccaauccaccuguucugcugucagcaaaggguaucugggagcccucagaacaggcugguacaccuccguuaucacaauugaacugucuaacaucaaggagaauaaaugcaacgggaccgacgccaaggugaaacuuaucaagcaggaacuggauaaguauaaaaaugcugugacggagcuccagcugcugaugcagagcacccccgccacaggauccggcucugcuauuuguagcggggucgccgugugcaagguucuccaccuggagggagaagugaacaaaaucaaguccgcgcuucugagcaccaauaaagccgucgugucucucuccaacggcguuagcgugcugacauuuaagguccuugaccugaagaauuacauugauaaacaacuccugccuauccugaacaagcagucuuguuccauuccgaauaucgagaccgugauugaguuccagcagaaaaacaaucggcuccuggaaaucacgcgcgaguuuagcgugaacgcuggcgucacaacccccguuucuacauauaugcuuaccaauuccgaacugcucagccugaucaacgacaugccuauuaccaacgaucaaaagaaacuuauguccaauaacgugcagaucgugagacagcagucuuacagcauuaugugcaucauuaaggaggaaguccuggccuaugugguucaacucccccuguacggggugaucgacacaccuuguuggaaacugcauacgagcccccucugcaccacaaauaccaaggagggauccaacaucugucugacacggaccgaucgcggcugguacugcgacaaugcugggucugucuccuucuuuccucaggccgaaacguguaaggugcagagcaacagaguuuucugcgauacaaugaacucucuuacccugccgagcgaggugaaucucugcaaugucgacauuuuuaaccccaaauaugauuguaagaucaugaccuccaaaacagacgugucuagcuccgucauuaccagccugggagcgaucgugucuugcuacggcaagacaaaauguacggccuccaauaagaaccgggggauuaucaagaccuucagcaauggaugcgauuauguuucuaacaaaggcguggacacagucuccgugggcaauacccuuuacuguguuaacaagcaagaggggcagagccuguaugugaaaggagaaccuaucauuaacuuuuacgacccccucgucuucccuuccgaugaguuugacgcuucuaucagccaggugaaugaaaagauuaaccagucccuggccuucauccgcaaaucugaugagcugcuccacaaugugaacgcuggcaagagcacaaccaauauuaugaucacgaccauuaucaucguuauuaucgucauucugcuuucccugaucgccguggggcuccugcuguauugcaaggccagaagcacacccgugacccuuucuaaagaccaacucuccggaauuaacaauaucgcuuucagcaacugaggacuaguguccaccugucccuccugggcugcuggauugucucguuuuccugccaaauaaacaggaucagcgcuuuacagaucuaaaaaaaaaaaaaaaaaaaaaaaaaaaaaaaaaaaaaaaaaaaaaaaaaaaaaaaaaaaaaaaaugcaucccccccccccccccccccccccccccccccaaaggcucuuuucagagccaccagaauu

SEQ ID NO: 1979 - RNA, 1994 nt, Artificial Sequence
  mRNA product Design i-1 comprising derived and/or modified sequence from HRSV(A2)__F_DSCav1_mut1 (opt6)
gggagagggcgcuuggcuugcaaggacccugagcugcggcauugaagcacacccaacccaacucgacugaagucagccucacugaaccggaucugagaaucuucucucucugggcuugccagggcucuccgaaccuagcuagcauccucuucaauuccaacuagaaagcuuaccauggaacuauuaauacuaaaagcaaacgcuauaacaacaauacuaacagcagucacauucugcuuugcaucaggccaaaacaucacagaagaauuuuaccaaucaacaugcuccgccguaucgaaaggauaccuaggcgcauuaagaaccggaugguauacaucagucauaacaauugaacuaucuaacauaaaagaaaacaaauguaacggcacagaugccaaaguaaaacucaucaaacaagaauuagauaaauacaaaaacgcagucacugaacuacaacucuuaaugcaaucaacaccugcaacaggaucaggaucagcaauaugcucaggaguagccguauguaaaguacuacaccuagaaggagaagucaacaaaauaaaaucagcccuccuaaguacaaacaaagcugucguaucacuauccaaugguguuucaguacuaacuuucaaaguucuagaccuaaaaaacuacauagacaaacaacuacuaccaauacuaaauaaacaaaguuguucuauacccaacauagaaaccgucauagaauuucaacaaaaaaauaauagacuccuagaaauaacaagagaauuuucaguuaacgcagguguaacaaccccaguauccaccuauaugcuaacaaauucagaauuacuuucccuaaucaacgacaugcccauaacaaaugaccaaaaaaaauuaaugucaaacaacguccaaauaguucgucaacaaucauauucaauaaugugcauaauaaaagaagaagucuuagccuacguaguacaacuuccccuuuauggaguuaucgacacacccugcuggaaacuccacacuucaccacuauguacuacaaacacaaaagaaggauccaacaucugccucacaagaaccgaucgaggaugguacugugauaacgccggauccgucucauucuucccacaagcagaaacaugcaaaguacaaucaaacagaguauuuugcgacacaaugaacucccucacauuaccuucugaaguaaaccuauguaauguagacauauucaaccccaaauacgauugcaaaauaaugacaucaaagacagauguaucaucaagugucaucacaucccuaggagcaauugucucauguuaugguaaaacaaaaugcaccgcaucaaauaaaaacagaggcauaauaaaaaccuucucaaacgguugugacuacguauccaauaaaggcgucgacacaguaucaguagguaacacauuauauuguguaaacaaacaagaaggacagucccuauauguaaaaggagaaccaauaaucaacuucuacgacccacuuguuuucccuucugaugaauuugacgcaaguauaucacaaguaaaugaaaaaaucaaucaaucacuagccuuuauaagaaaaucagaugaauuauuacacaacguaaacgccggaaaaucaacaaccaacauaaugauaaccacaauaauaaucgucauaauagucauccuacuaucacucauagcaguuggacuccuacuauacugcaaagcacgaucaacaccaguaacauuauccaaagaccaacuaagugguaucaauaacaucgccuuuucaaacugaggacuaguguccaccugucccuccugggcugcuggauugucucguuuuccugccaaauaaacaggaucagcgcuuuacagaucuaaaaaaaaaaaaaaaaaaaaaaaaaaaaaaaaaaaaaaaaaaaaaaaaaaaaaaaaaaaaaaaaugcaucccccccccccccccccccccccccccccccaaaggcucuuuucagagccaccagaauu

SEQ ID NO: 1980 - RNA, 1994 nt, Artificial Sequence
  mRNA product Design i-1 comprising derived and/or modified sequence from HRSV(A2)__F_DSCav1_mut1 (opt11)
gggagagggcgcuuggcuugcaaggacccugagcugcggcauugaagcacacccaacccaacucgacugaagucagccucacugaaccggaucugagaaucuucucucucugggcuugccagggcucuccgaaccuagcuagcauccucuucaauuccaacuagaaagcuuaccauggaacuccuaauccucaaagccaacgcaaucaccacaauccucacugccgucaccuucugcuucgccuccggccaaaacauaacagaagaauuuuaccaaucaaccuguucagcggucuccaaaggcuaccucggcgcccuccgcaccggcugguacaccuccgugaucaccauagaacucuccaacaucaaggaaaacaaaugcaacggcaccgacgcgaaggucaaacuuauuaaacaagaacucgacaaauacaaaaacgcagucaccgaacuacaacuccuaaugcaguccacgccagccaccggcucuggcucagccauaugcuccgguguggccguaugcaaaguccuacaccucgaaggagaagucaacaaaauaaaauccgcccuacuguccacaaacaaggccguagucucccucucaaacggcgucucaguacucaccuucaaaguccuagaccucaagaacuacaucgacaaacaacuccuacccauacuaaacaaacaauccugcucaauccccaacaucgaaaccguaauagaauuucaacaaaaaaacaacagacuccuggagaucacccgggaauuuuccguaaacgccggagucacaacacccgucucaaccuacaugcuaacgaacucagagcuccucucacuuaucaacgacaugcccauaacaaacgaccaaaaaaaacucauguccaacaacgugcaaaucguccgacaacaauccuacuccaucaugugcaucauuaaagaagaaguccucgcauacguaguccagcucccccucuacggcgucauagacacccccugcuggaaacuacacacaucaccccucugcacaacaaacaccaaagaaggcuccaacaucugccucacccgcaccgaccgaggcugguacugcgauaacgccggcagcgucuccuucuucccccaagcagaaaccugcaagguccaauccaaccgaguuuucugcgacacuaugaacucgcucacccuccccuccgaagucaaccucugcaacgucgacauuuucaaccccaaauacgacugcaaaaucaugaccuccaagaccgacguauccuccuccgucaucaccucccuaggcgccauaguaaguugcuacggcaaaaccaagugcacagcaagcaacaaaaaccgaggaauaaucaaaaccuucuccaacggcugcgacuacguauccaacaagggcgucgacaccguauccguagggaacacccuuuacugcguaaacaaacaagaaggacaaucacucuacguaaaaggcgaacccauaaucaacuucuacgacccccucguauuucccuccgacgaauuugacgcaucaaucucacaggucaacgaaaaaauaaaccaaucgcuagcauucaucagaaaaucagacgaacuccuacacaacgucaacgcaggcaagagcaccaccaacaucaugaucaccaccaucaucaucgucauaaucgucauacuacucucacucauagcagucggccuccuccuauacuguaaagcaaggucgaccccagucacccuauccaaagaccaacuaagcggcaucaacaacaucgcguucucaaacuaaggacuaguguccaccugucccuccugggcugcuggauugucucguuuuccugccaaauaaacaggaucagcgcuuuacagaucuaaaaaaaaaaaaaaaaaaaaaaaaaaaaaaaaaaaaaaaaaaaaaaaaaaaaaaaaaaaaaaaaugcaucccccccccccccccccccccccccccccccaaaggcucuuuucagagccaccagaauu

SEQ ID NO: 1981 - RNA, 1994 nt, Artificial Sequence
  mRNA product Design i-2 comprising derived and/or modified sequence from HRSV(A2)__F_DSCav1_mut1 (opt1)
gggagaggcgcugccuacggagguggcagccaucuccuucucggcaucaagcuuaccauggagcugcucauccugaaggccaacgccaucaccaccauccugacggcggugaccuucugcuucgccagcggccagaacaucaccgaggaguucuaccaguccacgugcagcgccgucuccaagggguaccucggcgcccugcggaccggcugguacaccuccgugaucaccaucgagcugagcaacaucaaggagaacaagugcaacgggaccgacgccaaggugaagcucaucaagcaggagcuggacaaguacaagaacgcggucacggagcugcagcuccugaugcaguccaccccggcaaccggcuccggcuccgccaucugcagcggcgucgccgugugcaaggugcugcaccucgagggggaggucaacaagaucaagagcgcccugcuguccaccaacaaggccguggugagccucuccaacggcgucagcgugcugaccuucaaggugcuggaccucaagaacuacaucgacaagcagcugcugcccauccugaacaagcagagcugcuccauccccaacaucgagacggugaucgaguuccagcagaagaacaaccggcuccuggagaucacccgcgaguucagcgugaacgccggggucaccacccccguguccacguacaugcugaccaacagcgagcuccugucccugaucaacgacaugccgaucaccaacgaccagaagaagcucaugagcaacaacgugcagaucguccggcagcaguccuacagcaucaugugcaucaucaaggaggaggugcuggcguacgugguccagcugccccucuacggcgugaucgacacccccugcuggaagcugcacacgagcccccugugcaccaccaacaccaaggagggguccaacaucugccucacgcgcaccgaccggggcugguacugcgacaacgccggcagcgucuccuucuucccgcaggccgagaccugcaaggugcagagcaaccgcguguucugcgacaccaugaacucccugacgcugcccagcgagguaaaccucugcaacgucgacaucuucaaccccaaguacgacugcaagaucaugaccuccaagaccgacgugagcuccagcgugaucaccucccugggggccaucgucagcugcuacggcaagacgaagugcaccgccagcaacaagaaccgggggaucaucaagaccuucuccaacggcugcgacuacgugagcaacaagggcguggacaccguguccgucgggaacacccuguacugcgugaacaagcaggagggccagagccucuacgugaagggggagcccaucaucaacuucuacgacccgcuggucuuccccuccgacgaguucgacgcgagcaucucccaggugaacgagaagaucaaccagagccuggccuucauccgcaaguccgacgagcugcuccacaacgugaacgccggcaagagcacgaccaacaucaugaucaccaccaucaucaucgucaucaucgugauccugcugucccucaucgccguggggcugcugcucuacugcaaggcccggagcacgcccgucacccuguccaaggaccagcugagcggcaucaacaacaucgcguucuccaacugaggacuagugcaucacauuuaaaagcaucucagccuaccaugagaauaagagaaagaaaaugaagaucaauagcuuauucaucucuuuuucuuuuucguugguguaaagccaacacccugucuaaaaaacauaaauuucuuuaaucauuuugccucuuuucucugugcuucaauuaauaaaaaauggaaagaaccuagaucuaaaaaaaaaaaaaaaaaaaaaaaaaaaaaaaaaaaaaaaaaaaaaaaaaaaaaaaaaaaaaaaaugcaucccccccccccccccccccccccccccccccaaaggcucuuuucagagccaccagaauu

SEQ ID NO: 1982 - RNA, 1994 nt, Artificial Sequence
  mRNA product Design i-2 comprising derived and/or modified sequence from HRSV(A2)__F_DSCav1_mut1 (opt1)
gggagaggcgcugccuacggagguggcagccaucuccuucucggcaucaagcuuaccauggagcugcucauccugaaggccaacgccaucaccaccauccugacggcggugaccuucugcuucgccagcggccagaacaucaccgaggaguucuaccaguccacgugcagcgccgucuccaagggguaccucggcgcccugcgcaccgggugguacaccagcgugaucaccaucgagcuguccaacaucaaggagaacaagugcaacggcaccgacgccaaggugaagcucaucaagcaggagcuggacaaguacaagaacgcggucacggagcugcagcuccugaugcagagcacccccgccaccggguccggcagcgccaucugcuccggcguggccgugugcaagguccugcaccucgagggggaggugaacaagaucaagagcgcgcugcuguccaccaacaaggccguggucagccucuccaacggcgugagcgugcugacguucaagguccuggaccucaagaacuacaucgacaagcagcugcugccgauccucaacaagcaguccugcagcauccccaacaucgagaccgugaucgaguuccagcagaagaacaaccggcugcuggagaucacccgcgaguucuccgugaacgccggggucaccacgcccgugagcaccuacaugcucaccaacuccgagcugcugagccucaucaacgacaugcccaucaccaacgaccagaagaagcugaugagcaacaacgugcagaucguccggcagcaguccuacagcaucaugugcaucaucaaggaggaggugcuggccuacgugguccagcucccgcuguacggcgugaucgacacgcccugcuggaagcugcacaccagcccccucugcaccaccaacacgaaggagggguccaacaucugccugacccgcaccgaccggggcugguacugcgacaacgccggcuccgugagcuucuucccccaggcggagaccugcaagguccaguccaaccgcguguucugcgacacgaugaacagccugacccucccguccgaggucaaccugugcaacguggacaucuucaaccccaaguacgacugcaagaucaugaccagcaagaccgacguguccagcuccgucaucacgagccugggggccaucguguccugcuacggcaagaccaagugcaccgccagcaacaagaaccgggggaucaucaagaccuucuccaacggcugcgacuacgugagcaacaagggcgucgacacgguguccguggggaacacccucuacugcgucaacaagcaggagggccagagccuguacgugaagggggagcccaucaucaacuucuacgacccccugguguucccgagcgacgaguucgacgccuccaucagccaggucaacgagaagaucaaccagucccucgccuucauccgcaagagcgacgagcugcugcacaacgugaacgcgggcaaguccaccaccaacaucaugaucaccacgaucaucaucgugaucaucgucauccuccugagccugaucgccguggggcuccugcuguacugcaaggcccgguccacccccgugacccugagcaaggaccagcucuccggcaucaacaacaucgccuucagcaacugaggacuagugcaucacauuuaaaagcaucucagccuaccaugagaauaagagaaagaaaaugaagaucaauagcuuauucaucucuuuuucuuuuucguugguguaaagccaacacccugucuaaaaaacauaaauuucuuuaaucauuuugccucuuuucucugugcuucaauuaauaaaaaauggaaagaaccuagaucuaaaaaaaaaaaaaaaaaaaaaaaaaaaaaaaaaaaaaaaaaaaaaaaaaaaaaaaaaaaaaaaaugcaucccccccccccccccccccccccccccccccaaaggcucuuuucagagccaccagaauu

SEQ ID NO: 1983 - RNA, 1994 nt, Artificial Sequence
  mRNA product Design i-2 comprising derived and/or modified sequence from HRSV(A2)__F_DSCav1_mut1 (opt2)
gggagaggcgcugccuacggagguggcagccaucuccuucucggcaucaagcuuaccauggagcuccucauccucaaggccaacgccaucaccaccauccucaccgccgucaccuucugcuucgccuccggccagaacaucaccgaggaguucuaccaguccaccugcuccgccgucuccaagggcuaccucggcgcccuccgcaccggcugguacaccuccgucaucaccaucgagcucuccaacaucaaggagaacaagugcaacggcaccgacgccaaggucaagcucaucaagcaggagcucgacaaguacaagaacgccgucaccgagcuccagcuccucaugcaguccacccccgccaccggcuccggcuccgccaucugcuccggcgucgccgucugcaagguccuccaccucgagggcgaggucaacaagaucaaguccgcccuccucuccaccaacaaggccgucgucucccucuccaacggcgucuccguccucaccuucaagguccucgaccucaagaacuacaucgacaagcagcuccuccccauccucaacaagcaguccugcuccauccccaacaucgagaccgucaucgaguuccagcagaagaacaaccgccuccucgagaucacccgcgaguucuccgucaacgccggcgucaccacccccgucuccaccuacaugcucaccaacuccgagcuccucucccucaucaacgacaugcccaucaccaacgaccagaagaagcucauguccaacaacguccagaucguccgccagcaguccuacuccaucaugugcaucaucaaggaggagguccucgccuacgucguccagcucccccucuacggcgucaucgacacccccugcuggaagcuccacaccuccccccucugcaccaccaacaccaaggagggcuccaacaucugccucacccgcaccgaccgcggcugguacugcgacaacgccggcuccgucuccuucuucccccaggccgagaccugcaagguccaguccaaccgcgucuucugcgacaccaugaacucccucacccuccccuccgaggucaaccucugcaacgucgacaucuucaaccccaaguacgacugcaagaucaugaccuccaagaccgacgucuccuccuccgucaucaccucccucggcgccaucgucuccugcuacggcaagaccaagugcaccgccuccaacaagaaccgcggcaucaucaagaccuucuccaacggcugcgacuacgucuccaacaagggcgucgacaccgucuccgucggcaacacccucuacugcgucaacaagcaggagggccagucccucuacgucaagggcgagcccaucaucaacuucuacgacccccucgucuuccccuccgacgaguucgacgccuccaucucccaggucaacgagaagaucaaccagucccucgccuucauccgcaaguccgacgagcuccuccacaacgucaacgccggcaaguccaccaccaacaucaugaucaccaccaucaucaucgucaucaucgucauccuccucucccucaucgccgucggccuccuccucuacugcaaggcccgcuccacccccgucacccucuccaaggaccagcucuccggcaucaacaacaucgccuucuccaacugaggacuagugcaucacauuuaaaagcaucucagccuaccaugagaauaagagaaagaaaaugaagaucaauagcuuauucaucucuuuuucuuuuucguugguguaaagccaacacccugucuaaaaaacauaaauuucuuuaaucauuuugccucuuuucucugugcuucaauuaauaaaaaauggaaagaaccuagaucuaaaaaaaaaaaaaaaaaaaaaaaaaaaaaaaaaaaaaaaaaaaaaaaaaaaaaaaaaaaaaaaaugcaucccccccccccccccccccccccccccccccaaaggcucuuuucagagccaccagaauu

SEQ ID NO: 1984 - RNA, 1994 nt, Artificial Sequence
  mRNA product Design i-2 comprising derived and/or modified sequence from HRSV(A2)__F_DSCav1_mut1 (opt3)
gggagaggcgcugccuacggagguggcagccaucuccuucucggcaucaagcuuaccauggagcugcucauccuuaaggccaacgcuauuaccacaauacugacugcagugacguucugcuuugccagcggccagaauaucaccgaagaguucuaccaauccacauguucugcggucucaaaaggguauuugggagcuuuaagaacugguugguacaccaguguuauuacaaucgaacugagcaacauuaaggagaauaaaugcaacggcaccgacgccaaggugaaacuaaucaagcaggaacucgauaaguauaaaaaugcaguaacugagcugcagcuucugaugcaguccacacccgccaccgggucuggaucggcuauauguucaggcguggcagucugcaagguguugcaccucgagggugaaguuaacaaaaucaagagcgcccugcugaguacgaauaaagcuguggucucccucucuaacggggugagcguauuaacuuuuaagguucuggaccuuaagaauuacauugauaaacaauugcugccuauccuaaacaagcaguccuguucaauuccaaauaucgagaccgugauagaguuccagcagaaaaacaauaggcuccuggaaauuacacgggaguuuagugucaacgccggagugacuaccccggugagcacauauaugcuuaccaauucugaacuguugucccucaucaacgacaugcccauuacgaacgaucaaaagaaacugaugucaaauaacguccagaucguucgccagcagagcuacaguaucaugugcauuauaaaggaggaaguguuagcguauguagugcaacugccucucuacggcgucaucgacacuccauguuggaaacuucauacaucuccccugugcaccacuaauacaaaggagggcuccaacauuuguuugacccgaacggaucgugggugguacugcgacaaugcaggaagcgugucguucuuuccucaggccgaaaccuguaagguucagucuaacagaguguucugcgauacaaugaacucccuaacucugccaucagaggucaaucucugcaauguggacaucuuuaaccccaaauaugauuguaagauaaugaccaguaaaacagacguaagcuccucuguuauuacuagccugggugcuaucgugucaugcuacggcaagaccaaauguacagccaguaauaagaacagggggaucauuaagaccuucuccaauggaugcgauuaugucagcaacaaaggcguggacacugucucuguggguaauacgcuuuacuguguuaacaagcaagaggggcagucacuguaugugaaaggagaaccuaucauuaacuuuuacgacccauugguauucccgagugaugaguuugacgcaagcauaucccaggucaaugaaaagaucaaccagucucucgcuuucauucggaaaucggaugagcuguuacacaaugugaacgccggcaagagcacaaccaauaucaugaucacuaccauuauaaucguuauuaucgugauucugcuaucccucaucgcggucggccugcuuuuguauugcaaggcccgcucaacacccgugacccugaguaaagaccaacucucugggauaaacaauaucgcauucagcaacugaggacuagugcaucacauuuaaaagcaucucagccuaccaugagaauaagagaaagaaaaugaagaucaauagcuuauucaucucuuuuucuuuuucguugguguaaagccaacacccugucuaaaaaacauaaauuucuuuaaucauuuugccucuuuucucugugcuucaauuaauaaaaaauggaaagaaccuagaucuaaaaaaaaaaaaaaaaaaaaaaaaaaaaaaaaaaaaaaaaaaaaaaaaaaaaaaaaaaaaaaaaugcaucccccccccccccccccccccccccccccccaaaggcucuuuucagagccaccagaauu

SEQ ID NO: 1985 - RNA, 1994 nt, Artificial Sequence
  mRNA product Design i-2 comprising derived and/or modified sequence from HRSV(A2)__F_DSCav1_mut1 (opt4)
gggagaggcgcugccuacggagguggcagccaucuccuucucggcaucaagcuuaccauggagcugcugauccugaaggccaacgccaucaccaccauccugaccgccgugaccuucugcuucgccagcggccagaacaucaccgaggaguucuaccagagcaccugcagcgccgugagcaagggcuaccugggcgcccugagaaccggcugguacaccagcgugaucaccaucgagcugagcaacaucaaggagaacaagugcaacggcaccgacgccaaggugaagcugaucaagcaggagcuggacaaguacaagaacgccgugaccgagcugcagcugcugaugcagagcacccccgccaccggcagcggcagcgccaucugcagcggcguggccgugugcaaggugcugcaccuggagggcgaggugaacaagaucaagagcgcccugcugagcaccaacaaggccguggugagccugagcaacggcgugagcgugcugaccuucaaggugcuggaccugaagaacuacaucgacaagcagcugcugcccauccugaacaagcagagcugcagcauccccaacaucgagaccgugaucgaguuccagcagaagaacaacagacugcuggagaucaccagagaguucagcgugaacgccggcgugaccacccccgugagcaccuacaugcugaccaacagcgagcugcugagccugaucaacgacaugcccaucaccaacgaccagaagaagcugaugagcaacaacgugcagaucgugagacagcagagcuacagcaucaugugcaucaucaaggaggaggugcuggccuacguggugcagcugccccuguacggcgugaucgacacccccugcuggaagcugcacaccagcccccugugcaccaccaacaccaaggagggcagcaacaucugccugaccagaaccgacagaggcugguacugcgacaacgccggcagcgugagcuucuucccccaggccgagaccugcaaggugcagagcaacagaguguucugcgacaccaugaacagccugacccugcccagcgaggugaaccugugcaacguggacaucuucaaccccaaguacgacugcaagaucaugaccagcaagaccgacgugagcagcagcgugaucaccagccugggcgccaucgugagcugcuacggcaagaccaagugcaccgccagcaacaagaacagaggcaucaucaagaccuucagcaacggcugcgacuacgugagcaacaagggcguggacaccgugagcgugggcaacacccuguacugcgugaacaagcaggagggccagagccuguacgugaagggcgagcccaucaucaacuucuacgacccccugguguuccccagcgacgaguucgacgccagcaucagccaggugaacgagaagaucaaccagagccuggccuucaucagaaagagcgacgagcugcugcacaacgugaacgccggcaagagcaccaccaacaucaugaucaccaccaucaucaucgugaucaucgugauccugcugagccugaucgccgugggccugcugcuguacugcaaggccagaagcacccccgugacccugagcaaggaccagcugagcggcaucaacaacaucgccuucagcaacugaggacuagugcaucacauuuaaaagcaucucagccuaccaugagaauaagagaaagaaaaugaagaucaauagcuuauucaucucuuuuucuuuuucguugguguaaagccaacacccugucuaaaaaacauaaauuucuuuaaucauuuugccucuuuucucugugcuucaauuaauaaaaaauggaaagaaccuagaucuaaaaaaaaaaaaaaaaaaaaaaaaaaaaaaaaaaaaaaaaaaaaaaaaaaaaaaaaaaaaaaaaugcaucccccccccccccccccccccccccccccccaaaggcucuuuucagagccaccagaauu

SEQ ID NO: 1986 - RNA, 1994 nt, Artificial Sequence
  mRNA product Design i-2 comprising derived and/or modified sequence from HRSV(A2)__F_DSCav1_mut1 (opt5)
gggagaggcgcugccuacggagguggcagccaucuccuucucggcaucaagcuuaccauggagcugcucauccugaaggccaacgcuauuaccacaauccuuacggccgugaccuucugcuuugcgagcggccagaauauuacagaagaguucuaccaauccaccuguucugcugucagcaaaggguaucugggagcccucagaacaggcugguacaccuccguuaucacaauugaacugucuaacaucaaggagaauaaaugcaacgggaccgacgccaaggugaaacuuaucaagcaggaacuggauaaguauaaaaaugcugugacggagcuccagcugcugaugcagagcacccccgccacaggauccggcucugcuauuuguagcggggucgccgugugcaagguucuccaccuggagggagaagugaacaaaaucaaguccgcgcuucugagcaccaauaaagccgucgugucucucuccaacggcguuagcgugcugacauuuaagguccuugaccugaagaauuacauugauaaacaacuccugccuauccugaacaagcagucuuguuccauuccgaauaucgagaccgugauugaguuccagcagaaaaacaaucggcuccuggaaaucacgcgcgaguuuagcgugaacgcuggcgucacaacccccguuucuacauauaugcuuaccaauuccgaacugcucagccugaucaacgacaugccuauuaccaacgaucaaaagaaacuuauguccaauaacgugcagaucgugagacagcagucuuacagcauuaugugcaucauuaaggaggaaguccuggccuaugugguucaacucccccuguacggggugaucgacacaccuuguuggaaacugcauacgagcccccucugcaccacaaauaccaaggagggauccaacaucugucugacacggaccgaucgcggcugguacugcgacaaugcugggucugucuccuucuuuccucaggccgaaacguguaaggugcagagcaacagaguuuucugcgauacaaugaacucucuuacccugccgagcgaggugaaucucugcaaugucgacauuuuuaaccccaaauaugauuguaagaucaugaccuccaaaacagacgugucuagcuccgucauuaccagccugggagcgaucgugucuugcuacggcaagacaaaauguacggccuccaauaagaaccgggggauuaucaagaccuucagcaauggaugcgauuauguuucuaacaaaggcguggacacagucuccgugggcaauacccuuuacuguguuaacaagcaagaggggcagagccuguaugugaaaggagaaccuaucauuaacuuuuacgacccccucgucuucccuuccgaugaguuugacgcuucuaucagccaggugaaugaaaagauuaaccagucccuggccuucauccgcaaaucugaugagcugcuccacaaugugaacgcuggcaagagcacaaccaauauuaugaucacgaccauuaucaucguuauuaucgucauucugcuuucccugaucgccguggggcuccugcuguauugcaaggccagaagcacacccgugacccuuucuaaagaccaacucuccggaauuaacaauaucgcuuucagcaacugaggacuagugcaucacauuuaaaagcaucucagccuaccaugagaauaagagaaagaaaaugaagaucaauagcuuauucaucucuuuuucuuuuucguugguguaaagccaacacccugucuaaaaaacauaaauuucuuuaaucauuuugccucuuuucucugugcuucaauuaauaaaaaauggaaagaaccuagaucuaaaaaaaaaaaaaaaaaaaaaaaaaaaaaaaaaaaaaaaaaaaaaaaaaaaaaaaaaaaaaaaaugcaucccccccccccccccccccccccccccccccaaaggcucuuuucagagccaccagaauu

SEQ ID NO: 1987 - RNA, 1994 nt, Artificial Sequence
  mRNA product Design i-2 comprising derived and/or modified sequence from HRSV(A2)__F_DSCav1_mut1 (opt6)
gggagaggcgcugccuacggagguggcagccaucuccuucucggcaucaagcuuaccauggaacuauuaauacuaaaagcaaacgcuauaacaacaauacuaacagcagucacauucugcuuugcaucaggccaaaacaucacagaagaauuuuaccaaucaacaugcuccgccguaucgaaaggauaccuaggcgcauuaagaaccggaugguauacaucagucauaacaauugaacuaucuaacauaaaagaaaacaaauguaacggcacagaugccaaaguaaaacucaucaaacaagaauuagauaaauacaaaaacgcagucacugaacuacaacucuuaaugcaaucaacaccugcaacaggaucaggaucagcaauaugcucaggaguagccguauguaaaguacuacaccuagaaggagaagucaacaaaauaaaaucagcccuccuaaguacaaacaaagcugucguaucacuauccaaugguguuucaguacuaacuuucaaaguucuagaccuaaaaaacuacauagacaaacaacuacuaccaauacuaaauaaacaaaguuguucuauacccaacauagaaaccgucauagaauuucaacaaaaaaauaauagacuccuagaaauaacaagagaauuuucaguuaacgcagguguaacaaccccaguauccaccuauaugcuaacaaauucagaauuacuuucccuaaucaacgacaugcccauaacaaaugaccaaaaaaaauuaaugucaaacaacguccaaauaguucgucaacaaucauauucaauaaugugcauaauaaaagaagaagucuuagccuacguaguacaacuuccccuuuauggaguuaucgacacacccugcuggaaacuccacacuucaccacuauguacuacaaacacaaaagaaggauccaacaucugccucacaagaaccgaucgaggaugguacugugauaacgccggauccgucucauucuucccacaagcagaaacaugcaaaguacaaucaaacagaguauuuugcgacacaaugaacucccucacauuaccuucugaaguaaaccuauguaauguagacauauucaaccccaaauacgauugcaaaauaaugacaucaaagacagauguaucaucaagugucaucacaucccuaggagcaauugucucauguuaugguaaaacaaaaugcaccgcaucaaauaaaaacagaggcauaauaaaaaccuucucaaacgguugugacuacguauccaauaaaggcgucgacacaguaucaguagguaacacauuauauuguguaaacaaacaagaaggacagucccuauauguaaaaggagaaccaauaaucaacuucuacgacccacuuguuuucccuucugaugaauuugacgcaaguauaucacaaguaaaugaaaaaaucaaucaaucacuagccuuuauaagaaaaucagaugaauuauuacacaacguaaacgccggaaaaucaacaaccaacauaaugauaaccacaauaauaaucgucauaauagucauccuacuaucacucauagcaguuggacuccuacuauacugcaaagcacgaucaacaccaguaacauuauccaaagaccaacuaagugguaucaauaacaucgccuuuucaaacugaggacuagugcaucacauuuaaaagcaucucagccuaccaugagaauaagagaaagaaaaugaagaucaauagcuuauucaucucuuuuucuuuuucguugguguaaagccaacacccugucuaaaaaacauaaauuucuuuaaucauuuugccucuuuucucugugcuucaauuaauaaaaaauggaaagaaccuagaucuaaaaaaaaaaaaaaaaaaaaaaaaaaaaaaaaaaaaaaaaaaaaaaaaaaaaaaaaaaaaaaaaugcaucccccccccccccccccccccccccccccccaaaggcucuuuucagagccaccagaauu

SEQ ID NO: 1988 - RNA, 1994 nt, Artificial Sequence
  mRNA product Design i-2 comprising derived and/or modified sequence from HRSV(A2)__F_DSCav1_mut1 (opt11)
gggagaggcgcugccuacggagguggcagccaucuccuucucggcaucaagcuuaccauggaacuccuaauccucaaagccaacgcaaucaccacaauccucacugccgucaccuucugcuucgccuccggccaaaacauaacagaagaauuuuaccaaucaaccuguucagcggucuccaaaggcuaccucggcgcccuccgcaccggcugguacaccuccgugaucaccauagaacucuccaacaucaaggaaaacaaaugcaacggcaccgacgcgaaggucaaacuuauuaaacaagaacucgacaaauacaaaaacgcagucaccgaacuacaacuccuaaugcaguccacgccagccaccggcucuggcucagccauaugcuccgguguggccguaugcaaaguccuacaccucgaaggagaagucaacaaaauaaaauccgcccuacuguccacaaacaaggccguagucucccucucaaacggcgucucaguacucaccuucaaaguccuagaccucaagaacuacaucgacaaacaacuccuacccauacuaaacaaacaauccugcucaauccccaacaucgaaaccguaauagaauuucaacaaaaaaacaacagacuccuggagaucacccgggaauuuuccguaaacgccggagucacaacacccgucucaaccuacaugcuaacgaacucagagcuccucucacuuaucaacgacaugcccauaacaaacgaccaaaaaaaacucauguccaacaacgugcaaaucguccgacaacaauccuacuccaucaugugcaucauuaaagaagaaguccucgcauacguaguccagcucccccucuacggcgucauagacacccccugcuggaaacuacacacaucaccccucugcacaacaaacaccaaagaaggcuccaacaucugccucacccgcaccgaccgaggcugguacugcgauaacgccggcagcgucuccuucuucccccaagcagaaaccugcaagguccaauccaaccgaguuuucugcgacacuaugaacucgcucacccuccccuccgaagucaaccucugcaacgucgacauuuucaaccccaaauacgacugcaaaaucaugaccuccaagaccgacguauccuccuccgucaucaccucccuaggcgccauaguaaguugcuacggcaaaaccaagugcacagcaagcaacaaaaaccgaggaauaaucaaaaccuucuccaacggcugcgacuacguauccaacaagggcgucgacaccguauccguagggaacacccuuuacugcguaaacaaacaagaaggacaaucacucuacguaaaaggcgaacccauaaucaacuucuacgacccccucguauuucccuccgacgaauuugacgcaucaaucucacaggucaacgaaaaaauaaaccaaucgcuagcauucaucagaaaaucagacgaacuccuacacaacgucaacgcaggcaagagcaccaccaacaucaugaucaccaccaucaucaucgucauaaucgucauacuacucucacucauagcagucggccuccuccuauacuguaaagcaaggucgaccccagucacccuauccaaagaccaacuaagcggcaucaacaacaucgcguucucaaacuaaggacuagugcaucacauuuaaaagcaucucagccuaccaugagaauaagagaaagaaaaugaagaucaauagcuuauucaucucuuuuucuuuuucguugguguaaagccaacacccugucuaaaaaacauaaauuucuuuaaucauuuugccucuuuucucugugcuucaauuaauaaaaaauggaaagaaccuagaucuaaaaaaaaaaaaaaaaaaaaaaaaaaaaaaaaaaaaaaaaaaaaaaaaaaaaaaaaaaaaaaaaugcaucccccccccccccccccccccccccccccccaaaggcucuuuucagagccaccagaauu

SEQ ID NO: 1989 - RNA, 1990 nt, Artificial Sequence
  mRNA product Design i-2 comprising derived and/or modified sequence from HRSV(A2)__F_DSCav1_mut1 (opt1)
ggggcgcugccuacggagguggcagccaucuccuucucggcaucaagcuuaccauggagcugcucauccugaaggccaacgccaucaccaccauccugacggcggugaccuucugcuucgccagcggccagaacaucaccgaggaguucuaccaguccacgugcagcgccgucuccaagggguaccucggcgcccugcggaccggcugguacaccuccgugaucaccaucgagcugagcaacaucaaggagaacaagugcaacgggaccgacgccaaggugaagcucaucaagcaggagcuggacaaguacaagaacgcggucacggagcugcagcuccugaugcaguccaccccggcaaccggcuccggcuccgccaucugcagcggcgucgccgugugcaaggugcugcaccucgagggggaggucaacaagaucaagagcgcccugcuguccaccaacaaggccguggugagccucuccaacggcgucagcgugcugaccuucaaggugcuggaccucaagaacuacaucgacaagcagcugcugcccauccugaacaagcagagcugcuccauccccaacaucgagacggugaucgaguuccagcagaagaacaaccggcuccuggagaucacccgcgaguucagcgugaacgccggggucaccacccccguguccacguacaugcugaccaacagcgagcuccugucccugaucaacgacaugccgaucaccaacgaccagaagaagcucaugagcaacaacgugcagaucguccggcagcaguccuacagcaucaugugcaucaucaaggaggaggugcuggcguacgugguccagcugccccucuacggcgugaucgacacccccugcuggaagcugcacacgagcccccugugcaccaccaacaccaaggagggguccaacaucugccucacgcgcaccgaccggggcugguacugcgacaacgccggcagcgucuccuucuucccgcaggccgagaccugcaaggugcagagcaaccgcguguucugcgacaccaugaacucccugacgcugcccagcgagguaaaccucugcaacgucgacaucuucaaccccaaguacgacugcaagaucaugaccuccaagaccgacgugagcuccagcgugaucaccucccugggggccaucgucagcugcuacggcaagacgaagugcaccgccagcaacaagaaccgggggaucaucaagaccuucuccaacggcugcgacuacgugagcaacaagggcguggacaccguguccgucgggaacacccuguacugcgugaacaagcaggagggccagagccucuacgugaagggggagcccaucaucaacuucuacgacccgcuggucuuccccuccgacgaguucgacgcgagcaucucccaggugaacgagaagaucaaccagagccuggccuucauccgcaaguccgacgagcugcuccacaacgugaacgccggcaagagcacgaccaacaucaugaucaccaccaucaucaucgucaucaucgugauccugcugucccucaucgccguggggcugcugcucuacugcaaggcccggagcacgcccgucacccuguccaaggaccagcugagcggcaucaacaacaucgcguucuccaacugaggacuagugcaucacauuuaaaagcaucucagccuaccaugagaauaagagaaagaaaaugaagaucaauagcuuauucaucucuuuuucuuuuucguugguguaaagccaacacccugucuaaaaaacauaaauuucuuuaaucauuuugccucuuuucucugugcuucaauuaauaaaaaauggaaagaaccuagaucuaaaaaaaaaaaaaaaaaaaaaaaaaaaaaaaaaaaaaaaaaaaaaaaaaaaaaaaaaaaaaaaaugcaucccccccccccccccccccccccccccccccaaaggcucuuuucagagccaccagaauu

SEQ ID NO: 1990 - RNA, 1990 nt, Artificial Sequence
  mRNA product Design i-2 comprising derived and/or modified sequence from HRSV(A2)__F_DSCav1_mut1 (opt1)
ggggcgcugccuacggagguggcagccaucuccuucucggcaucaagcuuaccauggagcugcucauccugaaggccaacgccaucaccaccauccugacggcggugaccuucugcuucgccagcggccagaacaucaccgaggaguucuaccaguccacgugcagcgccgucuccaagggguaccucggcgcccugcgcaccgggugguacaccagcgugaucaccaucgagcuguccaacaucaaggagaacaagugcaacggcaccgacgccaaggugaagcucaucaagcaggagcuggacaaguacaagaacgcggucacggagcugcagcuccugaugcagagcacccccgccaccggguccggcagcgccaucugcuccggcguggccgugugcaagguccugcaccucgagggggaggugaacaagaucaagagcgcgcugcuguccaccaacaaggccguggucagccucuccaacggcgugagcgugcugacguucaagguccuggaccucaagaacuacaucgacaagcagcugcugccgauccucaacaagcaguccugcagcauccccaacaucgagaccgugaucgaguuccagcagaagaacaaccggcugcuggagaucacccgcgaguucuccgugaacgccggggucaccacgcccgugagcaccuacaugcucaccaacuccgagcugcugagccucaucaacgacaugcccaucaccaacgaccagaagaagcugaugagcaacaacgugcagaucguccggcagcaguccuacagcaucaugugcaucaucaaggaggaggugcuggccuacgugguccagcucccgcuguacggcgugaucgacacgcccugcuggaagcugcacaccagcccccucugcaccaccaacacgaaggagggguccaacaucugccugacccgcaccgaccggggcugguacugcgacaacgccggcuccgugagcuucuucccccaggcggagaccugcaagguccaguccaaccgcguguucugcgacacgaugaacagccugacccucccguccgaggucaaccugugcaacguggacaucuucaaccccaaguacgacugcaagaucaugaccagcaagaccgacguguccagcuccgucaucacgagccugggggccaucguguccugcuacggcaagaccaagugcaccgccagcaacaagaaccgggggaucaucaagaccuucuccaacggcugcgacuacgugagcaacaagggcgucgacacgguguccguggggaacacccucuacugcgucaacaagcaggagggccagagccuguacgugaagggggagcccaucaucaacuucuacgacccccugguguucccgagcgacgaguucgacgccuccaucagccaggucaacgagaagaucaaccagucccucgccuucauccgcaagagcgacgagcugcugcacaacgugaacgcgggcaaguccaccaccaacaucaugaucaccacgaucaucaucgugaucaucgucauccuccugagccugaucgccguggggcuccugcuguacugcaaggcccgguccacccccgugacccugagcaaggaccagcucuccggcaucaacaacaucgccuucagcaacugaggacuagugcaucacauuuaaaagcaucucagccuaccaugagaauaagagaaagaaaaugaagaucaauagcuuauucaucucuuuuucuuuuucguugguguaaagccaacacccugucuaaaaaacauaaauuucuuuaaucauuuugccucuuuucucugugcuucaauuaauaaaaaauggaaagaaccuagaucuaaaaaaaaaaaaaaaaaaaaaaaaaaaaaaaaaaaaaaaaaaaaaaaaaaaaaaaaaaaaaaaaugcaucccccccccccccccccccccccccccccccaaaggcucuuuucagagccaccagaauu

SEQ ID NO: 1991 - RNA, 1990 nt, Artificial Sequence
  mRNA product Design i-2 comprising derived and/or modified sequence from HRSV(A2)__F_DSCav1_mut1 (opt2)
ggggcgcugccuacggagguggcagccaucuccuucucggcaucaagcuuaccauggagcuccucauccucaaggccaacgccaucaccaccauccucaccgccgucaccuucugcuucgccuccggccagaacaucaccgaggaguucuaccaguccaccugcuccgccgucuccaagggcuaccucggcgcccuccgcaccggcugguacaccuccgucaucaccaucgagcucuccaacaucaaggagaacaagugcaacggcaccgacgccaaggucaagcucaucaagcaggagcucgacaaguacaagaacgccgucaccgagcuccagcuccucaugcaguccacccccgccaccggcuccggcuccgccaucugcuccggcgucgccgucugcaagguccuccaccucgagggcgaggucaacaagaucaaguccgcccuccucuccaccaacaaggccgucgucucccucuccaacggcgucuccguccucaccuucaagguccucgaccucaagaacuacaucgacaagcagcuccuccccauccucaacaagcaguccugcuccauccccaacaucgagaccgucaucgaguuccagcagaagaacaaccgccuccucgagaucacccgcgaguucuccgucaacgccggcgucaccacccccgucuccaccuacaugcucaccaacuccgagcuccucucccucaucaacgacaugcccaucaccaacgaccagaagaagcucauguccaacaacguccagaucguccgccagcaguccuacuccaucaugugcaucaucaaggaggagguccucgccuacgucguccagcucccccucuacggcgucaucgacacccccugcuggaagcuccacaccuccccccucugcaccaccaacaccaaggagggcuccaacaucugccucacccgcaccgaccgcggcugguacugcgacaacgccggcuccgucuccuucuucccccaggccgagaccugcaagguccaguccaaccgcgucuucugcgacaccaugaacucccucacccuccccuccgaggucaaccucugcaacgucgacaucuucaaccccaaguacgacugcaagaucaugaccuccaagaccgacgucuccuccuccgucaucaccucccucggcgccaucgucuccugcuacggcaagaccaagugcaccgccuccaacaagaaccgcggcaucaucaagaccuucuccaacggcugcgacuacgucuccaacaagggcgucgacaccgucuccgucggcaacacccucuacugcgucaacaagcaggagggccagucccucuacgucaagggcgagcccaucaucaacuucuacgacccccucgucuuccccuccgacgaguucgacgccuccaucucccaggucaacgagaagaucaaccagucccucgccuucauccgcaaguccgacgagcuccuccacaacgucaacgccggcaaguccaccaccaacaucaugaucaccaccaucaucaucgucaucaucgucauccuccucucccucaucgccgucggccuccuccucuacugcaaggcccgcuccacccccgucacccucuccaaggaccagcucuccggcaucaacaacaucgccuucuccaacugaggacuagugcaucacauuuaaaagcaucucagccuaccaugagaauaagagaaagaaaaugaagaucaauagcuuauucaucucuuuuucuuuuucguugguguaaagccaacacccugucuaaaaaacauaaauuucuuuaaucauuuugccucuuuucucugugcuucaauuaauaaaaaauggaaagaaccuagaucuaaaaaaaaaaaaaaaaaaaaaaaaaaaaaaaaaaaaaaaaaaaaaaaaaaaaaaaaaaaaaaaaugcaucccccccccccccccccccccccccccccccaaaggcucuuuucagagccaccagaauu

SEQ ID NO: 1992 - RNA, 1990 nt, Artificial Sequence
  mRNA product Design i-2 comprising derived and/or modified sequence from HRSV(A2)__F_DSCav1_mut1 (opt3)
ggggcgcugccuacggagguggcagccaucuccuucucggcaucaagcuuaccauggagcugcucauccuuaaggccaacgcuauuaccacaauacugacugcagugacguucugcuuugccagcggccagaauaucaccgaagaguucuaccaauccacauguucugcggucucaaaaggguauuugggagcuuuaagaacugguugguacaccaguguuauuacaaucgaacugagcaacauuaaggagaauaaaugcaacggcaccgacgccaaggugaaacuaaucaagcaggaacucgauaaguauaaaaaugcaguaacugagcugcagcuucugaugcaguccacacccgccaccgggucuggaucggcuauauguucaggcguggcagucugcaagguguugcaccucgagggugaaguuaacaaaaucaagagcgcccugcugaguacgaauaaagcuguggucucccucucuaacggggugagcguauuaacuuuuaagguucuggaccuuaagaauuacauugauaaacaauugcugccuauccuaaacaagcaguccuguucaauuccaaauaucgagaccgugauagaguuccagcagaaaaacaauaggcuccuggaaauuacacgggaguuuagugucaacgccggagugacuaccccggugagcacauauaugcuuaccaauucugaacuguugucccucaucaacgacaugcccauuacgaacgaucaaaagaaacugaugucaaauaacguccagaucguucgccagcagagcuacaguaucaugugcauuauaaaggaggaaguguuagcguauguagugcaacugccucucuacggcgucaucgacacuccauguuggaaacuucauacaucuccccugugcaccacuaauacaaaggagggcuccaacauuuguuugacccgaacggaucgugggugguacugcgacaaugcaggaagcgugucguucuuuccucaggccgaaaccuguaagguucagucuaacagaguguucugcgauacaaugaacucccuaacucugccaucagaggucaaucucugcaauguggacaucuuuaaccccaaauaugauuguaagauaaugaccaguaaaacagacguaagcuccucuguuauuacuagccugggugcuaucgugucaugcuacggcaagaccaaauguacagccaguaauaagaacagggggaucauuaagaccuucuccaauggaugcgauuaugucagcaacaaaggcguggacacugucucuguggguaauacgcuuuacuguguuaacaagcaagaggggcagucacuguaugugaaaggagaaccuaucauuaacuuuuacgacccauugguauucccgagugaugaguuugacgcaagcauaucccaggucaaugaaaagaucaaccagucucucgcuuucauucggaaaucggaugagcuguuacacaaugugaacgccggcaagagcacaaccaauaucaugaucacuaccauuauaaucguuauuaucgugauucugcuaucccucaucgcggucggccugcuuuuguauugcaaggcccgcucaacacccgugacccugaguaaagaccaacucucugggauaaacaauaucgcauucagcaacugaggacuagugcaucacauuuaaaagcaucucagccuaccaugagaauaagagaaagaaaaugaagaucaauagcuuauucaucucuuuuucuuuuucguugguguaaagccaacacccugucuaaaaaacauaaauuucuuuaaucauuuugccucuuuucucugugcuucaauuaauaaaaaauggaaagaaccuagaucuaaaaaaaaaaaaaaaaaaaaaaaaaaaaaaaaaaaaaaaaaaaaaaaaaaaaaaaaaaaaaaaaugcaucccccccccccccccccccccccccccccccaaaggcucuuuucagagccaccagaauu

SEQ ID NO: 1993 - RNA, 1990 nt, Artificial Sequence
  mRNA product Design i-2 comprising derived and/or modified sequence from HRSV(A2)__F_DSCav1_mut1 (opt4)
ggggcgcugccuacggagguggcagccaucuccuucucggcaucaagcuuaccauggagcugcugauccugaaggccaacgccaucaccaccauccugaccgccgugaccuucugcuucgccagcggccagaacaucaccgaggaguucuaccagagcaccugcagcgccgugagcaagggcuaccugggcgcccugagaaccggcugguacaccagcgugaucaccaucgagcugagcaacaucaaggagaacaagugcaacggcaccgacgccaaggugaagcugaucaagcaggagcuggacaaguacaagaacgccgugaccgagcugcagcugcugaugcagagcacccccgccaccggcagcggcagcgccaucugcagcggcguggccgugugcaaggugcugcaccuggagggcgaggugaacaagaucaagagcgcccugcugagcaccaacaaggccguggugagccugagcaacggcgugagcgugcugaccuucaaggugcuggaccugaagaacuacaucgacaagcagcugcugcccauccugaacaagcagagcugcagcauccccaacaucgagaccgugaucgaguuccagcagaagaacaacagacugcuggagaucaccagagaguucagcgugaacgccggcgugaccacccccgugagcaccuacaugcugaccaacagcgagcugcugagccugaucaacgacaugcccaucaccaacgaccagaagaagcugaugagcaacaacgugcagaucgugagacagcagagcuacagcaucaugugcaucaucaaggaggaggugcuggccuacguggugcagcugccccuguacggcgugaucgacacccccugcuggaagcugcacaccagcccccugugcaccaccaacaccaaggagggcagcaacaucugccugaccagaaccgacagaggcugguacugcgacaacgccggcagcgugagcuucuucccccaggccgagaccugcaaggugcagagcaacagaguguucugcgacaccaugaacagccugacccugcccagcgaggugaaccugugcaacguggacaucuucaaccccaaguacgacugcaagaucaugaccagcaagaccgacgugagcagcagcgugaucaccagccugggcgccaucgugagcugcuacggcaagaccaagugcaccgccagcaacaagaacagaggcaucaucaagaccuucagcaacggcugcgacuacgugagcaacaagggcguggacaccgugagcgugggcaacacccuguacugcgugaacaagcaggagggccagagccuguacgugaagggcgagcccaucaucaacuucuacgacccccugguguuccccagcgacgaguucgacgccagcaucagccaggugaacgagaagaucaaccagagccuggccuucaucagaaagagcgacgagcugcugcacaacgugaacgccggcaagagcaccaccaacaucaugaucaccaccaucaucaucgugaucaucgugauccugcugagccugaucgccgugggccugcugcuguacugcaaggccagaagcacccccgugacccugagcaaggaccagcugagcggcaucaacaacaucgccuucagcaacugaggacuagugcaucacauuuaaaagcaucucagccuaccaugagaauaagagaaagaaaaugaagaucaauagcuuauucaucucuuuuucuuuuucguugguguaaagccaacacccugucuaaaaaacauaaauuucuuuaaucauuuugccucuuuucucugugcuucaauuaauaaaaaauggaaagaaccuagaucuaaaaaaaaaaaaaaaaaaaaaaaaaaaaaaaaaaaaaaaaaaaaaaaaaaaaaaaaaaaaaaaaugcaucccccccccccccccccccccccccccccccaaaggcucuuuucagagccaccagaauu

SEQ ID NO: 1994 - RNA, 1990 nt, Artificial Sequence
  mRNA product Design i-2 comprising derived and/or modified sequence from HRSV(A2)__F_DSCav1_mut1 (opt5)
ggggcgcugccuacggagguggcagccaucuccuucucggcaucaagcuuaccauggagcugcucauccugaaggccaacgcuauuaccacaauccuuacggccgugaccuucugcuuugcgagcggccagaauauuacagaagaguucuaccaauccaccuguucugcugucagcaaaggguaucugggagcccucagaacaggcugguacaccuccguuaucacaauugaacugucuaacaucaaggagaauaaaugcaacgggaccgacgccaaggugaaacuuaucaagcaggaacuggauaaguauaaaaaugcugugacggagcuccagcugcugaugcagagcacccccgccacaggauccggcucugcuauuuguagcggggucgccgugugcaagguucuccaccuggagggagaagugaacaaaaucaaguccgcgcuucugagcaccaauaaagccgucgugucucucuccaacggcguuagcgugcugacauuuaagguccuugaccugaagaauuacauugauaaacaacuccugccuauccugaacaagcagucuuguuccauuccgaauaucgagaccgugauugaguuccagcagaaaaacaaucggcuccuggaaaucacgcgcgaguuuagcgugaacgcuggcgucacaacccccguuucuacauauaugcuuaccaauuccgaacugcucagccugaucaacgacaugccuauuaccaacgaucaaaagaaacuuauguccaauaacgugcagaucgugagacagcagucuuacagcauuaugugcaucauuaaggaggaaguccuggccuaugugguucaacucccccuguacggggugaucgacacaccuuguuggaaacugcauacgagcccccucugcaccacaaauaccaaggagggauccaacaucugucugacacggaccgaucgcggcugguacugcgacaaugcugggucugucuccuucuuuccucaggccgaaacguguaaggugcagagcaacagaguuuucugcgauacaaugaacucucuuacccugccgagcgaggugaaucucugcaaugucgacauuuuuaaccccaaauaugauuguaagaucaugaccuccaaaacagacgugucuagcuccgucauuaccagccugggagcgaucgugucuugcuacggcaagacaaaauguacggccuccaauaagaaccgggggauuaucaagaccuucagcaauggaugcgauuauguuucuaacaaaggcguggacacagucuccgugggcaauacccuuuacuguguuaacaagcaagaggggcagagccuguaugugaaaggagaaccuaucauuaacuuuuacgacccccucgucuucccuuccgaugaguuugacgcuucuaucagccaggugaaugaaaagauuaaccagucccuggccuucauccgcaaaucugaugagcugcuccacaaugugaacgcuggcaagagcacaaccaauauuaugaucacgaccauuaucaucguuauuaucgucauucugcuuucccugaucgccguggggcuccugcuguauugcaaggccagaagcacacccgugacccuuucuaaagaccaacucuccggaauuaacaauaucgcuuucagcaacugaggacuagugcaucacauuuaaaagcaucucagccuaccaugagaauaagagaaagaaaaugaagaucaauagcuuauucaucucuuuuucuuuuucguugguguaaagccaacacccugucuaaaaaacauaaauuucuuuaaucauuuugccucuuuucucugugcuucaauuaauaaaaaauggaaagaaccuagaucuaaaaaaaaaaaaaaaaaaaaaaaaaaaaaaaaaaaaaaaaaaaaaaaaaaaaaaaaaaaaaaaaugcaucccccccccccccccccccccccccccccccaaaggcucuuuucagagccaccagaauu

SEQ ID NO: 1995 - RNA, 1990 nt, Artificial Sequence
  mRNA product Design i-2 comprising derived and/or modified sequence from HRSV(A2)__F_DSCav1_mut1 (opt6)
ggggcgcugccuacggagguggcagccaucuccuucucggcaucaagcuuaccauggaacuauuaauacuaaaagcaaacgcuauaacaacaauacuaacagcagucacauucugcuuugcaucaggccaaaacaucacagaagaauuuuaccaaucaacaugcuccgccguaucgaaaggauaccuaggcgcauuaagaaccggaugguauacaucagucauaacaauugaacuaucuaacauaaaagaaaacaaauguaacggcacagaugccaaaguaaaacucaucaaacaagaauuagauaaauacaaaaacgcagucacugaacuacaacucuuaaugcaaucaacaccugcaacaggaucaggaucagcaauaugcucaggaguagccguauguaaaguacuacaccuagaaggagaagucaacaaaauaaaaucagcccuccuaaguacaaacaaagcugucguaucacuauccaaugguguuucaguacuaacuuucaaaguucuagaccuaaaaaacuacauagacaaacaacuacuaccaauacuaaauaaacaaaguuguucuauacccaacauagaaaccgucauagaauuucaacaaaaaaauaauagacuccuagaaauaacaagagaauuuucaguuaacgcagguguaacaaccccaguauccaccuauaugcuaacaaauucagaauuacuuucccuaaucaacgacaugcccauaacaaaugaccaaaaaaaauuaaugucaaacaacguccaaauaguucgucaacaaucauauucaauaaugugcauaauaaaagaagaagucuuagccuacguaguacaacuuccccuuuauggaguuaucgacacacccugcuggaaacuccacacuucaccacuauguacuacaaacacaaaagaaggauccaacaucugccucacaagaaccgaucgaggaugguacugugauaacgccggauccgucucauucuucccacaagcagaaacaugcaaaguacaaucaaacagaguauuuugcgacacaaugaacucccucacauuaccuucugaaguaaaccuauguaauguagacauauucaaccccaaauacgauugcaaaauaaugacaucaaagacagauguaucaucaagugucaucacaucccuaggagcaauugucucauguuaugguaaaacaaaaugcaccgcaucaaauaaaaacagaggcauaauaaaaaccuucucaaacgguugugacuacguauccaauaaaggcgucgacacaguaucaguagguaacacauuauauuguguaaacaaacaagaaggacagucccuauauguaaaaggagaaccaauaaucaacuucuacgacccacuuguuuucccuucugaugaauuugacgcaaguauaucacaaguaaaugaaaaaaucaaucaaucacuagccuuuauaagaaaaucagaugaauuauuacacaacguaaacgccggaaaaucaacaaccaacauaaugauaaccacaauaauaaucgucauaauagucauccuacuaucacucauagcaguuggacuccuacuauacugcaaagcacgaucaacaccaguaacauuauccaaagaccaacuaagugguaucaauaacaucgccuuuucaaacugaggacuagugcaucacauuuaaaagcaucucagccuaccaugagaauaagagaaagaaaaugaagaucaauagcuuauucaucucuuuuucuuuuucguugguguaaagccaacacccugucuaaaaaacauaaauuucuuuaaucauuuugccucuuuucucugugcuucaauuaauaaaaaauggaaagaaccuagaucuaaaaaaaaaaaaaaaaaaaaaaaaaaaaaaaaaaaaaaaaaaaaaaaaaaaaaaaaaaaaaaaaugcaucccccccccccccccccccccccccccccccaaaggcucuuuucagagccaccagaauu

SEQ ID NO: 1996 - RNA, 1990 nt, Artificial Sequence
  mRNA product Design i-2 comprising derived and/or modified sequence from HRSV(A2)__F_DSCav1_mut1 (opt11)
ggggcgcugccuacggagguggcagccaucuccuucucggcaucaagcuuaccauggaacuccuaauccucaaagccaacgcaaucaccacaauccucacugccgucaccuucugcuucgccuccggccaaaacauaacagaagaauuuuaccaaucaaccuguucagcggucuccaaaggcuaccucggcgcccuccgcaccggcugguacaccuccgugaucaccauagaacucuccaacaucaaggaaaacaaaugcaacggcaccgacgcgaaggucaaacuuauuaaacaagaacucgacaaauacaaaaacgcagucaccgaacuacaacuccuaaugcaguccacgccagccaccggcucuggcucagccauaugcuccgguguggccguaugcaaaguccuacaccucgaaggagaagucaacaaaauaaaauccgcccuacuguccacaaacaaggccguagucucccucucaaacggcgucucaguacucaccuucaaaguccuagaccucaagaacuacaucgacaaacaacuccuacccauacuaaacaaacaauccugcucaauccccaacaucgaaaccguaauagaauuucaacaaaaaaacaacagacuccuggagaucacccgggaauuuuccguaaacgccggagucacaacacccgucucaaccuacaugcuaacgaacucagagcuccucucacuuaucaacgacaugcccauaacaaacgaccaaaaaaaacucauguccaacaacgugcaaaucguccgacaacaauccuacuccaucaugugcaucauuaaagaagaaguccucgcauacguaguccagcucccccucuacggcgucauagacacccccugcuggaaacuacacacaucaccccucugcacaacaaacaccaaagaaggcuccaacaucugccucacccgcaccgaccgaggcugguacugcgauaacgccggcagcgucuccuucuucccccaagcagaaaccugcaagguccaauccaaccgaguuuucugcgacacuaugaacucgcucacccuccccuccgaagucaaccucugcaacgucgacauuuucaaccccaaauacgacugcaaaaucaugaccuccaagaccgacguauccuccuccgucaucaccucccuaggcgccauaguaaguugcuacggcaaaaccaagugcacagcaagcaacaaaaaccgaggaauaaucaaaaccuucuccaacggcugcgacuacguauccaacaagggcgucgacaccguauccguagggaacacccuuuacugcguaaacaaacaagaaggacaaucacucuacguaaaaggcgaacccauaaucaacuucuacgacccccucguauuucccuccgacgaauuugacgcaucaaucucacaggucaacgaaaaaauaaaccaaucgcuagcauucaucagaaaaucagacgaacuccuacacaacgucaacgcaggcaagagcaccaccaacaucaugaucaccaccaucaucaucgucauaaucgucauacuacucucacucauagcagucggccuccuccuauacuguaaagcaaggucgaccccagucacccuauccaaagaccaacuaagcggcaucaacaacaucgcguucucaaacuaaggacuagugcaucacauuuaaaagcaucucagccuaccaugagaauaagagaaagaaaaugaagaucaauagcuuauucaucucuuuuucuuuuucguugguguaaagccaacacccugucuaaaaaacauaaauuucuuuaaucauuuugccucuuuucucugugcuucaauuaauaaaaaauggaaagaaccuagaucuaaaaaaaaaaaaaaaaaaaaaaaaaaaaaaaaaaaaaaaaaaaaaaaaaaaaaaaaaaaaaaaaugcaucccccccccccccccccccccccccccccccaaaggcucuuuucagagccaccagaauu

SEQ ID NO: 1997 - RNA, 1825 nt, Artificial Sequence
  mRNA product Design i-3 comprising derived and/or modified sequence from HRSV(A2)__F_DSCav1_mut1 (opt1) R6771
gggagaaagcuuaccauggagcugcucauccugaaggccaacgccaucaccaccauccugacggcggugaccuucugcuucgccagcggccagaacaucaccgaggaguucuaccaguccacgugcagcgccgucuccaagggguaccucggcgcccugcggaccggcugguacaccuccgugaucaccaucgagcugagcaacaucaaggagaacaagugcaacgggaccgacgccaaggugaagcucaucaagcaggagcuggacaaguacaagaacgcggucacggagcugcagcuccugaugcaguccaccccggcaaccggcuccggcuccgccaucugcagcggcgucgccgugugcaaggugcugcaccucgagggggaggucaacaagaucaagagcgcccugcuguccaccaacaaggccguggugagccucuccaacggcgucagcgugcugaccuucaaggugcuggaccucaagaacuacaucgacaagcagcugcugcccauccugaacaagcagagcugcuccauccccaacaucgagacggugaucgaguuccagcagaagaacaaccggcuccuggagaucacccgcgaguucagcgugaacgccggggucaccacccccguguccacguacaugcugaccaacagcgagcuccugucccugaucaacgacaugccgaucaccaacgaccagaagaagcucaugagcaacaacgugcagaucguccggcagcaguccuacagcaucaugugcaucaucaaggaggaggugcuggcguacgugguccagcugccccucuacggcgugaucgacacccccugcuggaagcugcacacgagcccccugugcaccaccaacaccaaggagggguccaacaucugccucacgcgcaccgaccggggcugguacugcgacaacgccggcagcgucuccuucuucccgcaggccgagaccugcaaggugcagagcaaccgcguguucugcgacaccaugaacucccugacgcugcccagcgagguaaaccucugcaacgucgacaucuucaaccccaaguacgacugcaagaucaugaccuccaagaccgacgugagcuccagcgugaucaccucccugggggccaucgucagcugcuacggcaagacgaagugcaccgccagcaacaagaaccgggggaucaucaagaccuucuccaacggcugcgacuacgugagcaacaagggcguggacaccguguccgucgggaacacccuguacugcgugaacaagcaggagggccagagccucuacgugaagggggagcccaucaucaacuucuacgacccgcuggucuuccccuccgacgaguucgacgcgagcaucucccaggugaacgagaagaucaaccagagccuggccuucauccgcaaguccgacgagcugcuccacaacgugaacgccggcaagagcacgaccaacaucaugaucaccaccaucaucaucgucaucaucgugauccugcugucccucaucgccguggggcugcugcucuacugcaaggcccggagcacgcccgucacccuguccaaggaccagcugagcggcaucaacaacaucgcguucuccaacugaggacuaguuauaagacugacuagcccgaugggccucccaacgggcccuccuccccuccuugcaccgagauuaauaaaaaaaaaaaaaaaaaaaaaaaaaaaaaaaaaaaaaaaaaaaaaaaaaaaaaaaaaaaaaaaaugcaucccccccccccccccccccccccccccccccaaaggcucuuuucagagccaccagaauu

SEQ ID NO: 1998 - RNA, 1825 nt, Artificial Sequence
  mRNA product Design i-3 comprising derived and/or modified sequence from HRSV(A2)__F_DSCav1_mut1 (opt1)
gggagaaagcuuaccauggagcugcucauccugaaggccaacgccaucaccaccauccugacggcggugaccuucugcuucgccagcggccagaacaucaccgaggaguucuaccaguccacgugcagcgccgucuccaagggguaccucggcgcccugcgcaccgggugguacaccagcgugaucaccaucgagcuguccaacaucaaggagaacaagugcaacggcaccgacgccaaggugaagcucaucaagcaggagcuggacaaguacaagaacgcggucacggagcugcagcuccugaugcagagcacccccgccaccggguccggcagcgccaucugcuccggcguggccgugugcaagguccugcaccucgagggggaggugaacaagaucaagagcgcgcugcuguccaccaacaaggccguggucagccucuccaacggcgugagcgugcugacguucaagguccuggaccucaagaacuacaucgacaagcagcugcugccgauccucaacaagcaguccugcagcauccccaacaucgagaccgugaucgaguuccagcagaagaacaaccggcugcuggagaucacccgcgaguucuccgugaacgccggggucaccacgcccgugagcaccuacaugcucaccaacuccgagcugcugagccucaucaacgacaugcccaucaccaacgaccagaagaagcugaugagcaacaacgugcagaucguccggcagcaguccuacagcaucaugugcaucaucaaggaggaggugcuggccuacgugguccagcucccgcuguacggcgugaucgacacgcccugcuggaagcugcacaccagcccccucugcaccaccaacacgaaggagggguccaacaucugccugacccgcaccgaccggggcugguacugcgacaacgccggcuccgugagcuucuucccccaggcggagaccugcaagguccaguccaaccgcguguucugcgacacgaugaacagccugacccucccguccgaggucaaccugugcaacguggacaucuucaaccccaaguacgacugcaagaucaugaccagcaagaccgacguguccagcuccgucaucacgagccugggggccaucguguccugcuacggcaagaccaagugcaccgccagcaacaagaaccgggggaucaucaagaccuucuccaacggcugcgacuacgugagcaacaagggcgucgacacgguguccguggggaacacccucuacugcgucaacaagcaggagggccagagccuguacgugaagggggagcccaucaucaacuucuacgacccccugguguucccgagcgacgaguucgacgccuccaucagccaggucaacgagaagaucaaccagucccucgccuucauccgcaagagcgacgagcugcugcacaacgugaacgcgggcaaguccaccaccaacaucaugaucaccacgaucaucaucgugaucaucgucauccuccugagccugaucgccguggggcuccugcuguacugcaaggcccgguccacccccgugacccugagcaaggaccagcucuccggcaucaacaacaucgccuucagcaacugaggacuaguuauaagacugacuagcccgaugggccucccaacgggcccuccuccccuccuugcaccgagauuaauaaaaaaaaaaaaaaaaaaaaaaaaaaaaaaaaaaaaaaaaaaaaaaaaaaaaaaaaaaaaaaaaugcaucccccccccccccccccccccccccccccccaaaggcucuuuucagagccaccagaauu

SEQ ID NO: 1999 - RNA, 1825 nt, Artificial Sequence
  mRNA product Design i-3 comprising derived and/or modified sequence from HRSV(A2)__F_DSCav1_mut1 (opt2)
gggagaaagcuuaccauggagcuccucauccucaaggccaacgccaucaccaccauccucaccgccgucaccuucugcuucgccuccggccagaacaucaccgaggaguucuaccaguccaccugcuccgccgucuccaagggcuaccucggcgcccuccgcaccggcugguacaccuccgucaucaccaucgagcucuccaacaucaaggagaacaagugcaacggcaccgacgccaaggucaagcucaucaagcaggagcucgacaaguacaagaacgccgucaccgagcuccagcuccucaugcaguccacccccgccaccggcuccggcuccgccaucugcuccggcgucgccgucugcaagguccuccaccucgagggcgaggucaacaagaucaaguccgcccuccucuccaccaacaaggccgucgucucccucuccaacggcgucuccguccucaccuucaagguccucgaccucaagaacuacaucgacaagcagcuccuccccauccucaacaagcaguccugcuccauccccaacaucgagaccgucaucgaguuccagcagaagaacaaccgccuccucgagaucacccgcgaguucuccgucaacgccggcgucaccacccccgucuccaccuacaugcucaccaacuccgagcuccucucccucaucaacgacaugcccaucaccaacgaccagaagaagcucauguccaacaacguccagaucguccgccagcaguccuacuccaucaugugcaucaucaaggaggagguccucgccuacgucguccagcucccccucuacggcgucaucgacacccccugcuggaagcuccacaccuccccccucugcaccaccaacaccaaggagggcuccaacaucugccucacccgcaccgaccgcggcugguacugcgacaacgccggcuccgucuccuucuucccccaggccgagaccugcaagguccaguccaaccgcgucuucugcgacaccaugaacucccucacccuccccuccgaggucaaccucugcaacgucgacaucuucaaccccaaguacgacugcaagaucaugaccuccaagaccgacgucuccuccuccgucaucaccucccucggcgccaucgucuccugcuacggcaagaccaagugcaccgccuccaacaagaaccgcggcaucaucaagaccuucuccaacggcugcgacuacgucuccaacaagggcgucgacaccgucuccgucggcaacacccucuacugcgucaacaagcaggagggccagucccucuacgucaagggcgagcccaucaucaacuucuacgacccccucgucuuccccuccgacgaguucgacgccuccaucucccaggucaacgagaagaucaaccagucccucgccuucauccgcaaguccgacgagcuccuccacaacgucaacgccggcaaguccaccaccaacaucaugaucaccaccaucaucaucgucaucaucgucauccuccucucccucaucgccgucggccuccuccucuacugcaaggcccgcuccacccccgucacccucuccaaggaccagcucuccggcaucaacaacaucgccuucuccaacugaggacuaguuauaagacugacuagcccgaugggccucccaacgggcccuccuccccuccuugcaccgagauuaauaaaaaaaaaaaaaaaaaaaaaaaaaaaaaaaaaaaaaaaaaaaaaaaaaaaaaaaaaaaaaaaaugcaucccccccccccccccccccccccccccccccaaaggcucuuuucagagccaccagaauu

SEQ ID NO: 2000 - RNA, 1825 nt, Artificial Sequence
  mRNA product Design i-3 comprising derived and/or modified sequence from HRSV(A2)__F_DSCav1_mut1 (opt3)
gggagaaagcuuaccauggagcugcucauccuuaaggccaacgcuauuaccacaauacugacugcagugacguucugcuuugccagcggccagaauaucaccgaagaguucuaccaauccacauguucugcggucucaaaaggguauuugggagcuuuaagaacugguugguacaccaguguuauuacaaucgaacugagcaacauuaaggagaauaaaugcaacggcaccgacgccaaggugaaacuaaucaagcaggaacucgauaaguauaaaaaugcaguaacugagcugcagcuucugaugcaguccacacccgccaccgggucuggaucggcuauauguucaggcguggcagucugcaagguguugcaccucgagggugaaguuaacaaaaucaagagcgcccugcugaguacgaauaaagcuguggucucccucucuaacggggugagcguauuaacuuuuaagguucuggaccuuaagaauuacauugauaaacaauugcugccuauccuaaacaagcaguccuguucaauuccaaauaucgagaccgugauagaguuccagcagaaaaacaauaggcuccuggaaauuacacgggaguuuagugucaacgccggagugacuaccccggugagcacauauaugcuuaccaauucugaacuguugucccucaucaacgacaugcccauuacgaacgaucaaaagaaacugaugucaaauaacguccagaucguucgccagcagagcuacaguaucaugugcauuauaaaggaggaaguguuagcguauguagugcaacugccucucuacggcgucaucgacacuccauguuggaaacuucauacaucuccccugugcaccacuaauacaaaggagggcuccaacauuuguuugacccgaacggaucgugggugguacugcgacaaugcaggaagcgugucguucuuuccucaggccgaaaccuguaagguucagucuaacagaguguucugcgauacaaugaacucccuaacucugccaucagaggucaaucucugcaauguggacaucuuuaaccccaaauaugauuguaagauaaugaccaguaaaacagacguaagcuccucuguuauuacuagccugggugcuaucgugucaugcuacggcaagaccaaauguacagccaguaauaagaacagggggaucauuaagaccuucuccaauggaugcgauuaugucagcaacaaaggcguggacacugucucuguggguaauacgcuuuacuguguuaacaagcaagaggggcagucacuguaugugaaaggagaaccuaucauuaacuuuuacgacccauugguauucccgagugaugaguuugacgcaagcauaucccaggucaaugaaaagaucaaccagucucucgcuuucauucggaaaucggaugagcuguuacacaaugugaacgccggcaagagcacaaccaauaucaugaucacuaccauuauaaucguuauuaucgugauucugcuaucccucaucgcggucggccugcuuuuguauugcaaggcccgcucaacacccgugacccugaguaaagaccaacucucugggauaaacaauaucgcauucagcaacugaggacuaguuauaagacugacuagcccgaugggccucccaacgggcccuccuccccuccuugcaccgagauuaauaaaaaaaaaaaaaaaaaaaaaaaaaaaaaaaaaaaaaaaaaaaaaaaaaaaaaaaaaaaaaaaaugcaucccccccccccccccccccccccccccccccaaaggcucuuuucagagccaccagaauu

SEQ ID NO: 2001 - RNA, 1825 nt, Artificial Sequence
  mRNA product Design i-3 comprising derived and/or modified sequence from HRSV(A2)__F_DSCav1_mut1 (opt4)
gggagaaagcuuaccauggagcugcugauccugaaggccaacgccaucaccaccauccugaccgccgugaccuucugcuucgccagcggccagaacaucaccgaggaguucuaccagagcaccugcagcgccgugagcaagggcuaccugggcgcccugagaaccggcugguacaccagcgugaucaccaucgagcugagcaacaucaaggagaacaagugcaacggcaccgacgccaaggugaagcugaucaagcaggagcuggacaaguacaagaacgccgugaccgagcugcagcugcugaugcagagcacccccgccaccggcagcggcagcgccaucugcagcggcguggccgugugcaaggugcugcaccuggagggcgaggugaacaagaucaagagcgcccugcugagcaccaacaaggccguggugagccugagcaacggcgugagcgugcugaccuucaaggugcuggaccugaagaacuacaucgacaagcagcugcugcccauccugaacaagcagagcugcagcauccccaacaucgagaccgugaucgaguuccagcagaagaacaacagacugcuggagaucaccagagaguucagcgugaacgccggcgugaccacccccgugagcaccuacaugcugaccaacagcgagcugcugagccugaucaacgacaugcccaucaccaacgaccagaagaagcugaugagcaacaacgugcagaucgugagacagcagagcuacagcaucaugugcaucaucaaggaggaggugcuggccuacguggugcagcugccccuguacggcgugaucgacacccccugcuggaagcugcacaccagcccccugugcaccaccaacaccaaggagggcagcaacaucugccugaccagaaccgacagaggcugguacugcgacaacgccggcagcgugagcuucuucccccaggccgagaccugcaaggugcagagcaacagaguguucugcgacaccaugaacagccugacccugcccagcgaggugaaccugugcaacguggacaucuucaaccccaaguacgacugcaagaucaugaccagcaagaccgacgugagcagcagcgugaucaccagccugggcgccaucgugagcugcuacggcaagaccaagugcaccgccagcaacaagaacagaggcaucaucaagaccuucagcaacggcugcgacuacgugagcaacaagggcguggacaccgugagcgugggcaacacccuguacugcgugaacaagcaggagggccagagccuguacgugaagggcgagcccaucaucaacuucuacgacccccugguguuccccagcgacgaguucgacgccagcaucagccaggugaacgagaagaucaaccagagccuggccuucaucagaaagagcgacgagcugcugcacaacgugaacgccggcaagagcaccaccaacaucaugaucaccaccaucaucaucgugaucaucgugauccugcugagccugaucgccgugggccugcugcuguacugcaaggccagaagcacccccgugacccugagcaaggaccagcugagcggcaucaacaacaucgccuucagcaacugaggacuaguuauaagacugacuagcccgaugggccucccaacgggcccuccuccccuccuugcaccgagauuaauaaaaaaaaaaaaaaaaaaaaaaaaaaaaaaaaaaaaaaaaaaaaaaaaaaaaaaaaaaaaaaaaugcaucccccccccccccccccccccccccccccccaaaggcucuuuucagagccaccagaauu

SEQ ID NO: 2002 - RNA, 1825 nt, Artificial Sequence
  mRNA product Design i-3 comprising derived and/or modified sequence from HRSV(A2)__F_DSCav1_mut1 (opt5)
gggagaaagcuuaccauggagcugcucauccugaaggccaacgcuauuaccacaauccuuacggccgugaccuucugcuuugcgagcggccagaauauuacagaagaguucuaccaauccaccuguucugcugucagcaaaggguaucugggagcccucagaacaggcugguacaccuccguuaucacaauugaacugucuaacaucaaggagaauaaaugcaacgggaccgacgccaaggugaaacuuaucaagcaggaacuggauaaguauaaaaaugcugugacggagcuccagcugcugaugcagagcacccccgccacaggauccggcucugcuauuuguagcggggucgccgugugcaagguucuccaccuggagggagaagugaacaaaaucaaguccgcgcuucugagcaccaauaaagccgucgugucucucuccaacggcguuagcgugcugacauuuaagguccuugaccugaagaauuacauugauaaacaacuccugccuauccugaacaagcagucuuguuccauuccgaauaucgagaccgugauugaguuccagcagaaaaacaaucggcuccuggaaaucacgcgcgaguuuagcgugaacgcuggcgucacaacccccguuucuacauauaugcuuaccaauuccgaacugcucagccugaucaacgacaugccuauuaccaacgaucaaaagaaacuuauguccaauaacgugcagaucgugagacagcagucuuacagcauuaugugcaucauuaaggaggaaguccuggccuaugugguucaacucccccuguacggggugaucgacacaccuuguuggaaacugcauacgagcccccucugcaccacaaauaccaaggagggauccaacaucugucugacacggaccgaucgcggcugguacugcgacaaugcugggucugucuccuucuuuccucaggccgaaacguguaaggugcagagcaacagaguuuucugcgauacaaugaacucucuuacccugccgagcgaggugaaucucugcaaugucgacauuuuuaaccccaaauaugauuguaagaucaugaccuccaaaacagacgugucuagcuccgucauuaccagccugggagcgaucgugucuugcuacggcaagacaaaauguacggccuccaauaagaaccgggggauuaucaagaccuucagcaauggaugcgauuauguuucuaacaaaggcguggacacagucuccgugggcaauacccuuuacuguguuaacaagcaagaggggcagagccuguaugugaaaggagaaccuaucauuaacuuuuacgacccccucgucuucccuuccgaugaguuugacgcuucuaucagccaggugaaugaaaagauuaaccagucccuggccuucauccgcaaaucugaugagcugcuccacaaugugaacgcuggcaagagcacaaccaauauuaugaucacgaccauuaucaucguuauuaucgucauucugcuuucccugaucgccguggggcuccugcuguauugcaaggccagaagcacacccgugacccuuucuaaagaccaacucuccggaauuaacaauaucgcuuucagcaacugaggacuaguuauaagacugacuagcccgaugggccucccaacgggcccuccuccccuccuugcaccgagauuaauaaaaaaaaaaaaaaaaaaaaaaaaaaaaaaaaaaaaaaaaaaaaaaaaaaaaaaaaaaaaaaaaugcaucccccccccccccccccccccccccccccccaaaggcucuuuucagagccaccagaauu

SEQ ID NO: 2003 - RNA, 1825 nt, Artificial Sequence
  mRNA product Design i-3 comprising derived and/or modified sequence from HRSV(A2)__F_DSCav1_mut1 (opt6)
gggagaaagcuuaccauggaacuauuaauacuaaaagcaaacgcuauaacaacaauacuaacagcagucacauucugcuuugcaucaggccaaaacaucacagaagaauuuuaccaaucaacaugcuccgccguaucgaaaggauaccuaggcgcauuaagaaccggaugguauacaucagucauaacaauugaacuaucuaacauaaaagaaaacaaauguaacggcacagaugccaaaguaaaacucaucaaacaagaauuagauaaauacaaaaacgcagucacugaacuacaacucuuaaugcaaucaacaccugcaacaggaucaggaucagcaauaugcucaggaguagccguauguaaaguacuacaccuagaaggagaagucaacaaaauaaaaucagcccuccuaaguacaaacaaagcugucguaucacuauccaaugguguuucaguacuaacuuucaaaguucuagaccuaaaaaacuacauagacaaacaacuacuaccaauacuaaauaaacaaaguuguucuauacccaacauagaaaccgucauagaauuucaacaaaaaaauaauagacuccuagaaauaacaagagaauuuucaguuaacgcagguguaacaaccccaguauccaccuauaugcuaacaaauucagaauuacuuucccuaaucaacgacaugcccauaacaaaugaccaaaaaaaauuaaugucaaacaacguccaaauaguucgucaacaaucauauucaauaaugugcauaauaaaagaagaagucuuagccuacguaguacaacuuccccuuuauggaguuaucgacacacccugcuggaaacuccacacuucaccacuauguacuacaaacacaaaagaaggauccaacaucugccucacaagaaccgaucgaggaugguacugugauaacgccggauccgucucauucuucccacaagcagaaacaugcaaaguacaaucaaacagaguauuuugcgacacaaugaacucccucacauuaccuucugaaguaaaccuauguaauguagacauauucaaccccaaauacgauugcaaaauaaugacaucaaagacagauguaucaucaagugucaucacaucccuaggagcaauugucucauguuaugguaaaacaaaaugcaccgcaucaaauaaaaacagaggcauaauaaaaaccuucucaaacgguugugacuacguauccaauaaaggcgucgacacaguaucaguagguaacacauuauauuguguaaacaaacaagaaggacagucccuauauguaaaaggagaaccaauaaucaacuucuacgacccacuuguuuucccuucugaugaauuugacgcaaguauaucacaaguaaaugaaaaaaucaaucaaucacuagccuuuauaagaaaaucagaugaauuauuacacaacguaaacgccggaaaaucaacaaccaacauaaugauaaccacaauaauaaucgucauaauagucauccuacuaucacucauagcaguuggacuccuacuauacugcaaagcacgaucaacaccaguaacauuauccaaagaccaacuaagugguaucaauaacaucgccuuuucaaacugaggacuaguuauaagacugacuagcccgaugggccucccaacgggcccuccuccccuccuugcaccgagauuaauaaaaaaaaaaaaaaaaaaaaaaaaaaaaaaaaaaaaaaaaaaaaaaaaaaaaaaaaaaaaaaaaugcaucccccccccccccccccccccccccccccccaaaggcucuuuucagagccaccagaauu

SEQ ID NO: 2004 - RNA, 1825 nt, Artificial Sequence
  mRNA product Design i-3 comprising derived and/or modified sequence from HRSV(A2)__F_DSCav1_mut1 (opt11)
gggagaaagcuuaccauggaacuccuaauccucaaagccaacgcaaucaccacaauccucacugccgucaccuucugcuucgccuccggccaaaacauaacagaagaauuuuaccaaucaaccuguucagcggucuccaaaggcuaccucggcgcccuccgcaccggcugguacaccuccgugaucaccauagaacucuccaacaucaaggaaaacaaaugcaacggcaccgacgcgaaggucaaacuuauuaaacaagaacucgacaaauacaaaaacgcagucaccgaacuacaacuccuaaugcaguccacgccagccaccggcucuggcucagccauaugcuccgguguggccguaugcaaaguccuacaccucgaaggagaagucaacaaaauaaaauccgcccuacuguccacaaacaaggccguagucucccucucaaacggcgucucaguacucaccuucaaaguccuagaccucaagaacuacaucgacaaacaacuccuacccauacuaaacaaacaauccugcucaauccccaacaucgaaaccguaauagaauuucaacaaaaaaacaacagacuccuggagaucacccgggaauuuuccguaaacgccggagucacaacacccgucucaaccuacaugcuaacgaacucagagcuccucucacuuaucaacgacaugcccauaacaaacgaccaaaaaaaacucauguccaacaacgugcaaaucguccgacaacaauccuacuccaucaugugcaucauuaaagaagaaguccucgcauacguaguccagcucccccucuacggcgucauagacacccccugcuggaaacuacacacaucaccccucugcacaacaaacaccaaagaaggcuccaacaucugccucacccgcaccgaccgaggcugguacugcgauaacgccggcagcgucuccuucuucccccaagcagaaaccugcaagguccaauccaaccgaguuuucugcgacacuaugaacucgcucacccuccccuccgaagucaaccucugcaacgucgacauuuucaaccccaaauacgacugcaaaaucaugaccuccaagaccgacguauccuccuccgucaucaccucccuaggcgccauaguaaguugcuacggcaaaaccaagugcacagcaagcaacaaaaaccgaggaauaaucaaaaccuucuccaacggcugcgacuacguauccaacaagggcgucgacaccguauccguagggaacacccuuuacugcguaaacaaacaagaaggacaaucacucuacguaaaaggcgaacccauaaucaacuucuacgacccccucguauuucccuccgacgaauuugacgcaucaaucucacaggucaacgaaaaaauaaaccaaucgcuagcauucaucagaaaaucagacgaacuccuacacaacgucaacgcaggcaagagcaccaccaacaucaugaucaccaccaucaucaucgucauaaucgucauacuacucucacucauagcagucggccuccuccuauacuguaaagcaaggucgaccccagucacccuauccaaagaccaacuaagcggcaucaacaacaucgcguucucaaacuaaggacuaguuauaagacugacuagcccgaugggccucccaacgggcccuccuccccuccuugcaccgagauuaauaaaaaaaaaaaaaaaaaaaaaaaaaaaaaaaaaaaaaaaaaaaaaaaaaaaaaaaaaaaaaaaaugcaucccccccccccccccccccccccccccccccaaaggcucuuuucagagccaccagaauu

SEQ ID NO: 2005 - protein, 514 aa, Artificial Sequence
  derived and/or modified protein sequence (artificial) from HRSV(A2)__F-del_DSCav1_mut1
MELLILKANAITTILTAVTFCFASGQNITEEFYQSTCSAVSKGYLGALRTGWYTSVITIELSNIKENKCNGTDAKVKLIKQELDKYKNAVTELQLLMQSTPATGSGSAICSGVAVCKVLHLEGEVNKIKSALLSTNKAVVSLSNGVSVLTFKVLDLKNYIDKQLLPILNKQSCSIPNIETVIEFQQKNNRLLEITREFSVNAGVTTPVSTYMLTNSELLSLINDMPITNDQKKLMSNNVQIVRQQSYSIMCIIKEEVLAYVVQLPLYGVIDTPCWKLHTSPLCTTNTKEGSNICLTRTDRGWYCDNAGSVSFFPQAETCKVQSNRVFCDTMNSLTLPSEVNLCNVDIFNPKYDCKIMTSKTDVSSSVITSLGAIVSCYGKTKCTASNKNRGIIKTFSNGCDYVSNKGVDTVSVGNTLYCVNKQEGQSLYVKGEPIINFYDPLVFPSDEFDASISQVNEKINQSLAFIRKSDELLHNVNAGKSTTNIMITTIIIVIIVILLSLIAVGLLLYCKAR

SEQ ID NO: 2006 - RNA, 1545 nt, Artificial Sequence
  derived and/or modified CDS sequence (opt1) from HRSV(A2)__F-del_DSCav1_mut1
auggagcugcucauccugaaggccaacgccaucaccaccauccugacggcggugaccuucugcuucgccagcggccagaacaucaccgaggaguucuaccaguccacgugcagcgccgucuccaagggguaccucggcgcccugcggaccggcugguacaccuccgugaucaccaucgagcugagcaacaucaaggagaacaagugcaacgggaccgacgccaaggugaagcucaucaagcaggagcuggacaaguacaagaacgcggucacggagcugcagcuccugaugcaguccaccccggcaaccggcuccggcuccgccaucugcagcggcgucgccgugugcaaggugcugcaccucgagggggaggucaacaagaucaagagcgcccugcuguccaccaacaaggccguggugagccucuccaacggcgucagcgugcugaccuucaaggugcuggaccucaagaacuacaucgacaagcagcugcugcccauccugaacaagcagagcugcuccauccccaacaucgagacggugaucgaguuccagcagaagaacaaccggcuccuggagaucacccgcgaguucagcgugaacgccggggucaccacccccguguccacguacaugcugaccaacagcgagcuccugucccugaucaacgacaugccgaucaccaacgaccagaagaagcucaugagcaacaacgugcagaucguccggcagcaguccuacagcaucaugugcaucaucaaggaggaggugcuggcguacgugguccagcugccccucuacggcgugaucgacacccccugcuggaagcugcacacgagcccccugugcaccaccaacaccaaggagggguccaacaucugccucacgcgcaccgaccggggcugguacugcgacaacgccggcagcgucuccuucuucccgcaggccgagaccugcaaggugcagagcaaccgcguguucugcgacaccaugaacucccugacgcugcccagcgagguaaaccucugcaacgucgacaucuucaaccccaaguacgacugcaagaucaugaccuccaagaccgacgugagcuccagcgugaucaccucccugggggccaucgucagcugcuacggcaagacgaagugcaccgccagcaacaagaaccgggggaucaucaagaccuucuccaacggcugcgacuacgugagcaacaagggcguggacaccguguccgucgggaacacccuguacugcgugaacaagcaggagggccagagccucuacgugaagggggagcccaucaucaacuucuacgacccgcuggucuuccccuccgacgaguucgacgcgagcaucucccaggugaacgagaagaucaaccagagccuggccuucauccgcaaguccgacgagcugcuccacaacgugaacgccggcaagagcacgaccaacaucaugaucaccaccaucaucaucgucaucaucgugauccugcugucccucaucgccguggggcugcugcucuacugcaaggcccgguga

SEQ ID NO: 2007 - RNA, 1545 nt, Artificial Sequence
  derived and/or modified CDS sequence (opt1) from HRSV(A2)__F-del_DSCav1_mut1
auggagcugcucauccugaaggccaacgccaucaccaccauccugacggcggugaccuucugcuucgccagcggccagaacaucaccgaggaguucuaccaguccacgugcagcgccgucuccaagggguaccucggcgcccugcgcaccgggugguacaccagcgugaucaccaucgagcuguccaacaucaaggagaacaagugcaacggcaccgacgccaaggugaagcucaucaagcaggagcuggacaaguacaagaacgcggucacggagcugcagcuccugaugcagagcacccccgccaccggguccggcagcgccaucugcuccggcguggccgugugcaagguccugcaccucgagggggaggugaacaagaucaagagcgcgcugcuguccaccaacaaggccguggucagccucuccaacggcgugagcgugcugacguucaagguccuggaccucaagaacuacaucgacaagcagcugcugccgauccucaacaagcaguccugcagcauccccaacaucgagaccgugaucgaguuccagcagaagaacaaccggcugcuggagaucacccgcgaguucuccgugaacgccggggucaccacgcccgugagcaccuacaugcucaccaacuccgagcugcugagccucaucaacgacaugcccaucaccaacgaccagaagaagcugaugagcaacaacgugcagaucguccggcagcaguccuacagcaucaugugcaucaucaaggaggaggugcuggccuacgugguccagcucccgcuguacggcgugaucgacacgcccugcuggaagcugcacaccagcccccucugcaccaccaacacgaaggagggguccaacaucugccugacccgcaccgaccggggcugguacugcgacaacgccggcuccgugagcuucuucccccaggcggagaccugcaagguccaguccaaccgcguguucugcgacacgaugaacagccugacccucccguccgaggucaaccugugcaacguggacaucuucaaccccaaguacgacugcaagaucaugaccagcaagaccgacguguccagcuccgucaucacgagccugggggccaucguguccugcuacggcaagaccaagugcaccgccagcaacaagaaccgggggaucaucaagaccuucuccaacggcugcgacuacgugagcaacaagggcgucgacacgguguccguggggaacacccucuacugcgucaacaagcaggagggccagagccuguacgugaagggggagcccaucaucaacuucuacgacccccugguguucccgagcgacgaguucgacgccuccaucagccaggucaacgagaagaucaaccagucccucgccuucauccgcaagagcgacgagcugcugcacaacgugaacgcgggcaaguccaccaccaacaucaugaucaccacgaucaucaucgugaucaucgucauccuccugagccugaucgccguggggcuccugcuguacugcaaggcccgguga

SEQ ID NO: 2008 - RNA, 1545 nt, Artificial Sequence
  derived and/or modified CDS sequence (opt2) from HRSV(A2)__F-del_DSCav1_mut1
auggagcuccucauccucaaggccaacgccaucaccaccauccucaccgccgucaccuucugcuucgccuccggccagaacaucaccgaggaguucuaccaguccaccugcuccgccgucuccaagggcuaccucggcgcccuccgcaccggcugguacaccuccgucaucaccaucgagcucuccaacaucaaggagaacaagugcaacggcaccgacgccaaggucaagcucaucaagcaggagcucgacaaguacaagaacgccgucaccgagcuccagcuccucaugcaguccacccccgccaccggcuccggcuccgccaucugcuccggcgucgccgucugcaagguccuccaccucgagggcgaggucaacaagaucaaguccgcccuccucuccaccaacaaggccgucgucucccucuccaacggcgucuccguccucaccuucaagguccucgaccucaagaacuacaucgacaagcagcuccuccccauccucaacaagcaguccugcuccauccccaacaucgagaccgucaucgaguuccagcagaagaacaaccgccuccucgagaucacccgcgaguucuccgucaacgccggcgucaccacccccgucuccaccuacaugcucaccaacuccgagcuccucucccucaucaacgacaugcccaucaccaacgaccagaagaagcucauguccaacaacguccagaucguccgccagcaguccuacuccaucaugugcaucaucaaggaggagguccucgccuacgucguccagcucccccucuacggcgucaucgacacccccugcuggaagcuccacaccuccccccucugcaccaccaacaccaaggagggcuccaacaucugccucacccgcaccgaccgcggcugguacugcgacaacgccggcuccgucuccuucuucccccaggccgagaccugcaagguccaguccaaccgcgucuucugcgacaccaugaacucccucacccuccccuccgaggucaaccucugcaacgucgacaucuucaaccccaaguacgacugcaagaucaugaccuccaagaccgacgucuccuccuccgucaucaccucccucggcgccaucgucuccugcuacggcaagaccaagugcaccgccuccaacaagaaccgcggcaucaucaagaccuucuccaacggcugcgacuacgucuccaacaagggcgucgacaccgucuccgucggcaacacccucuacugcgucaacaagcaggagggccagucccucuacgucaagggcgagcccaucaucaacuucuacgacccccucgucuuccccuccgacgaguucgacgccuccaucucccaggucaacgagaagaucaaccagucccucgccuucauccgcaaguccgacgagcuccuccacaacgucaacgccggcaaguccaccaccaacaucaugaucaccaccaucaucaucgucaucaucgucauccuccucucccucaucgccgucggccuccuccucuacugcaaggcccgcuga

SEQ ID NO: 2009 - RNA, 1545 nt, Artificial Sequence
  derived and/or modified CDS sequence (opt3) from HRSV(A2)__F-del_DSCav1_mut1
auggagcugcucauccuuaaggccaacgcuauuaccacaauacugacugcagugacguucugcuuugccagcggccagaauaucaccgaagaguucuaccaauccacauguucugcggucucaaaaggguauuugggagcuuuaagaacugguugguacaccaguguuauuacaaucgaacugagcaacauuaaggagaauaaaugcaacggcaccgacgccaaggugaaacuaaucaagcaggaacucgauaaguauaaaaaugcaguaacugagcugcagcuucugaugcaguccacacccgccaccgggucuggaucggcuauauguucaggcguggcagucugcaagguguugcaccucgagggugaaguuaacaaaaucaagagcgcccugcugaguacgaauaaagcuguggucucccucucuaacggggugagcguauuaacuuuuaagguucuggaccuuaagaauuacauugauaaacaauugcugccuauccuaaacaagcaguccuguucaauuccaaauaucgagaccgugauagaguuccagcagaaaaacaauaggcuccuggaaauuacacgggaguuuagugucaacgccggagugacuaccccggugagcacauauaugcuuaccaauucugaacuguugucccucaucaacgacaugcccauuacgaacgaucaaaagaaacugaugucaaauaacguccagaucguucgccagcagagcuacaguaucaugugcauuauaaaggaggaaguguuagcguauguagugcaacugccucucuacggcgucaucgacacuccauguuggaaacuucauacaucuccccugugcaccacuaauacaaaggagggcuccaacauuuguuugacccgaacggaucgugggugguacugcgacaaugcaggaagcgugucguucuuuccucaggccgaaaccuguaagguucagucuaacagaguguucugcgauacaaugaacucccuaacucugccaucagaggucaaucucugcaauguggacaucuuuaaccccaaauaugauuguaagauaaugaccaguaaaacagacguaagcuccucuguuauuacuagccugggugcuaucgugucaugcuacggcaagaccaaauguacagccaguaauaagaacagggggaucauuaagaccuucuccaauggaugcgauuaugucagcaacaaaggcguggacacugucucuguggguaauacgcuuuacuguguuaacaagcaagaggggcagucacuguaugugaaaggagaaccuaucauuaacuuuuacgacccauugguauucccgagugaugaguuugacgcaagcauaucccaggucaaugaaaagaucaaccagucucucgcuuucauucggaaaucggaugagcuguuacacaaugugaacgccggcaagagcacaaccaauaucaugaucacuaccauuauaaucguuauuaucgugauucugcuaucccucaucgcggucggccugcuuuuguauugcaaggcccgcuga

SEQ ID NO: 2010 - RNA, 1545 nt, Artificial Sequence
  derived and/or modified CDS sequence (opt4) from HRSV(A2)__F-del_DSCav1_mut1
auggagcugcugauccugaaggccaacgccaucaccaccauccugaccgccgugaccuucugcuucgccagcggccagaacaucaccgaggaguucuaccagagcaccugcagcgccgugagcaagggcuaccugggcgcccugagaaccggcugguacaccagcgugaucaccaucgagcugagcaacaucaaggagaacaagugcaacggcaccgacgccaaggugaagcugaucaagcaggagcuggacaaguacaagaacgccgugaccgagcugcagcugcugaugcagagcacccccgccaccggcagcggcagcgccaucugcagcggcguggccgugugcaaggugcugcaccuggagggcgaggugaacaagaucaagagcgcccugcugagcaccaacaaggccguggugagccugagcaacggcgugagcgugcugaccuucaaggugcuggaccugaagaacuacaucgacaagcagcugcugcccauccugaacaagcagagcugcagcauccccaacaucgagaccgugaucgaguuccagcagaagaacaacagacugcuggagaucaccagagaguucagcgugaacgccggcgugaccacccccgugagcaccuacaugcugaccaacagcgagcugcugagccugaucaacgacaugcccaucaccaacgaccagaagaagcugaugagcaacaacgugcagaucgugagacagcagagcuacagcaucaugugcaucaucaaggaggaggugcuggccuacguggugcagcugccccuguacggcgugaucgacacccccugcuggaagcugcacaccagcccccugugcaccaccaacaccaaggagggcagcaacaucugccugaccagaaccgacagaggcugguacugcgacaacgccggcagcgugagcuucuucccccaggccgagaccugcaaggugcagagcaacagaguguucugcgacaccaugaacagccugacccugcccagcgaggugaaccugugcaacguggacaucuucaaccccaaguacgacugcaagaucaugaccagcaagaccgacgugagcagcagcgugaucaccagccugggcgccaucgugagcugcuacggcaagaccaagugcaccgccagcaacaagaacagaggcaucaucaagaccuucagcaacggcugcgacuacgugagcaacaagggcguggacaccgugagcgugggcaacacccuguacugcgugaacaagcaggagggccagagccuguacgugaagggcgagcccaucaucaacuucuacgacccccugguguuccccagcgacgaguucgacgccagcaucagccaggugaacgagaagaucaaccagagccuggccuucaucagaaagagcgacgagcugcugcacaacgugaacgccggcaagagcaccaccaacaucaugaucaccaccaucaucaucgugaucaucgugauccugcugagccugaucgccgugggccugcugcuguacugcaaggccagauga

SEQ ID NO: 2011 - RNA, 1545 nt, Artificial Sequence
  derived and/or modified CDS sequence (opt5) from HRSV(A2)__F-del_DSCav1_mut1
auggagcugcucauccugaaggccaacgcuauuaccacaauccuuacggccgugaccuucugcuuugcgagcggccagaauauuacagaagaguucuaccaauccaccuguucugcugucagcaaaggguaucugggagcccucagaacaggcugguacaccuccguuaucacaauugaacugucuaacaucaaggagaauaaaugcaacgggaccgacgccaaggugaaacuuaucaagcaggaacuggauaaguauaaaaaugcugugacggagcuccagcugcugaugcagagcacccccgccacaggauccggcucugcuauuuguagcggggucgccgugugcaagguucuccaccuggagggagaagugaacaaaaucaaguccgcgcuucugagcaccaauaaagccgucgugucucucuccaacggcguuagcgugcugacauuuaagguccuugaccugaagaauuacauugauaaacaacuccugccuauccugaacaagcagucuuguuccauuccgaauaucgagaccgugauugaguuccagcagaaaaacaaucggcuccuggaaaucacgcgcgaguuuagcgugaacgcuggcgucacaacccccguuucuacauauaugcuuaccaauuccgaacugcucagccugaucaacgacaugccuauuaccaacgaucaaaagaaacuuauguccaauaacgugcagaucgugagacagcagucuuacagcauuaugugcaucauuaaggaggaaguccuggccuaugugguucaacucccccuguacggggugaucgacacaccuuguuggaaacugcauacgagcccccucugcaccacaaauaccaaggagggauccaacaucugucugacacggaccgaucgcggcugguacugcgacaaugcugggucugucuccuucuuuccucaggccgaaacguguaaggugcagagcaacagaguuuucugcgauacaaugaacucucuuacccugccgagcgaggugaaucucugcaaugucgacauuuuuaaccccaaauaugauuguaagaucaugaccuccaaaacagacgugucuagcuccgucauuaccagccugggagcgaucgugucuugcuacggcaagacaaaauguacggccuccaauaagaaccgggggauuaucaagaccuucagcaauggaugcgauuauguuucuaacaaaggcguggacacagucuccgugggcaauacccuuuacuguguuaacaagcaagaggggcagagccuguaugugaaaggagaaccuaucauuaacuuuuacgacccccucgucuucccuuccgaugaguuugacgcuucuaucagccaggugaaugaaaagauuaaccagucccuggccuucauccgcaaaucugaugagcugcuccacaaugugaacgcuggcaagagcacaaccaauauuaugaucacgaccauuaucaucguuauuaucgucauucugcuuucccugaucgccguggggcuccugcuguauugcaaggccagauga

SEQ ID NO: 2012 - RNA, 1545 nt, Artificial Sequence
  derived and/or modified CDS sequence (opt6) from HRSV(A2)__F-del_DSCav1_mut1
auggaacuacucaucuuaaaagcaaacgcaauaacaacuauucuaaccgcaguaacauuuuguuucgcaucaggacaaaacauaaccgaagaauuuuaccaaucaacauguuccgcaguuucaaaaggauacuuaggcgcacuaagaacaggcugguacaccuccgugauaacaauagaauuaucaaacauaaaagaaaacaaauguaauggaacugacgccaaaguaaaacuaauaaaacaagaacuagacaaauauaaaaacgcaguaacugaacuacaauuacuaaugcaauccaccccagcaacaggcucaggcucagcaauuugcuccggagucgcugucugcaaaguacuacaucuugaaggcgaagucaauaaaauaaaaucagcacuucuaucaacaaacaaagcaguagucucacuaucaaacggaguaucaguacuaacauuuaaaguauuagaucuaaaaaacuauauagauaaacaacuacuacccauacucaauaaacaauccuguucaauaccaaauauagaaaccguaauagaauuucaacaaaaaaacaaucgacuauuagaaaucacccgagaauuuucagucaaugcaggcguaacaacaccaguaucaaccuacauguuaaccaacuccgaacuacuaucccucauaaacgacaugccaauaacaaacgaucaaaaaaaacuaauguccaacaacguacaaauagucagacaacaaucuuauucaauaaugugcaucauaaaagaagaaguucuagccuacguaguucaacuuccauuauacggcguaauugauacaccaugcuggaaacuacacacauccccacuauguacaacaaacacaaaagaaggaucaaacaucugcuuaacuagaacagacagaggaugguacugcgacaacgcaggaucagucucauucuuuccacaagcagaaacaugcaagguccaaucaaacagaguauucugcgacacaaugaacuccuuaacacuaccaucugaaguaaaccuauguaauguagacauauuuaacccaaaauacgacugcaaaauaaugaccucaaaaacagacguauccucaucaguaauuacaagccucggagccauaguaucaugcuacggaaaaacaaaauguacagcaucaaacaaaaacagaggaauaauaaaaacguucuccaacggaugcgacuauguaucaaacaaaggcguagacacaguaucagucggaaauacccuuuacugcguaaacaaacaagaaggccaaagucuauacguaaaaggagagccaauaauaaacuuuuaugacccccuuguauucccaucugacgaauuugaugcaucaauaucccaagucaacgaaaaaaucaaccaaucauuagccuuuauuagaaaaagugacgaacuauuacacaacguuaaugcagggaaaucaacaacaaauauaaugauuacaaccauaauuauaguuaucauaguuauacuacucucacuaaucgcaguaggauuacuauuauacugcaaagcaagauaa

SEQ ID NO: 2013 - RNA, 1545 nt, Artificial Sequence
  derived and/or modified CDS sequence (opt11) from HRSV(A2)__F-del_DSCav1_mut1
auggaacuacucauccuaaaagccaacgcaaucacaaccauacuuacagcuguuaccuucugcuucgcauccggccaaaauaucaccgaagaguucuaccaaucaaccugcuccgccgucagcaaaggauaccucggcgcccuccgaaccggaugguacacuucugucaucacaaucgaacucuccaacaucaaagaaaacaaaugcaacgguaccgacgcgaaagucaaacucaucaaacaagaacuagacaaguacaaaaacgccgucaccgaacugcaacuccucaugcaauccacaccagcaacgggaucaggauccgccaucugcucaggcgucgccgucugcaaaguccugcaccuagaaggagaaguaaacaaaauuaaauccgcccuacucuccaccaacaaagcagucgucucacuauccaacggcgucuccguccucaccuuuaagguccucgaccucaaaaauuauauagacaaacaacuccuccccauccuaaacaaacaaucaugcuccauccccaacauagaaaccgucaucgaauuucaacagaaaaacaaccgacucuuagaaauuacccgcgaguucagcgucaacgccggagucaccacacccgucucaaccuacaugcucaccaacucagaacuccucucacuaaucaaugauaugcccaucacaaacgaccaaaagaaacucauguccaacaacguacaaaucguucgccaacaaagcuacuccaucauguguaucauuaaagaagaaguccucgccuacgucguccaacuuccgcucuacggcguaaucgacacccccugcuggaaacuucacaccucgccccucugcaccacaaacaccaaagaaggcuccaacaucugccuaacccgcaccgaccgcggcugguacugcgacaacgccggcuccgucucauuuuucccccaggcggagaccugcaaaguccaauccaaccgcgucuucugcgacaccaugaacucucuuacccucccaucagaaguaaaccucugcaacgucgacaucuuuaaccccaaauacgauugcaagauaaugaccuccaaaacagacgucucaucguccgucaucaccucccuaggagcuaucgucuccugcuacggcaagaccaaaugcaccgcuuccaacaaaaaccgcggcaucaucaaaaccuucuccaacgggugcgacuacgucucuaacaaaggcguggacacaguauccguaggaaacacacuguacugcguaaacaaacaagagggccaaucgcuuuacgucaaaggcgagccaauuaucaacuucuacgacccgcucgucuucccaucagacgaguucgacgcauccaucucccaagucaacgagaaaaucaaucagucccucgccuucauacgcaaauccgacgaacuccuacauaacguaaacgccggcaaaucuaccacaaacaucaugaucacaaccaucaucaucguaaucaucgucauccuucucucgcucaucgccguaggacugcuacuuuacugcaaggcccgcuaa

SEQ ID NO: 2014 - RNA, 1821 nt, Artificial Sequence
  mRNA product Design a-1 comprising derived and/or modified sequence from HRSV(A2)__F-del_DSCav1_mut1 (opt1)
gggagagucccgcagucggcguccagcggcucugcuuguucgugugugugucguugcaggccuuauucaagcuuaccauggagcugcucauccugaaggccaacgccaucaccaccauccugacggcggugaccuucugcuucgccagcggccagaacaucaccgaggaguucuaccaguccacgugcagcgccgucuccaagggguaccucggcgcccugcggaccggcugguacaccuccgugaucaccaucgagcugagcaacaucaaggagaacaagugcaacgggaccgacgccaaggugaagcucaucaagcaggagcuggacaaguacaagaacgcggucacggagcugcagcuccugaugcaguccaccccggcaaccggcuccggcuccgccaucugcagcggcgucgccgugugcaaggugcugcaccucgagggggaggucaacaagaucaagagcgcccugcuguccaccaacaaggccguggugagccucuccaacggcgucagcgugcugaccuucaaggugcuggaccucaagaacuacaucgacaagcagcugcugcccauccugaacaagcagagcugcuccauccccaacaucgagacggugaucgaguuccagcagaagaacaaccggcuccuggagaucacccgcgaguucagcgugaacgccggggucaccacccccguguccacguacaugcugaccaacagcgagcuccugucccugaucaacgacaugccgaucaccaacgaccagaagaagcucaugagcaacaacgugcagaucguccggcagcaguccuacagcaucaugugcaucaucaaggaggaggugcuggcguacgugguccagcugccccucuacggcgugaucgacacccccugcuggaagcugcacacgagcccccugugcaccaccaacaccaaggagggguccaacaucugccucacgcgcaccgaccggggcugguacugcgacaacgccggcagcgucuccuucuucccgcaggccgagaccugcaaggugcagagcaaccgcguguucugcgacaccaugaacucccugacgcugcccagcgagguaaaccucugcaacgucgacaucuucaaccccaaguacgacugcaagaucaugaccuccaagaccgacgugagcuccagcgugaucaccucccugggggccaucgucagcugcuacggcaagacgaagugcaccgccagcaacaagaaccgggggaucaucaagaccuucuccaacggcugcgacuacgugagcaacaagggcguggacaccguguccgucgggaacacccuguacugcgugaacaagcaggagggccagagccucuacgugaagggggagcccaucaucaacuucuacgacccgcuggucuuccccuccgacgaguucgacgcgagcaucucccaggugaacgagaagaucaaccagagccuggccuucauccgcaaguccgacgagcugcuccacaacgugaacgccggcaagagcacgaccaacaucaugaucaccaccaucaucaucgucaucaucgugauccugcugucccucaucgccguggggcugcugcucuacugcaaggcccggugaggacuagucccuguucccagagcccacuuuuuuuucuuuuuuugaaauaaaauagccugucuuucagaucuaaaaaaaaaaaaaaaaaaaaaaaaaaaaaaaaaaaaaaaaaaaaaaaaaaaaaaaaaaaaaaaaugcaucccccccccccccccccccccccccccccccaaaggcucuuuucagagccaccagaauu

SEQ ID NO: 2015 - RNA, 1821 nt, Artificial Sequence
  mRNA product Design a-1 comprising derived and/or modified sequence from HRSV(A2)__F-del_DSCav1_mut1 (opt1)
gggagagucccgcagucggcguccagcggcucugcuuguucgugugugugucguugcaggccuuauucaagcuuaccauggagcugcucauccugaaggccaacgccaucaccaccauccugacggcggugaccuucugcuucgccagcggccagaacaucaccgaggaguucuaccaguccacgugcagcgccgucuccaagggguaccucggcgcccugcgcaccgggugguacaccagcgugaucaccaucgagcuguccaacaucaaggagaacaagugcaacggcaccgacgccaaggugaagcucaucaagcaggagcuggacaaguacaagaacgcggucacggagcugcagcuccugaugcagagcacccccgccaccggguccggcagcgccaucugcuccggcguggccgugugcaagguccugcaccucgagggggaggugaacaagaucaagagcgcgcugcuguccaccaacaaggccguggucagccucuccaacggcgugagcgugcugacguucaagguccuggaccucaagaacuacaucgacaagcagcugcugccgauccucaacaagcaguccugcagcauccccaacaucgagaccgugaucgaguuccagcagaagaacaaccggcugcuggagaucacccgcgaguucuccgugaacgccggggucaccacgcccgugagcaccuacaugcucaccaacuccgagcugcugagccucaucaacgacaugcccaucaccaacgaccagaagaagcugaugagcaacaacgugcagaucguccggcagcaguccuacagcaucaugugcaucaucaaggaggaggugcuggccuacgugguccagcucccgcuguacggcgugaucgacacgcccugcuggaagcugcacaccagcccccucugcaccaccaacacgaaggagggguccaacaucugccugacccgcaccgaccggggcugguacugcgacaacgccggcuccgugagcuucuucccccaggcggagaccugcaagguccaguccaaccgcguguucugcgacacgaugaacagccugacccucccguccgaggucaaccugugcaacguggacaucuucaaccccaaguacgacugcaagaucaugaccagcaagaccgacguguccagcuccgucaucacgagccugggggccaucguguccugcuacggcaagaccaagugcaccgccagcaacaagaaccgggggaucaucaagaccuucuccaacggcugcgacuacgugagcaacaagggcgucgacacgguguccguggggaacacccucuacugcgucaacaagcaggagggccagagccuguacgugaagggggagcccaucaucaacuucuacgacccccugguguucccgagcgacgaguucgacgccuccaucagccaggucaacgagaagaucaaccagucccucgccuucauccgcaagagcgacgagcugcugcacaacgugaacgcgggcaaguccaccaccaacaucaugaucaccacgaucaucaucgugaucaucgucauccuccugagccugaucgccguggggcuccugcuguacugcaaggcccggugaggacuagucccuguucccagagcccacuuuuuuuucuuuuuuugaaauaaaauagccugucuuucagaucuaaaaaaaaaaaaaaaaaaaaaaaaaaaaaaaaaaaaaaaaaaaaaaaaaaaaaaaaaaaaaaaaugcaucccccccccccccccccccccccccccccccaaaggcucuuuucagagccaccagaauu

SEQ ID NO: 2016 - RNA, 1821 nt, Artificial Sequence
  mRNA product Design a-1 comprising derived and/or modified sequence from HRSV(A2)__F-del_DSCav1_mut1 (opt2)
gggagagucccgcagucggcguccagcggcucugcuuguucgugugugugucguugcaggccuuauucaagcuuaccauggagcuccucauccucaaggccaacgccaucaccaccauccucaccgccgucaccuucugcuucgccuccggccagaacaucaccgaggaguucuaccaguccaccugcuccgccgucuccaagggcuaccucggcgcccuccgcaccggcugguacaccuccgucaucaccaucgagcucuccaacaucaaggagaacaagugcaacggcaccgacgccaaggucaagcucaucaagcaggagcucgacaaguacaagaacgccgucaccgagcuccagcuccucaugcaguccacccccgccaccggcuccggcuccgccaucugcuccggcgucgccgucugcaagguccuccaccucgagggcgaggucaacaagaucaaguccgcccuccucuccaccaacaaggccgucgucucccucuccaacggcgucuccguccucaccuucaagguccucgaccucaagaacuacaucgacaagcagcuccuccccauccucaacaagcaguccugcuccauccccaacaucgagaccgucaucgaguuccagcagaagaacaaccgccuccucgagaucacccgcgaguucuccgucaacgccggcgucaccacccccgucuccaccuacaugcucaccaacuccgagcuccucucccucaucaacgacaugcccaucaccaacgaccagaagaagcucauguccaacaacguccagaucguccgccagcaguccuacuccaucaugugcaucaucaaggaggagguccucgccuacgucguccagcucccccucuacggcgucaucgacacccccugcuggaagcuccacaccuccccccucugcaccaccaacaccaaggagggcuccaacaucugccucacccgcaccgaccgcggcugguacugcgacaacgccggcuccgucuccuucuucccccaggccgagaccugcaagguccaguccaaccgcgucuucugcgacaccaugaacucccucacccuccccuccgaggucaaccucugcaacgucgacaucuucaaccccaaguacgacugcaagaucaugaccuccaagaccgacgucuccuccuccgucaucaccucccucggcgccaucgucuccugcuacggcaagaccaagugcaccgccuccaacaagaaccgcggcaucaucaagaccuucuccaacggcugcgacuacgucuccaacaagggcgucgacaccgucuccgucggcaacacccucuacugcgucaacaagcaggagggccagucccucuacgucaagggcgagcccaucaucaacuucuacgacccccucgucuuccccuccgacgaguucgacgccuccaucucccaggucaacgagaagaucaaccagucccucgccuucauccgcaaguccgacgagcuccuccacaacgucaacgccggcaaguccaccaccaacaucaugaucaccaccaucaucaucgucaucaucgucauccuccucucccucaucgccgucggccuccuccucuacugcaaggcccgcugaggacuagucccuguucccagagcccacuuuuuuuucuuuuuuugaaauaaaauagccugucuuucagaucuaaaaaaaaaaaaaaaaaaaaaaaaaaaaaaaaaaaaaaaaaaaaaaaaaaaaaaaaaaaaaaaaugcaucccccccccccccccccccccccccccccccaaaggcucuuuucagagccaccagaauu

SEQ ID NO: 2017 - RNA, 1821 nt, Artificial Sequence
  mRNA product Design a-1 comprising derived and/or modified sequence from HRSV(A2)__F-del_DSCav1_mut1 (opt3)
gggagagucccgcagucggcguccagcggcucugcuuguucgugugugugucguugcaggccuuauucaagcuuaccauggagcugcucauccuuaaggccaacgcuauuaccacaauacugacugcagugacguucugcuuugccagcggccagaauaucaccgaagaguucuaccaauccacauguucugcggucucaaaaggguauuugggagcuuuaagaacugguugguacaccaguguuauuacaaucgaacugagcaacauuaaggagaauaaaugcaacggcaccgacgccaaggugaaacuaaucaagcaggaacucgauaaguauaaaaaugcaguaacugagcugcagcuucugaugcaguccacacccgccaccgggucuggaucggcuauauguucaggcguggcagucugcaagguguugcaccucgagggugaaguuaacaaaaucaagagcgcccugcugaguacgaauaaagcuguggucucccucucuaacggggugagcguauuaacuuuuaagguucuggaccuuaagaauuacauugauaaacaauugcugccuauccuaaacaagcaguccuguucaauuccaaauaucgagaccgugauagaguuccagcagaaaaacaauaggcuccuggaaauuacacgggaguuuagugucaacgccggagugacuaccccggugagcacauauaugcuuaccaauucugaacuguugucccucaucaacgacaugcccauuacgaacgaucaaaagaaacugaugucaaauaacguccagaucguucgccagcagagcuacaguaucaugugcauuauaaaggaggaaguguuagcguauguagugcaacugccucucuacggcgucaucgacacuccauguuggaaacuucauacaucuccccugugcaccacuaauacaaaggagggcuccaacauuuguuugacccgaacggaucgugggugguacugcgacaaugcaggaagcgugucguucuuuccucaggccgaaaccuguaagguucagucuaacagaguguucugcgauacaaugaacucccuaacucugccaucagaggucaaucucugcaauguggacaucuuuaaccccaaauaugauuguaagauaaugaccaguaaaacagacguaagcuccucuguuauuacuagccugggugcuaucgugucaugcuacggcaagaccaaauguacagccaguaauaagaacagggggaucauuaagaccuucuccaauggaugcgauuaugucagcaacaaaggcguggacacugucucuguggguaauacgcuuuacuguguuaacaagcaagaggggcagucacuguaugugaaaggagaaccuaucauuaacuuuuacgacccauugguauucccgagugaugaguuugacgcaagcauaucccaggucaaugaaaagaucaaccagucucucgcuuucauucggaaaucggaugagcuguuacacaaugugaacgccggcaagagcacaaccaauaucaugaucacuaccauuauaaucguuauuaucgugauucugcuaucccucaucgcggucggccugcuuuuguauugcaaggcccgcugaggacuagucccuguucccagagcccacuuuuuuuucuuuuuuugaaauaaaauagccugucuuucagaucuaaaaaaaaaaaaaaaaaaaaaaaaaaaaaaaaaaaaaaaaaaaaaaaaaaaaaaaaaaaaaaaaugcaucccccccccccccccccccccccccccccccaaaggcucuuuucagagccaccagaauu

SEQ ID NO: 2018 - RNA, 1821 nt, Artificial Sequence
  mRNA product Design a-1 comprising derived and/or modified sequence from HRSV(A2)__F-del_DSCav1_mut1 (opt4)
gggagagucccgcagucggcguccagcggcucugcuuguucgugugugugucguugcaggccuuauucaagcuuaccauggagcugcugauccugaaggccaacgccaucaccaccauccugaccgccgugaccuucugcuucgccagcggccagaacaucaccgaggaguucuaccagagcaccugcagcgccgugagcaagggcuaccugggcgcccugagaaccggcugguacaccagcgugaucaccaucgagcugagcaacaucaaggagaacaagugcaacggcaccgacgccaaggugaagcugaucaagcaggagcuggacaaguacaagaacgccgugaccgagcugcagcugcugaugcagagcacccccgccaccggcagcggcagcgccaucugcagcggcguggccgugugcaaggugcugcaccuggagggcgaggugaacaagaucaagagcgcccugcugagcaccaacaaggccguggugagccugagcaacggcgugagcgugcugaccuucaaggugcuggaccugaagaacuacaucgacaagcagcugcugcccauccugaacaagcagagcugcagcauccccaacaucgagaccgugaucgaguuccagcagaagaacaacagacugcuggagaucaccagagaguucagcgugaacgccggcgugaccacccccgugagcaccuacaugcugaccaacagcgagcugcugagccugaucaacgacaugcccaucaccaacgaccagaagaagcugaugagcaacaacgugcagaucgugagacagcagagcuacagcaucaugugcaucaucaaggaggaggugcuggccuacguggugcagcugccccuguacggcgugaucgacacccccugcuggaagcugcacaccagcccccugugcaccaccaacaccaaggagggcagcaacaucugccugaccagaaccgacagaggcugguacugcgacaacgccggcagcgugagcuucuucccccaggccgagaccugcaaggugcagagcaacagaguguucugcgacaccaugaacagccugacccugcccagcgaggugaaccugugcaacguggacaucuucaaccccaaguacgacugcaagaucaugaccagcaagaccgacgugagcagcagcgugaucaccagccugggcgccaucgugagcugcuacggcaagaccaagugcaccgccagcaacaagaacagaggcaucaucaagaccuucagcaacggcugcgacuacgugagcaacaagggcguggacaccgugagcgugggcaacacccuguacugcgugaacaagcaggagggccagagccuguacgugaagggcgagcccaucaucaacuucuacgacccccugguguuccccagcgacgaguucgacgccagcaucagccaggugaacgagaagaucaaccagagccuggccuucaucagaaagagcgacgagcugcugcacaacgugaacgccggcaagagcaccaccaacaucaugaucaccaccaucaucaucgugaucaucgugauccugcugagccugaucgccgugggccugcugcuguacugcaaggccagaugaggacuagucccuguucccagagcccacuuuuuuuucuuuuuuugaaauaaaauagccugucuuucagaucuaaaaaaaaaaaaaaaaaaaaaaaaaaaaaaaaaaaaaaaaaaaaaaaaaaaaaaaaaaaaaaaaugcaucccccccccccccccccccccccccccccccaaaggcucuuuucagagccaccagaauu

SEQ ID NO: 2019 - RNA, 1821 nt, Artificial Sequence
  mRNA product Design a-1 comprising derived and/or modified sequence from HRSV(A2)__F-del_DSCav1_mut1 (opt5)
gggagagucccgcagucggcguccagcggcucugcuuguucgugugugugucguugcaggccuuauucaagcuuaccauggagcugcucauccugaaggccaacgcuauuaccacaauccuuacggccgugaccuucugcuuugcgagcggccagaauauuacagaagaguucuaccaauccaccuguucugcugucagcaaaggguaucugggagcccucagaacaggcugguacaccuccguuaucacaauugaacugucuaacaucaaggagaauaaaugcaacgggaccgacgccaaggugaaacuuaucaagcaggaacuggauaaguauaaaaaugcugugacggagcuccagcugcugaugcagagcacccccgccacaggauccggcucugcuauuuguagcggggucgccgugugcaagguucuccaccuggagggagaagugaacaaaaucaaguccgcgcuucugagcaccaauaaagccgucgugucucucuccaacggcguuagcgugcugacauuuaagguccuugaccugaagaauuacauugauaaacaacuccugccuauccugaacaagcagucuuguuccauuccgaauaucgagaccgugauugaguuccagcagaaaaacaaucggcuccuggaaaucacgcgcgaguuuagcgugaacgcuggcgucacaacccccguuucuacauauaugcuuaccaauuccgaacugcucagccugaucaacgacaugccuauuaccaacgaucaaaagaaacuuauguccaauaacgugcagaucgugagacagcagucuuacagcauuaugugcaucauuaaggaggaaguccuggccuaugugguucaacucccccuguacggggugaucgacacaccuuguuggaaacugcauacgagcccccucugcaccacaaauaccaaggagggauccaacaucugucugacacggaccgaucgcggcugguacugcgacaaugcugggucugucuccuucuuuccucaggccgaaacguguaaggugcagagcaacagaguuuucugcgauacaaugaacucucuuacccugccgagcgaggugaaucucugcaaugucgacauuuuuaaccccaaauaugauuguaagaucaugaccuccaaaacagacgugucuagcuccgucauuaccagccugggagcgaucgugucuugcuacggcaagacaaaauguacggccuccaauaagaaccgggggauuaucaagaccuucagcaauggaugcgauuauguuucuaacaaaggcguggacacagucuccgugggcaauacccuuuacuguguuaacaagcaagaggggcagagccuguaugugaaaggagaaccuaucauuaacuuuuacgacccccucgucuucccuuccgaugaguuugacgcuucuaucagccaggugaaugaaaagauuaaccagucccuggccuucauccgcaaaucugaugagcugcuccacaaugugaacgcuggcaagagcacaaccaauauuaugaucacgaccauuaucaucguuauuaucgucauucugcuuucccugaucgccguggggcuccugcuguauugcaaggccagaugaggacuagucccuguucccagagcccacuuuuuuuucuuuuuuugaaauaaaauagccugucuuucagaucuaaaaaaaaaaaaaaaaaaaaaaaaaaaaaaaaaaaaaaaaaaaaaaaaaaaaaaaaaaaaaaaaugcaucccccccccccccccccccccccccccccccaaaggcucuuuucagagccaccagaauu

SEQ ID NO: 2020 - RNA, 1821 nt, Artificial Sequence
  mRNA product Design a-1 comprising derived and/or modified sequence from HRSV(A2)__F-del_DSCav1_mut1 (opt6)
gggagagucccgcagucggcguccagcggcucugcuuguucgugugugugucguugcaggccuuauucaagcuuaccauggaacuacucaucuuaaaagcaaacgcaauaacaacuauucuaaccgcaguaacauuuuguuucgcaucaggacaaaacauaaccgaagaauuuuaccaaucaacauguuccgcaguuucaaaaggauacuuaggcgcacuaagaacaggcugguacaccuccgugauaacaauagaauuaucaaacauaaaagaaaacaaauguaauggaacugacgccaaaguaaaacuaauaaaacaagaacuagacaaauauaaaaacgcaguaacugaacuacaauuacuaaugcaauccaccccagcaacaggcucaggcucagcaauuugcuccggagucgcugucugcaaaguacuacaucuugaaggcgaagucaauaaaauaaaaucagcacuucuaucaacaaacaaagcaguagucucacuaucaaacggaguaucaguacuaacauuuaaaguauuagaucuaaaaaacuauauagauaaacaacuacuacccauacucaauaaacaauccuguucaauaccaaauauagaaaccguaauagaauuucaacaaaaaaacaaucgacuauuagaaaucacccgagaauuuucagucaaugcaggcguaacaacaccaguaucaaccuacauguuaaccaacuccgaacuacuaucccucauaaacgacaugccaauaacaaacgaucaaaaaaaacuaauguccaacaacguacaaauagucagacaacaaucuuauucaauaaugugcaucauaaaagaagaaguucuagccuacguaguucaacuuccauuauacggcguaauugauacaccaugcuggaaacuacacacauccccacuauguacaacaaacacaaaagaaggaucaaacaucugcuuaacuagaacagacagaggaugguacugcgacaacgcaggaucagucucauucuuuccacaagcagaaacaugcaagguccaaucaaacagaguauucugcgacacaaugaacuccuuaacacuaccaucugaaguaaaccuauguaauguagacauauuuaacccaaaauacgacugcaaaauaaugaccucaaaaacagacguauccucaucaguaauuacaagccucggagccauaguaucaugcuacggaaaaacaaaauguacagcaucaaacaaaaacagaggaauaauaaaaacguucuccaacggaugcgacuauguaucaaacaaaggcguagacacaguaucagucggaaauacccuuuacugcguaaacaaacaagaaggccaaagucuauacguaaaaggagagccaauaauaaacuuuuaugacccccuuguauucccaucugacgaauuugaugcaucaauaucccaagucaacgaaaaaaucaaccaaucauuagccuuuauuagaaaaagugacgaacuauuacacaacguuaaugcagggaaaucaacaacaaauauaaugauuacaaccauaauuauaguuaucauaguuauacuacucucacuaaucgcaguaggauuacuauuauacugcaaagcaagauaaggacuagucccuguucccagagcccacuuuuuuuucuuuuuuugaaauaaaauagccugucuuucagaucuaaaaaaaaaaaaaaaaaaaaaaaaaaaaaaaaaaaaaaaaaaaaaaaaaaaaaaaaaaaaaaaaugcaucccccccccccccccccccccccccccccccaaaggcucuuuucagagccaccagaauu

SEQ ID NO: 2021 - RNA, 1821 nt, Artificial Sequence
  mRNA product Design a-1 comprising derived and/or modified sequence from HRSV(A2)__F-del_DSCav1_mut1 (opt11)
gggagagucccgcagucggcguccagcggcucugcuuguucgugugugugucguugcaggccuuauucaagcuuaccauggaacuacucauccuaaaagccaacgcaaucacaaccauacuuacagcuguuaccuucugcuucgcauccggccaaaauaucaccgaagaguucuaccaaucaaccugcuccgccgucagcaaaggauaccucggcgcccuccgaaccggaugguacacuucugucaucacaaucgaacucuccaacaucaaagaaaacaaaugcaacgguaccgacgcgaaagucaaacucaucaaacaagaacuagacaaguacaaaaacgccgucaccgaacugcaacuccucaugcaauccacaccagcaacgggaucaggauccgccaucugcucaggcgucgccgucugcaaaguccugcaccuagaaggagaaguaaacaaaauuaaauccgcccuacucuccaccaacaaagcagucgucucacuauccaacggcgucuccguccucaccuuuaagguccucgaccucaaaaauuauauagacaaacaacuccuccccauccuaaacaaacaaucaugcuccauccccaacauagaaaccgucaucgaauuucaacagaaaaacaaccgacucuuagaaauuacccgcgaguucagcgucaacgccggagucaccacacccgucucaaccuacaugcucaccaacucagaacuccucucacuaaucaaugauaugcccaucacaaacgaccaaaagaaacucauguccaacaacguacaaaucguucgccaacaaagcuacuccaucauguguaucauuaaagaagaaguccucgccuacgucguccaacuuccgcucuacggcguaaucgacacccccugcuggaaacuucacaccucgccccucugcaccacaaacaccaaagaaggcuccaacaucugccuaacccgcaccgaccgcggcugguacugcgacaacgccggcuccgucucauuuuucccccaggcggagaccugcaaaguccaauccaaccgcgucuucugcgacaccaugaacucucuuacccucccaucagaaguaaaccucugcaacgucgacaucuuuaaccccaaauacgauugcaagauaaugaccuccaaaacagacgucucaucguccgucaucaccucccuaggagcuaucgucuccugcuacggcaagaccaaaugcaccgcuuccaacaaaaaccgcggcaucaucaaaaccuucuccaacgggugcgacuacgucucuaacaaaggcguggacacaguauccguaggaaacacacuguacugcguaaacaaacaagagggccaaucgcuuuacgucaaaggcgagccaauuaucaacuucuacgacccgcucgucuucccaucagacgaguucgacgcauccaucucccaagucaacgagaaaaucaaucagucccucgccuucauacgcaaauccgacgaacuccuacauaacguaaacgccggcaaaucuaccacaaacaucaugaucacaaccaucaucaucguaaucaucgucauccuucucucgcucaucgccguaggacugcuacuuuacugcaaggcccgcuaaggacuagucccuguucccagagcccacuuuuuuuucuuuuuuugaaauaaaauagccugucuuucagaucuaaaaaaaaaaaaaaaaaaaaaaaaaaaaaaaaaaaaaaaaaaaaaaaaaaaaaaaaaaaaaaaaugcaucccccccccccccccccccccccccccccccaaaggcucuuuucagagccaccagaauu

SEQ ID NO: 2022 - RNA, 1840 nt, Artificial Sequence
  mRNA product Design a-2 comprising derived and/or modified sequence from HRSV(A2)__F-del_DSCav1_mut1 (opt1)
gggagaguccgcucagccagguugcagaagcggcuuagcguguguccuaaucuucucucugcguguagguaggccugugccgcaaacaagcuuaccauggagcugcucauccugaaggccaacgccaucaccaccauccugacggcggugaccuucugcuucgccagcggccagaacaucaccgaggaguucuaccaguccacgugcagcgccgucuccaagggguaccucggcgcccugcggaccggcugguacaccuccgugaucaccaucgagcugagcaacaucaaggagaacaagugcaacgggaccgacgccaaggugaagcucaucaagcaggagcuggacaaguacaagaacgcggucacggagcugcagcuccugaugcaguccaccccggcaaccggcuccggcuccgccaucugcagcggcgucgccgugugcaaggugcugcaccucgagggggaggucaacaagaucaagagcgcccugcuguccaccaacaaggccguggugagccucuccaacggcgucagcgugcugaccuucaaggugcuggaccucaagaacuacaucgacaagcagcugcugcccauccugaacaagcagagcugcuccauccccaacaucgagacggugaucgaguuccagcagaagaacaaccggcuccuggagaucacccgcgaguucagcgugaacgccggggucaccacccccguguccacguacaugcugaccaacagcgagcuccugucccugaucaacgacaugccgaucaccaacgaccagaagaagcucaugagcaacaacgugcagaucguccggcagcaguccuacagcaucaugugcaucaucaaggaggaggugcuggcguacgugguccagcugccccucuacggcgugaucgacacccccugcuggaagcugcacacgagcccccugugcaccaccaacaccaaggagggguccaacaucugccucacgcgcaccgaccggggcugguacugcgacaacgccggcagcgucuccuucuucccgcaggccgagaccugcaaggugcagagcaaccgcguguucugcgacaccaugaacucccugacgcugcccagcgagguaaaccucugcaacgucgacaucuucaaccccaaguacgacugcaagaucaugaccuccaagaccgacgugagcuccagcgugaucaccucccugggggccaucgucagcugcuacggcaagacgaagugcaccgccagcaacaagaaccgggggaucaucaagaccuucuccaacggcugcgacuacgugagcaacaagggcguggacaccguguccgucgggaacacccuguacugcgugaacaagcaggagggccagagccucuacgugaagggggagcccaucaucaacuucuacgacccgcuggucuuccccuccgacgaguucgacgcgagcaucucccaggugaacgagaagaucaaccagagccuggccuucauccgcaaguccgacgagcugcuccacaacgugaacgccggcaagagcacgaccaacaucaugaucaccaccaucaucaucgucaucaucgugauccugcugucccucaucgccguggggcugcugcucuacugcaaggcccggugaggacuagucccuguucccagagcccacuuuuuuuucuuuuuuugaaauaaaauagccugucuuucagaucuaaaaaaaaaaaaaaaaaaaaaaaaaaaaaaaaaaaaaaaaaaaaaaaaaaaaaaaaaaaaaaaaugcaucccccccccccccccccccccccccccccccaaaggcucuuuucagagccaccagaauu

SEQ ID NO: 2023 - RNA, 1840 nt, Artificial Sequence
  mRNA product Design a-2 comprising derived and/or modified sequence from HRSV(A2)__F-del_DSCav1_mut1 (opt1)
gggagaguccgcucagccagguugcagaagcggcuuagcguguguccuaaucuucucucugcguguagguaggccugugccgcaaacaagcuuaccauggagcugcucauccugaaggccaacgccaucaccaccauccugacggcggugaccuucugcuucgccagcggccagaacaucaccgaggaguucuaccaguccacgugcagcgccgucuccaagggguaccucggcgcccugcgcaccgggugguacaccagcgugaucaccaucgagcuguccaacaucaaggagaacaagugcaacggcaccgacgccaaggugaagcucaucaagcaggagcuggacaaguacaagaacgcggucacggagcugcagcuccugaugcagagcacccccgccaccggguccggcagcgccaucugcuccggcguggccgugugcaagguccugcaccucgagggggaggugaacaagaucaagagcgcgcugcuguccaccaacaaggccguggucagccucuccaacggcgugagcgugcugacguucaagguccuggaccucaagaacuacaucgacaagcagcugcugccgauccucaacaagcaguccugcagcauccccaacaucgagaccgugaucgaguuccagcagaagaacaaccggcugcuggagaucacccgcgaguucuccgugaacgccggggucaccacgcccgugagcaccuacaugcucaccaacuccgagcugcugagccucaucaacgacaugcccaucaccaacgaccagaagaagcugaugagcaacaacgugcagaucguccggcagcaguccuacagcaucaugugcaucaucaaggaggaggugcuggccuacgugguccagcucccgcuguacggcgugaucgacacgcccugcuggaagcugcacaccagcccccucugcaccaccaacacgaaggagggguccaacaucugccugacccgcaccgaccggggcugguacugcgacaacgccggcuccgugagcuucuucccccaggcggagaccugcaagguccaguccaaccgcguguucugcgacacgaugaacagccugacccucccguccgaggucaaccugugcaacguggacaucuucaaccccaaguacgacugcaagaucaugaccagcaagaccgacguguccagcuccgucaucacgagccugggggccaucguguccugcuacggcaagaccaagugcaccgccagcaacaagaaccgggggaucaucaagaccuucuccaacggcugcgacuacgugagcaacaagggcgucgacacgguguccguggggaacacccucuacugcgucaacaagcaggagggccagagccuguacgugaagggggagcccaucaucaacuucuacgacccccugguguucccgagcgacgaguucgacgccuccaucagccaggucaacgagaagaucaaccagucccucgccuucauccgcaagagcgacgagcugcugcacaacgugaacgcgggcaaguccaccaccaacaucaugaucaccacgaucaucaucgugaucaucgucauccuccugagccugaucgccguggggcuccugcuguacugcaaggcccggugaggacuagucccuguucccagagcccacuuuuuuuucuuuuuuugaaauaaaauagccugucuuucagaucuaaaaaaaaaaaaaaaaaaaaaaaaaaaaaaaaaaaaaaaaaaaaaaaaaaaaaaaaaaaaaaaaugcaucccccccccccccccccccccccccccccccaaaggcucuuuucagagccaccagaauu

SEQ ID NO: 2024 - RNA, 1840 nt, Artificial Sequence
  mRNA product Design a-2 comprising derived and/or modified sequence from HRSV(A2)__F-del_DSCav1_mut1 (opt2)
gggagaguccgcucagccagguugcagaagcggcuuagcguguguccuaaucuucucucugcguguagguaggccugugccgcaaacaagcuuaccauggagcuccucauccucaaggccaacgccaucaccaccauccucaccgccgucaccuucugcuucgccuccggccagaacaucaccgaggaguucuaccaguccaccugcuccgccgucuccaagggcuaccucggcgcccuccgcaccggcugguacaccuccgucaucaccaucgagcucuccaacaucaaggagaacaagugcaacggcaccgacgccaaggucaagcucaucaagcaggagcucgacaaguacaagaacgccgucaccgagcuccagcuccucaugcaguccacccccgccaccggcuccggcuccgccaucugcuccggcgucgccgucugcaagguccuccaccucgagggcgaggucaacaagaucaaguccgcccuccucuccaccaacaaggccgucgucucccucuccaacggcgucuccguccucaccuucaagguccucgaccucaagaacuacaucgacaagcagcuccuccccauccucaacaagcaguccugcuccauccccaacaucgagaccgucaucgaguuccagcagaagaacaaccgccuccucgagaucacccgcgaguucuccgucaacgccggcgucaccacccccgucuccaccuacaugcucaccaacuccgagcuccucucccucaucaacgacaugcccaucaccaacgaccagaagaagcucauguccaacaacguccagaucguccgccagcaguccuacuccaucaugugcaucaucaaggaggagguccucgccuacgucguccagcucccccucuacggcgucaucgacacccccugcuggaagcuccacaccuccccccucugcaccaccaacaccaaggagggcuccaacaucugccucacccgcaccgaccgcggcugguacugcgacaacgccggcuccgucuccuucuucccccaggccgagaccugcaagguccaguccaaccgcgucuucugcgacaccaugaacucccucacccuccccuccgaggucaaccucugcaacgucgacaucuucaaccccaaguacgacugcaagaucaugaccuccaagaccgacgucuccuccuccgucaucaccucccucggcgccaucgucuccugcuacggcaagaccaagugcaccgccuccaacaagaaccgcggcaucaucaagaccuucuccaacggcugcgacuacgucuccaacaagggcgucgacaccgucuccgucggcaacacccucuacugcgucaacaagcaggagggccagucccucuacgucaagggcgagcccaucaucaacuucuacgacccccucgucuuccccuccgacgaguucgacgccuccaucucccaggucaacgagaagaucaaccagucccucgccuucauccgcaaguccgacgagcuccuccacaacgucaacgccggcaaguccaccaccaacaucaugaucaccaccaucaucaucgucaucaucgucauccuccucucccucaucgccgucggccuccuccucuacugcaaggcccgcugaggacuagucccuguucccagagcccacuuuuuuuucuuuuuuugaaauaaaauagccugucuuucagaucuaaaaaaaaaaaaaaaaaaaaaaaaaaaaaaaaaaaaaaaaaaaaaaaaaaaaaaaaaaaaaaaaugcaucccccccccccccccccccccccccccccccaaaggcucuuuucagagccaccagaauu

SEQ ID NO: 2025 - RNA, 1840 nt, Artificial Sequence
  mRNA product Design a-2 comprising derived and/or modified sequence from HRSV(A2)__F-del_DSCav1_mut1 (opt3)
gggagaguccgcucagccagguugcagaagcggcuuagcguguguccuaaucuucucucugcguguagguaggccugugccgcaaacaagcuuaccauggagcugcucauccuuaaggccaacgcuauuaccacaauacugacugcagugacguucugcuuugccagcggccagaauaucaccgaagaguucuaccaauccacauguucugcggucucaaaaggguauuugggagcuuuaagaacugguugguacaccaguguuauuacaaucgaacugagcaacauuaaggagaauaaaugcaacggcaccgacgccaaggugaaacuaaucaagcaggaacucgauaaguauaaaaaugcaguaacugagcugcagcuucugaugcaguccacacccgccaccgggucuggaucggcuauauguucaggcguggcagucugcaagguguugcaccucgagggugaaguuaacaaaaucaagagcgcccugcugaguacgaauaaagcuguggucucccucucuaacggggugagcguauuaacuuuuaagguucuggaccuuaagaauuacauugauaaacaauugcugccuauccuaaacaagcaguccuguucaauuccaaauaucgagaccgugauagaguuccagcagaaaaacaauaggcuccuggaaauuacacgggaguuuagugucaacgccggagugacuaccccggugagcacauauaugcuuaccaauucugaacuguugucccucaucaacgacaugcccauuacgaacgaucaaaagaaacugaugucaaauaacguccagaucguucgccagcagagcuacaguaucaugugcauuauaaaggaggaaguguuagcguauguagugcaacugccucucuacggcgucaucgacacuccauguuggaaacuucauacaucuccccugugcaccacuaauacaaaggagggcuccaacauuuguuugacccgaacggaucgugggugguacugcgacaaugcaggaagcgugucguucuuuccucaggccgaaaccuguaagguucagucuaacagaguguucugcgauacaaugaacucccuaacucugccaucagaggucaaucucugcaauguggacaucuuuaaccccaaauaugauuguaagauaaugaccaguaaaacagacguaagcuccucuguuauuacuagccugggugcuaucgugucaugcuacggcaagaccaaauguacagccaguaauaagaacagggggaucauuaagaccuucuccaauggaugcgauuaugucagcaacaaaggcguggacacugucucuguggguaauacgcuuuacuguguuaacaagcaagaggggcagucacuguaugugaaaggagaaccuaucauuaacuuuuacgacccauugguauucccgagugaugaguuugacgcaagcauaucccaggucaaugaaaagaucaaccagucucucgcuuucauucggaaaucggaugagcuguuacacaaugugaacgccggcaagagcacaaccaauaucaugaucacuaccauuauaaucguuauuaucgugauucugcuaucccucaucgcggucggccugcuuuuguauugcaaggcccgcugaggacuagucccuguucccagagcccacuuuuuuuucuuuuuuugaaauaaaauagccugucuuucagaucuaaaaaaaaaaaaaaaaaaaaaaaaaaaaaaaaaaaaaaaaaaaaaaaaaaaaaaaaaaaaaaaaugcaucccccccccccccccccccccccccccccccaaaggcucuuuucagagccaccagaauu

SEQ ID NO: 2026 - RNA, 1840 nt, Artificial Sequence
  mRNA product Design a-2 comprising derived and/or modified sequence from HRSV(A2)__F-del_DSCav1_mut1 (opt4)
gggagaguccgcucagccagguugcagaagcggcuuagcguguguccuaaucuucucucugcguguagguaggccugugccgcaaacaagcuuaccauggagcugcugauccugaaggccaacgccaucaccaccauccugaccgccgugaccuucugcuucgccagcggccagaacaucaccgaggaguucuaccagagcaccugcagcgccgugagcaagggcuaccugggcgcccugagaaccggcugguacaccagcgugaucaccaucgagcugagcaacaucaaggagaacaagugcaacggcaccgacgccaaggugaagcugaucaagcaggagcuggacaaguacaagaacgccgugaccgagcugcagcugcugaugcagagcacccccgccaccggcagcggcagcgccaucugcagcggcguggccgugugcaaggugcugcaccuggagggcgaggugaacaagaucaagagcgcccugcugagcaccaacaaggccguggugagccugagcaacggcgugagcgugcugaccuucaaggugcuggaccugaagaacuacaucgacaagcagcugcugcccauccugaacaagcagagcugcagcauccccaacaucgagaccgugaucgaguuccagcagaagaacaacagacugcuggagaucaccagagaguucagcgugaacgccggcgugaccacccccgugagcaccuacaugcugaccaacagcgagcugcugagccugaucaacgacaugcccaucaccaacgaccagaagaagcugaugagcaacaacgugcagaucgugagacagcagagcuacagcaucaugugcaucaucaaggaggaggugcuggccuacguggugcagcugccccuguacggcgugaucgacacccccugcuggaagcugcacaccagcccccugugcaccaccaacaccaaggagggcagcaacaucugccugaccagaaccgacagaggcugguacugcgacaacgccggcagcgugagcuucuucccccaggccgagaccugcaaggugcagagcaacagaguguucugcgacaccaugaacagccugacccugcccagcgaggugaaccugugcaacguggacaucuucaaccccaaguacgacugcaagaucaugaccagcaagaccgacgugagcagcagcgugaucaccagccugggcgccaucgugagcugcuacggcaagaccaagugcaccgccagcaacaagaacagaggcaucaucaagaccuucagcaacggcugcgacuacgugagcaacaagggcguggacaccgugagcgugggcaacacccuguacugcgugaacaagcaggagggccagagccuguacgugaagggcgagcccaucaucaacuucuacgacccccugguguuccccagcgacgaguucgacgccagcaucagccaggugaacgagaagaucaaccagagccuggccuucaucagaaagagcgacgagcugcugcacaacgugaacgccggcaagagcaccaccaacaucaugaucaccaccaucaucaucgugaucaucgugauccugcugagccugaucgccgugggccugcugcuguacugcaaggccagaugaggacuagucccuguucccagagcccacuuuuuuuucuuuuuuugaaauaaaauagccugucuuucagaucuaaaaaaaaaaaaaaaaaaaaaaaaaaaaaaaaaaaaaaaaaaaaaaaaaaaaaaaaaaaaaaaaugcaucccccccccccccccccccccccccccccccaaaggcucuuuucagagccaccagaauu

SEQ ID NO: 2027 - RNA, 1840 nt, Artificial Sequence
  mRNA product Design a-2 comprising derived and/or modified sequence from HRSV(A2)__F-del_DSCav1_mut1 (opt5)
gggagaguccgcucagccagguugcagaagcggcuuagcguguguccuaaucuucucucugcguguagguaggccugugccgcaaacaagcuuaccauggagcugcucauccugaaggccaacgcuauuaccacaauccuuacggccgugaccuucugcuuugcgagcggccagaauauuacagaagaguucuaccaauccaccuguucugcugucagcaaaggguaucugggagcccucagaacaggcugguacaccuccguuaucacaauugaacugucuaacaucaaggagaauaaaugcaacgggaccgacgccaaggugaaacuuaucaagcaggaacuggauaaguauaaaaaugcugugacggagcuccagcugcugaugcagagcacccccgccacaggauccggcucugcuauuuguagcggggucgccgugugcaagguucuccaccuggagggagaagugaacaaaaucaaguccgcgcuucugagcaccaauaaagccgucgugucucucuccaacggcguuagcgugcugacauuuaagguccuugaccugaagaauuacauugauaaacaacuccugccuauccugaacaagcagucuuguuccauuccgaauaucgagaccgugauugaguuccagcagaaaaacaaucggcuccuggaaaucacgcgcgaguuuagcgugaacgcuggcgucacaacccccguuucuacauauaugcuuaccaauuccgaacugcucagccugaucaacgacaugccuauuaccaacgaucaaaagaaacuuauguccaauaacgugcagaucgugagacagcagucuuacagcauuaugugcaucauuaaggaggaaguccuggccuaugugguucaacucccccuguacggggugaucgacacaccuuguuggaaacugcauacgagcccccucugcaccacaaauaccaaggagggauccaacaucugucugacacggaccgaucgcggcugguacugcgacaaugcugggucugucuccuucuuuccucaggccgaaacguguaaggugcagagcaacagaguuuucugcgauacaaugaacucucuuacccugccgagcgaggugaaucucugcaaugucgacauuuuuaaccccaaauaugauuguaagaucaugaccuccaaaacagacgugucuagcuccgucauuaccagccugggagcgaucgugucuugcuacggcaagacaaaauguacggccuccaauaagaaccgggggauuaucaagaccuucagcaauggaugcgauuauguuucuaacaaaggcguggacacagucuccgugggcaauacccuuuacuguguuaacaagcaagaggggcagagccuguaugugaaaggagaaccuaucauuaacuuuuacgacccccucgucuucccuuccgaugaguuugacgcuucuaucagccaggugaaugaaaagauuaaccagucccuggccuucauccgcaaaucugaugagcugcuccacaaugugaacgcuggcaagagcacaaccaauauuaugaucacgaccauuaucaucguuauuaucgucauucugcuuucccugaucgccguggggcuccugcuguauugcaaggccagaugaggacuagucccuguucccagagcccacuuuuuuuucuuuuuuugaaauaaaauagccugucuuucagaucuaaaaaaaaaaaaaaaaaaaaaaaaaaaaaaaaaaaaaaaaaaaaaaaaaaaaaaaaaaaaaaaaugcaucccccccccccccccccccccccccccccccaaaggcucuuuucagagccaccagaauu

SEQ ID NO: 2028 - RNA, 1840 nt, Artificial Sequence
  mRNA product Design a-2 comprising derived and/or modified sequence from HRSV(A2)__F-del_DSCav1_mut1 (opt6)
gggagaguccgcucagccagguugcagaagcggcuuagcguguguccuaaucuucucucugcguguagguaggccugugccgcaaacaagcuuaccauggaacuacucaucuuaaaagcaaacgcaauaacaacuauucuaaccgcaguaacauuuuguuucgcaucaggacaaaacauaaccgaagaauuuuaccaaucaacauguuccgcaguuucaaaaggauacuuaggcgcacuaagaacaggcugguacaccuccgugauaacaauagaauuaucaaacauaaaagaaaacaaauguaauggaacugacgccaaaguaaaacuaauaaaacaagaacuagacaaauauaaaaacgcaguaacugaacuacaauuacuaaugcaauccaccccagcaacaggcucaggcucagcaauuugcuccggagucgcugucugcaaaguacuacaucuugaaggcgaagucaauaaaauaaaaucagcacuucuaucaacaaacaaagcaguagucucacuaucaaacggaguaucaguacuaacauuuaaaguauuagaucuaaaaaacuauauagauaaacaacuacuacccauacucaauaaacaauccuguucaauaccaaauauagaaaccguaauagaauuucaacaaaaaaacaaucgacuauuagaaaucacccgagaauuuucagucaaugcaggcguaacaacaccaguaucaaccuacauguuaaccaacuccgaacuacuaucccucauaaacgacaugccaauaacaaacgaucaaaaaaaacuaauguccaacaacguacaaauagucagacaacaaucuuauucaauaaugugcaucauaaaagaagaaguucuagccuacguaguucaacuuccauuauacggcguaauugauacaccaugcuggaaacuacacacauccccacuauguacaacaaacacaaaagaaggaucaaacaucugcuuaacuagaacagacagaggaugguacugcgacaacgcaggaucagucucauucuuuccacaagcagaaacaugcaagguccaaucaaacagaguauucugcgacacaaugaacuccuuaacacuaccaucugaaguaaaccuauguaauguagacauauuuaacccaaaauacgacugcaaaauaaugaccucaaaaacagacguauccucaucaguaauuacaagccucggagccauaguaucaugcuacggaaaaacaaaauguacagcaucaaacaaaaacagaggaauaauaaaaacguucuccaacggaugcgacuauguaucaaacaaaggcguagacacaguaucagucggaaauacccuuuacugcguaaacaaacaagaaggccaaagucuauacguaaaaggagagccaauaauaaacuuuuaugacccccuuguauucccaucugacgaauuugaugcaucaauaucccaagucaacgaaaaaaucaaccaaucauuagccuuuauuagaaaaagugacgaacuauuacacaacguuaaugcagggaaaucaacaacaaauauaaugauuacaaccauaauuauaguuaucauaguuauacuacucucacuaaucgcaguaggauuacuauuauacugcaaagcaagauaaggacuagucccuguucccagagcccacuuuuuuuucuuuuuuugaaauaaaauagccugucuuucagaucuaaaaaaaaaaaaaaaaaaaaaaaaaaaaaaaaaaaaaaaaaaaaaaaaaaaaaaaaaaaaaaaaugcaucccccccccccccccccccccccccccccccaaaggcucuuuucagagccaccagaauu

SEQ ID NO: 2029 - RNA, 1840 nt, Artificial Sequence
  mRNA product Design a-2 comprising derived and/or modified sequence from HRSV(A2)__F-del_DSCav1_mut1 (opt11)
gggagaguccgcucagccagguugcagaagcggcuuagcguguguccuaaucuucucucugcguguagguaggccugugccgcaaacaagcuuaccauggaacuacucauccuaaaagccaacgcaaucacaaccauacuuacagcuguuaccuucugcuucgcauccggccaaaauaucaccgaagaguucuaccaaucaaccugcuccgccgucagcaaaggauaccucggcgcccuccgaaccggaugguacacuucugucaucacaaucgaacucuccaacaucaaagaaaacaaaugcaacgguaccgacgcgaaagucaaacucaucaaacaagaacuagacaaguacaaaaacgccgucaccgaacugcaacuccucaugcaauccacaccagcaacgggaucaggauccgccaucugcucaggcgucgccgucugcaaaguccugcaccuagaaggagaaguaaacaaaauuaaauccgcccuacucuccaccaacaaagcagucgucucacuauccaacggcgucuccguccucaccuuuaagguccucgaccucaaaaauuauauagacaaacaacuccuccccauccuaaacaaacaaucaugcuccauccccaacauagaaaccgucaucgaauuucaacagaaaaacaaccgacucuuagaaauuacccgcgaguucagcgucaacgccggagucaccacacccgucucaaccuacaugcucaccaacucagaacuccucucacuaaucaaugauaugcccaucacaaacgaccaaaagaaacucauguccaacaacguacaaaucguucgccaacaaagcuacuccaucauguguaucauuaaagaagaaguccucgccuacgucguccaacuuccgcucuacggcguaaucgacacccccugcuggaaacuucacaccucgccccucugcaccacaaacaccaaagaaggcuccaacaucugccuaacccgcaccgaccgcggcugguacugcgacaacgccggcuccgucucauuuuucccccaggcggagaccugcaaaguccaauccaaccgcgucuucugcgacaccaugaacucucuuacccucccaucagaaguaaaccucugcaacgucgacaucuuuaaccccaaauacgauugcaagauaaugaccuccaaaacagacgucucaucguccgucaucaccucccuaggagcuaucgucuccugcuacggcaagaccaaaugcaccgcuuccaacaaaaaccgcggcaucaucaaaaccuucuccaacgggugcgacuacgucucuaacaaaggcguggacacaguauccguaggaaacacacuguacugcguaaacaaacaagagggccaaucgcuuuacgucaaaggcgagccaauuaucaacuucuacgacccgcucgucuucccaucagacgaguucgacgcauccaucucccaagucaacgagaaaaucaaucagucccucgccuucauacgcaaauccgacgaacuccuacauaacguaaacgccggcaaaucuaccacaaacaucaugaucacaaccaucaucaucguaaucaucgucauccuucucucgcucaucgccguaggacugcuacuuuacugcaaggcccgcuaaggacuagucccuguucccagagcccacuuuuuuuucuuuuuuugaaauaaaauagccugucuuucagaucuaaaaaaaaaaaaaaaaaaaaaaaaaaaaaaaaaaaaaaaaaaaaaaaaaaaaaaaaaaaaaaaaugcaucccccccccccccccccccccccccccccccaaaggcucuuuucagagccaccagaauu

SEQ ID NO: 2030 - RNA, 1918 nt, Artificial Sequence
  mRNA product Design a-3 comprising derived and/or modified sequence from HRSV(A2)__F-del_DSCav1_mut1 (opt1)
gggagagggcgcuuggcuugcaaggacccugagcugcggcauugaagcacacccaacccaacucgacugaagucagccucacugaaccggaucugagaaucuucucucucugggcuugccagggcucuccgaaccuagcuagcauccucuucaauuccaacuagaaagcuuaccauggagcugcucauccugaaggccaacgccaucaccaccauccugacggcggugaccuucugcuucgccagcggccagaacaucaccgaggaguucuaccaguccacgugcagcgccgucuccaagggguaccucggcgcccugcggaccggcugguacaccuccgugaucaccaucgagcugagcaacaucaaggagaacaagugcaacgggaccgacgccaaggugaagcucaucaagcaggagcuggacaaguacaagaacgcggucacggagcugcagcuccugaugcaguccaccccggcaaccggcuccggcuccgccaucugcagcggcgucgccgugugcaaggugcugcaccucgagggggaggucaacaagaucaagagcgcccugcuguccaccaacaaggccguggugagccucuccaacggcgucagcgugcugaccuucaaggugcuggaccucaagaacuacaucgacaagcagcugcugcccauccugaacaagcagagcugcuccauccccaacaucgagacggugaucgaguuccagcagaagaacaaccggcuccuggagaucacccgcgaguucagcgugaacgccggggucaccacccccguguccacguacaugcugaccaacagcgagcuccugucccugaucaacgacaugccgaucaccaacgaccagaagaagcucaugagcaacaacgugcagaucguccggcagcaguccuacagcaucaugugcaucaucaaggaggaggugcuggcguacgugguccagcugccccucuacggcgugaucgacacccccugcuggaagcugcacacgagcccccugugcaccaccaacaccaaggagggguccaacaucugccucacgcgcaccgaccggggcugguacugcgacaacgccggcagcgucuccuucuucccgcaggccgagaccugcaaggugcagagcaaccgcguguucugcgacaccaugaacucccugacgcugcccagcgagguaaaccucugcaacgucgacaucuucaaccccaaguacgacugcaagaucaugaccuccaagaccgacgugagcuccagcgugaucaccucccugggggccaucgucagcugcuacggcaagacgaagugcaccgccagcaacaagaaccgggggaucaucaagaccuucuccaacggcugcgacuacgugagcaacaagggcguggacaccguguccgucgggaacacccuguacugcgugaacaagcaggagggccagagccucuacgugaagggggagcccaucaucaacuucuacgacccgcuggucuuccccuccgacgaguucgacgcgagcaucucccaggugaacgagaagaucaaccagagccuggccuucauccgcaaguccgacgagcugcuccacaacgugaacgccggcaagagcacgaccaacaucaugaucaccaccaucaucaucgucaucaucgugauccugcugucccucaucgccguggggcugcugcucuacugcaaggcccggugaggacuagucccuguucccagagcccacuuuuuuuucuuuuuuugaaauaaaauagccugucuuucagaucuaaaaaaaaaaaaaaaaaaaaaaaaaaaaaaaaaaaaaaaaaaaaaaaaaaaaaaaaaaaaaaaaugcaucccccccccccccccccccccccccccccccaaaggcucuuuucagagccaccagaauu

SEQ ID NO: 2031 - RNA, 1918 nt, Artificial Sequence
  mRNA product Design a-3 comprising derived and/or modified sequence from HRSV(A2)__F-del_DSCav1_mut1 (opt1)
gggagagggcgcuuggcuugcaaggacccugagcugcggcauugaagcacacccaacccaacucgacugaagucagccucacugaaccggaucugagaaucuucucucucugggcuugccagggcucuccgaaccuagcuagcauccucuucaauuccaacuagaaagcuuaccauggagcugcucauccugaaggccaacgccaucaccaccauccugacggcggugaccuucugcuucgccagcggccagaacaucaccgaggaguucuaccaguccacgugcagcgccgucuccaagggguaccucggcgcccugcgcaccgggugguacaccagcgugaucaccaucgagcuguccaacaucaaggagaacaagugcaacggcaccgacgccaaggugaagcucaucaagcaggagcuggacaaguacaagaacgcggucacggagcugcagcuccugaugcagagcacccccgccaccggguccggcagcgccaucugcuccggcguggccgugugcaagguccugcaccucgagggggaggugaacaagaucaagagcgcgcugcuguccaccaacaaggccguggucagccucuccaacggcgugagcgugcugacguucaagguccuggaccucaagaacuacaucgacaagcagcugcugccgauccucaacaagcaguccugcagcauccccaacaucgagaccgugaucgaguuccagcagaagaacaaccggcugcuggagaucacccgcgaguucuccgugaacgccggggucaccacgcccgugagcaccuacaugcucaccaacuccgagcugcugagccucaucaacgacaugcccaucaccaacgaccagaagaagcugaugagcaacaacgugcagaucguccggcagcaguccuacagcaucaugugcaucaucaaggaggaggugcuggccuacgugguccagcucccgcuguacggcgugaucgacacgcccugcuggaagcugcacaccagcccccucugcaccaccaacacgaaggagggguccaacaucugccugacccgcaccgaccggggcugguacugcgacaacgccggcuccgugagcuucuucccccaggcggagaccugcaagguccaguccaaccgcguguucugcgacacgaugaacagccugacccucccguccgaggucaaccugugcaacguggacaucuucaaccccaaguacgacugcaagaucaugaccagcaagaccgacguguccagcuccgucaucacgagccugggggccaucguguccugcuacggcaagaccaagugcaccgccagcaacaagaaccgggggaucaucaagaccuucuccaacggcugcgacuacgugagcaacaagggcgucgacacgguguccguggggaacacccucuacugcgucaacaagcaggagggccagagccuguacgugaagggggagcccaucaucaacuucuacgacccccugguguucccgagcgacgaguucgacgccuccaucagccaggucaacgagaagaucaaccagucccucgccuucauccgcaagagcgacgagcugcugcacaacgugaacgcgggcaaguccaccaccaacaucaugaucaccacgaucaucaucgugaucaucgucauccuccugagccugaucgccguggggcuccugcuguacugcaaggcccggugaggacuagucccuguucccagagcccacuuuuuuuucuuuuuuugaaauaaaauagccugucuuucagaucuaaaaaaaaaaaaaaaaaaaaaaaaaaaaaaaaaaaaaaaaaaaaaaaaaaaaaaaaaaaaaaaaugcaucccccccccccccccccccccccccccccccaaaggcucuuuucagagccaccagaauu

SEQ ID NO: 2032 - RNA, 1918 nt, Artificial Sequence
  mRNA product Design a-3 comprising derived and/or modified sequence from HRSV(A2)__F-del_DSCav1_mut1 (opt2)
gggagagggcgcuuggcuugcaaggacccugagcugcggcauugaagcacacccaacccaacucgacugaagucagccucacugaaccggaucugagaaucuucucucucugggcuugccagggcucuccgaaccuagcuagcauccucuucaauuccaacuagaaagcuuaccauggagcuccucauccucaaggccaacgccaucaccaccauccucaccgccgucaccuucugcuucgccuccggccagaacaucaccgaggaguucuaccaguccaccugcuccgccgucuccaagggcuaccucggcgcccuccgcaccggcugguacaccuccgucaucaccaucgagcucuccaacaucaaggagaacaagugcaacggcaccgacgccaaggucaagcucaucaagcaggagcucgacaaguacaagaacgccgucaccgagcuccagcuccucaugcaguccacccccgccaccggcuccggcuccgccaucugcuccggcgucgccgucugcaagguccuccaccucgagggcgaggucaacaagaucaaguccgcccuccucuccaccaacaaggccgucgucucccucuccaacggcgucuccguccucaccuucaagguccucgaccucaagaacuacaucgacaagcagcuccuccccauccucaacaagcaguccugcuccauccccaacaucgagaccgucaucgaguuccagcagaagaacaaccgccuccucgagaucacccgcgaguucuccgucaacgccggcgucaccacccccgucuccaccuacaugcucaccaacuccgagcuccucucccucaucaacgacaugcccaucaccaacgaccagaagaagcucauguccaacaacguccagaucguccgccagcaguccuacuccaucaugugcaucaucaaggaggagguccucgccuacgucguccagcucccccucuacggcgucaucgacacccccugcuggaagcuccacaccuccccccucugcaccaccaacaccaaggagggcuccaacaucugccucacccgcaccgaccgcggcugguacugcgacaacgccggcuccgucuccuucuucccccaggccgagaccugcaagguccaguccaaccgcgucuucugcgacaccaugaacucccucacccuccccuccgaggucaaccucugcaacgucgacaucuucaaccccaaguacgacugcaagaucaugaccuccaagaccgacgucuccuccuccgucaucaccucccucggcgccaucgucuccugcuacggcaagaccaagugcaccgccuccaacaagaaccgcggcaucaucaagaccuucuccaacggcugcgacuacgucuccaacaagggcgucgacaccgucuccgucggcaacacccucuacugcgucaacaagcaggagggccagucccucuacgucaagggcgagcccaucaucaacuucuacgacccccucgucuuccccuccgacgaguucgacgccuccaucucccaggucaacgagaagaucaaccagucccucgccuucauccgcaaguccgacgagcuccuccacaacgucaacgccggcaaguccaccaccaacaucaugaucaccaccaucaucaucgucaucaucgucauccuccucucccucaucgccgucggccuccuccucuacugcaaggcccgcugaggacuagucccuguucccagagcccacuuuuuuuucuuuuuuugaaauaaaauagccugucuuucagaucuaaaaaaaaaaaaaaaaaaaaaaaaaaaaaaaaaaaaaaaaaaaaaaaaaaaaaaaaaaaaaaaaugcaucccccccccccccccccccccccccccccccaaaggcucuuuucagagccaccagaauu

SEQ ID NO: 2033 - RNA, 1918 nt, Artificial Sequence
  mRNA product Design a-3 comprising derived and/or modified sequence from HRSV(A2)__F-del_DSCav1_mut1 (opt3)
gggagagggcgcuuggcuugcaaggacccugagcugcggcauugaagcacacccaacccaacucgacugaagucagccucacugaaccggaucugagaaucuucucucucugggcuugccagggcucuccgaaccuagcuagcauccucuucaauuccaacuagaaagcuuaccauggagcugcucauccuuaaggccaacgcuauuaccacaauacugacugcagugacguucugcuuugccagcggccagaauaucaccgaagaguucuaccaauccacauguucugcggucucaaaaggguauuugggagcuuuaagaacugguugguacaccaguguuauuacaaucgaacugagcaacauuaaggagaauaaaugcaacggcaccgacgccaaggugaaacuaaucaagcaggaacucgauaaguauaaaaaugcaguaacugagcugcagcuucugaugcaguccacacccgccaccgggucuggaucggcuauauguucaggcguggcagucugcaagguguugcaccucgagggugaaguuaacaaaaucaagagcgcccugcugaguacgaauaaagcuguggucucccucucuaacggggugagcguauuaacuuuuaagguucuggaccuuaagaauuacauugauaaacaauugcugccuauccuaaacaagcaguccuguucaauuccaaauaucgagaccgugauagaguuccagcagaaaaacaauaggcuccuggaaauuacacgggaguuuagugucaacgccggagugacuaccccggugagcacauauaugcuuaccaauucugaacuguugucccucaucaacgacaugcccauuacgaacgaucaaaagaaacugaugucaaauaacguccagaucguucgccagcagagcuacaguaucaugugcauuauaaaggaggaaguguuagcguauguagugcaacugccucucuacggcgucaucgacacuccauguuggaaacuucauacaucuccccugugcaccacuaauacaaaggagggcuccaacauuuguuugacccgaacggaucgugggugguacugcgacaaugcaggaagcgugucguucuuuccucaggccgaaaccuguaagguucagucuaacagaguguucugcgauacaaugaacucccuaacucugccaucagaggucaaucucugcaauguggacaucuuuaaccccaaauaugauuguaagauaaugaccaguaaaacagacguaagcuccucuguuauuacuagccugggugcuaucgugucaugcuacggcaagaccaaauguacagccaguaauaagaacagggggaucauuaagaccuucuccaauggaugcgauuaugucagcaacaaaggcguggacacugucucuguggguaauacgcuuuacuguguuaacaagcaagaggggcagucacuguaugugaaaggagaaccuaucauuaacuuuuacgacccauugguauucccgagugaugaguuugacgcaagcauaucccaggucaaugaaaagaucaaccagucucucgcuuucauucggaaaucggaugagcuguuacacaaugugaacgccggcaagagcacaaccaauaucaugaucacuaccauuauaaucguuauuaucgugauucugcuaucccucaucgcggucggccugcuuuuguauugcaaggcccgcugaggacuagucccuguucccagagcccacuuuuuuuucuuuuuuugaaauaaaauagccugucuuucagaucuaaaaaaaaaaaaaaaaaaaaaaaaaaaaaaaaaaaaaaaaaaaaaaaaaaaaaaaaaaaaaaaaugcaucccccccccccccccccccccccccccccccaaaggcucuuuucagagccaccagaauu

SEQ ID NO: 2034 - RNA, 1918 nt, Artificial Sequence
  mRNA product Design a-3 comprising derived and/or modified sequence from HRSV(A2)__F-del_DSCav1_mut1 (opt4)
gggagagggcgcuuggcuugcaaggacccugagcugcggcauugaagcacacccaacccaacucgacugaagucagccucacugaaccggaucugagaaucuucucucucugggcuugccagggcucuccgaaccuagcuagcauccucuucaauuccaacuagaaagcuuaccauggagcugcugauccugaaggccaacgccaucaccaccauccugaccgccgugaccuucugcuucgccagcggccagaacaucaccgaggaguucuaccagagcaccugcagcgccgugagcaagggcuaccugggcgcccugagaaccggcugguacaccagcgugaucaccaucgagcugagcaacaucaaggagaacaagugcaacggcaccgacgccaaggugaagcugaucaagcaggagcuggacaaguacaagaacgccgugaccgagcugcagcugcugaugcagagcacccccgccaccggcagcggcagcgccaucugcagcggcguggccgugugcaaggugcugcaccuggagggcgaggugaacaagaucaagagcgcccugcugagcaccaacaaggccguggugagccugagcaacggcgugagcgugcugaccuucaaggugcuggaccugaagaacuacaucgacaagcagcugcugcccauccugaacaagcagagcugcagcauccccaacaucgagaccgugaucgaguuccagcagaagaacaacagacugcuggagaucaccagagaguucagcgugaacgccggcgugaccacccccgugagcaccuacaugcugaccaacagcgagcugcugagccugaucaacgacaugcccaucaccaacgaccagaagaagcugaugagcaacaacgugcagaucgugagacagcagagcuacagcaucaugugcaucaucaaggaggaggugcuggccuacguggugcagcugccccuguacggcgugaucgacacccccugcuggaagcugcacaccagcccccugugcaccaccaacaccaaggagggcagcaacaucugccugaccagaaccgacagaggcugguacugcgacaacgccggcagcgugagcuucuucccccaggccgagaccugcaaggugcagagcaacagaguguucugcgacaccaugaacagccugacccugcccagcgaggugaaccugugcaacguggacaucuucaaccccaaguacgacugcaagaucaugaccagcaagaccgacgugagcagcagcgugaucaccagccugggcgccaucgugagcugcuacggcaagaccaagugcaccgccagcaacaagaacagaggcaucaucaagaccuucagcaacggcugcgacuacgugagcaacaagggcguggacaccgugagcgugggcaacacccuguacugcgugaacaagcaggagggccagagccuguacgugaagggcgagcccaucaucaacuucuacgacccccugguguuccccagcgacgaguucgacgccagcaucagccaggugaacgagaagaucaaccagagccuggccuucaucagaaagagcgacgagcugcugcacaacgugaacgccggcaagagcaccaccaacaucaugaucaccaccaucaucaucgugaucaucgugauccugcugagccugaucgccgugggccugcugcuguacugcaaggccagaugaggacuagucccuguucccagagcccacuuuuuuuucuuuuuuugaaauaaaauagccugucuuucagaucuaaaaaaaaaaaaaaaaaaaaaaaaaaaaaaaaaaaaaaaaaaaaaaaaaaaaaaaaaaaaaaaaugcaucccccccccccccccccccccccccccccccaaaggcucuuuucagagccaccagaauu

SEQ ID NO: 2035 - RNA, 1918 nt, Artificial Sequence
  mRNA product Design a-3 comprising derived and/or modified sequence from HRSV(A2)__F-del_DSCav1_mut1 (opt5)
gggagagggcgcuuggcuugcaaggacccugagcugcggcauugaagcacacccaacccaacucgacugaagucagccucacugaaccggaucugagaaucuucucucucugggcuugccagggcucuccgaaccuagcuagcauccucuucaauuccaacuagaaagcuuaccauggagcugcucauccugaaggccaacgcuauuaccacaauccuuacggccgugaccuucugcuuugcgagcggccagaauauuacagaagaguucuaccaauccaccuguucugcugucagcaaaggguaucugggagcccucagaacaggcugguacaccuccguuaucacaauugaacugucuaacaucaaggagaauaaaugcaacgggaccgacgccaaggugaaacuuaucaagcaggaacuggauaaguauaaaaaugcugugacggagcuccagcugcugaugcagagcacccccgccacaggauccggcucugcuauuuguagcggggucgccgugugcaagguucuccaccuggagggagaagugaacaaaaucaaguccgcgcuucugagcaccaauaaagccgucgugucucucuccaacggcguuagcgugcugacauuuaagguccuugaccugaagaauuacauugauaaacaacuccugccuauccugaacaagcagucuuguuccauuccgaauaucgagaccgugauugaguuccagcagaaaaacaaucggcuccuggaaaucacgcgcgaguuuagcgugaacgcuggcgucacaacccccguuucuacauauaugcuuaccaauuccgaacugcucagccugaucaacgacaugccuauuaccaacgaucaaaagaaacuuauguccaauaacgugcagaucgugagacagcagucuuacagcauuaugugcaucauuaaggaggaaguccuggccuaugugguucaacucccccuguacggggugaucgacacaccuuguuggaaacugcauacgagcccccucugcaccacaaauaccaaggagggauccaacaucugucugacacggaccgaucgcggcugguacugcgacaaugcugggucugucuccuucuuuccucaggccgaaacguguaaggugcagagcaacagaguuuucugcgauacaaugaacucucuuacccugccgagcgaggugaaucucugcaaugucgacauuuuuaaccccaaauaugauuguaagaucaugaccuccaaaacagacgugucuagcuccgucauuaccagccugggagcgaucgugucuugcuacggcaagacaaaauguacggccuccaauaagaaccgggggauuaucaagaccuucagcaauggaugcgauuauguuucuaacaaaggcguggacacagucuccgugggcaauacccuuuacuguguuaacaagcaagaggggcagagccuguaugugaaaggagaaccuaucauuaacuuuuacgacccccucgucuucccuuccgaugaguuugacgcuucuaucagccaggugaaugaaaagauuaaccagucccuggccuucauccgcaaaucugaugagcugcuccacaaugugaacgcuggcaagagcacaaccaauauuaugaucacgaccauuaucaucguuauuaucgucauucugcuuucccugaucgccguggggcuccugcuguauugcaaggccagaugaggacuagucccuguucccagagcccacuuuuuuuucuuuuuuugaaauaaaauagccugucuuucagaucuaaaaaaaaaaaaaaaaaaaaaaaaaaaaaaaaaaaaaaaaaaaaaaaaaaaaaaaaaaaaaaaaugcaucccccccccccccccccccccccccccccccaaaggcucuuuucagagccaccagaauu

SEQ ID NO: 2036 - RNA, 1918 nt, Artificial Sequence
  mRNA product Design a-3 comprising derived and/or modified sequence from HRSV(A2)__F-del_DSCav1_mut1 (opt6)
gggagagggcgcuuggcuugcaaggacccugagcugcggcauugaagcacacccaacccaacucgacugaagucagccucacugaaccggaucugagaaucuucucucucugggcuugccagggcucuccgaaccuagcuagcauccucuucaauuccaacuagaaagcuuaccauggaacuacucaucuuaaaagcaaacgcaauaacaacuauucuaaccgcaguaacauuuuguuucgcaucaggacaaaacauaaccgaagaauuuuaccaaucaacauguuccgcaguuucaaaaggauacuuaggcgcacuaagaacaggcugguacaccuccgugauaacaauagaauuaucaaacauaaaagaaaacaaauguaauggaacugacgccaaaguaaaacuaauaaaacaagaacuagacaaauauaaaaacgcaguaacugaacuacaauuacuaaugcaauccaccccagcaacaggcucaggcucagcaauuugcuccggagucgcugucugcaaaguacuacaucuugaaggcgaagucaauaaaauaaaaucagcacuucuaucaacaaacaaagcaguagucucacuaucaaacggaguaucaguacuaacauuuaaaguauuagaucuaaaaaacuauauagauaaacaacuacuacccauacucaauaaacaauccuguucaauaccaaauauagaaaccguaauagaauuucaacaaaaaaacaaucgacuauuagaaaucacccgagaauuuucagucaaugcaggcguaacaacaccaguaucaaccuacauguuaaccaacuccgaacuacuaucccucauaaacgacaugccaauaacaaacgaucaaaaaaaacuaauguccaacaacguacaaauagucagacaacaaucuuauucaauaaugugcaucauaaaagaagaaguucuagccuacguaguucaacuuccauuauacggcguaauugauacaccaugcuggaaacuacacacauccccacuauguacaacaaacacaaaagaaggaucaaacaucugcuuaacuagaacagacagaggaugguacugcgacaacgcaggaucagucucauucuuuccacaagcagaaacaugcaagguccaaucaaacagaguauucugcgacacaaugaacuccuuaacacuaccaucugaaguaaaccuauguaauguagacauauuuaacccaaaauacgacugcaaaauaaugaccucaaaaacagacguauccucaucaguaauuacaagccucggagccauaguaucaugcuacggaaaaacaaaauguacagcaucaaacaaaaacagaggaauaauaaaaacguucuccaacggaugcgacuauguaucaaacaaaggcguagacacaguaucagucggaaauacccuuuacugcguaaacaaacaagaaggccaaagucuauacguaaaaggagagccaauaauaaacuuuuaugacccccuuguauucccaucugacgaauuugaugcaucaauaucccaagucaacgaaaaaaucaaccaaucauuagccuuuauuagaaaaagugacgaacuauuacacaacguuaaugcagggaaaucaacaacaaauauaaugauuacaaccauaauuauaguuaucauaguuauacuacucucacuaaucgcaguaggauuacuauuauacugcaaagcaagauaaggacuagucccuguucccagagcccacuuuuuuuucuuuuuuugaaauaaaauagccugucuuucagaucuaaaaaaaaaaaaaaaaaaaaaaaaaaaaaaaaaaaaaaaaaaaaaaaaaaaaaaaaaaaaaaaaugcaucccccccccccccccccccccccccccccccaaaggcucuuuucagagccaccagaauu

SEQ ID NO: 2037 - RNA, 1918 nt, Artificial Sequence
  mRNA product Design a-3 comprising derived and/or modified sequence from HRSV(A2)__F-del_DSCav1_mut1 (opt11)
gggagagggcgcuuggcuugcaaggacccugagcugcggcauugaagcacacccaacccaacucgacugaagucagccucacugaaccggaucugagaaucuucucucucugggcuugccagggcucuccgaaccuagcuagcauccucuucaauuccaacuagaaagcuuaccauggaacuacucauccuaaaagccaacgcaaucacaaccauacuuacagcuguuaccuucugcuucgcauccggccaaaauaucaccgaagaguucuaccaaucaaccugcuccgccgucagcaaaggauaccucggcgcccuccgaaccggaugguacacuucugucaucacaaucgaacucuccaacaucaaagaaaacaaaugcaacgguaccgacgcgaaagucaaacucaucaaacaagaacuagacaaguacaaaaacgccgucaccgaacugcaacuccucaugcaauccacaccagcaacgggaucaggauccgccaucugcucaggcgucgccgucugcaaaguccugcaccuagaaggagaaguaaacaaaauuaaauccgcccuacucuccaccaacaaagcagucgucucacuauccaacggcgucuccguccucaccuuuaagguccucgaccucaaaaauuauauagacaaacaacuccuccccauccuaaacaaacaaucaugcuccauccccaacauagaaaccgucaucgaauuucaacagaaaaacaaccgacucuuagaaauuacccgcgaguucagcgucaacgccggagucaccacacccgucucaaccuacaugcucaccaacucagaacuccucucacuaaucaaugauaugcccaucacaaacgaccaaaagaaacucauguccaacaacguacaaaucguucgccaacaaagcuacuccaucauguguaucauuaaagaagaaguccucgccuacgucguccaacuuccgcucuacggcguaaucgacacccccugcuggaaacuucacaccucgccccucugcaccacaaacaccaaagaaggcuccaacaucugccuaacccgcaccgaccgcggcugguacugcgacaacgccggcuccgucucauuuuucccccaggcggagaccugcaaaguccaauccaaccgcgucuucugcgacaccaugaacucucuuacccucccaucagaaguaaaccucugcaacgucgacaucuuuaaccccaaauacgauugcaagauaaugaccuccaaaacagacgucucaucguccgucaucaccucccuaggagcuaucgucuccugcuacggcaagaccaaaugcaccgcuuccaacaaaaaccgcggcaucaucaaaaccuucuccaacgggugcgacuacgucucuaacaaaggcguggacacaguauccguaggaaacacacuguacugcguaaacaaacaagagggccaaucgcuuuacgucaaaggcgagccaauuaucaacuucuacgacccgcucgucuucccaucagacgaguucgacgcauccaucucccaagucaacgagaaaaucaaucagucccucgccuucauacgcaaauccgacgaacuccuacauaacguaaacgccggcaaaucuaccacaaacaucaugaucacaaccaucaucaucguaaucaucgucauccuucucucgcucaucgccguaggacugcuacuuuacugcaaggcccgcuaaggacuagucccuguucccagagcccacuuuuuuuucuuuuuuugaaauaaaauagccugucuuucagaucuaaaaaaaaaaaaaaaaaaaaaaaaaaaaaaaaaaaaaaaaaaaaaaaaaaaaaaaaaaaaaaaaugcaucccccccccccccccccccccccccccccccaaaggcucuuuucagagccaccagaauu

SEQ ID NO: 2038 - RNA, 1867 nt, Artificial Sequence
  mRNA product Design a-4 comprising derived and/or modified sequence from HRSV(A2)__F-del_DSCav1_mut1 (opt1)
gggagacuccugucgggcggaaguaggaggaguagaguuuaaaaacaguacucuuuuuccgguucgggacguaguugaagcaacgacaagccggauaaccgcucuugagacaggaagcuuaccauggagcugcucauccugaaggccaacgccaucaccaccauccugacggcggugaccuucugcuucgccagcggccagaacaucaccgaggaguucuaccaguccacgugcagcgccgucuccaagggguaccucggcgcccugcggaccggcugguacaccuccgugaucaccaucgagcugagcaacaucaaggagaacaagugcaacgggaccgacgccaaggugaagcucaucaagcaggagcuggacaaguacaagaacgcggucacggagcugcagcuccugaugcaguccaccccggcaaccggcuccggcuccgccaucugcagcggcgucgccgugugcaaggugcugcaccucgagggggaggucaacaagaucaagagcgcccugcuguccaccaacaaggccguggugagccucuccaacggcgucagcgugcugaccuucaaggugcuggaccucaagaacuacaucgacaagcagcugcugcccauccugaacaagcagagcugcuccauccccaacaucgagacggugaucgaguuccagcagaagaacaaccggcuccuggagaucacccgcgaguucagcgugaacgccggggucaccacccccguguccacguacaugcugaccaacagcgagcuccugucccugaucaacgacaugccgaucaccaacgaccagaagaagcucaugagcaacaacgugcagaucguccggcagcaguccuacagcaucaugugcaucaucaaggaggaggugcuggcguacgugguccagcugccccucuacggcgugaucgacacccccugcuggaagcugcacacgagcccccugugcaccaccaacaccaaggagggguccaacaucugccucacgcgcaccgaccggggcugguacugcgacaacgccggcagcgucuccuucuucccgcaggccgagaccugcaaggugcagagcaaccgcguguucugcgacaccaugaacucccugacgcugcccagcgagguaaaccucugcaacgucgacaucuucaaccccaaguacgacugcaagaucaugaccuccaagaccgacgugagcuccagcgugaucaccucccugggggccaucgucagcugcuacggcaagacgaagugcaccgccagcaacaagaaccgggggaucaucaagaccuucuccaacggcugcgacuacgugagcaacaagggcguggacaccguguccgucgggaacacccuguacugcgugaacaagcaggagggccagagccucuacgugaagggggagcccaucaucaacuucuacgacccgcuggucuuccccuccgacgaguucgacgcgagcaucucccaggugaacgagaagaucaaccagagccuggccuucauccgcaaguccgacgagcugcuccacaacgugaacgccggcaagagcacgaccaacaucaugaucaccaccaucaucaucgucaucaucgugauccugcugucccucaucgccguggggcugcugcucuacugcaaggcccggugaggacuagucccuguucccagagcccacuuuuuuuucuuuuuuugaaauaaaauagccugucuuucagaucuaaaaaaaaaaaaaaaaaaaaaaaaaaaaaaaaaaaaaaaaaaaaaaaaaaaaaaaaaaaaaaaaugcaucccccccccccccccccccccccccccccccaaaggcucuuuucagagccaccagaauu

SEQ ID NO: 2039 - RNA, 1867 nt, Artificial Sequence
  mRNA product Design a-4 comprising derived and/or modified sequence from HRSV(A2)__F-del_DSCav1_mut1 (opt1)
gggagacuccugucgggcggaaguaggaggaguagaguuuaaaaacaguacucuuuuuccgguucgggacguaguugaagcaacgacaagccggauaaccgcucuugagacaggaagcuuaccauggagcugcucauccugaaggccaacgccaucaccaccauccugacggcggugaccuucugcuucgccagcggccagaacaucaccgaggaguucuaccaguccacgugcagcgccgucuccaagggguaccucggcgcccugcgcaccgggugguacaccagcgugaucaccaucgagcuguccaacaucaaggagaacaagugcaacggcaccgacgccaaggugaagcucaucaagcaggagcuggacaaguacaagaacgcggucacggagcugcagcuccugaugcagagcacccccgccaccggguccggcagcgccaucugcuccggcguggccgugugcaagguccugcaccucgagggggaggugaacaagaucaagagcgcgcugcuguccaccaacaaggccguggucagccucuccaacggcgugagcgugcugacguucaagguccuggaccucaagaacuacaucgacaagcagcugcugccgauccucaacaagcaguccugcagcauccccaacaucgagaccgugaucgaguuccagcagaagaacaaccggcugcuggagaucacccgcgaguucuccgugaacgccggggucaccacgcccgugagcaccuacaugcucaccaacuccgagcugcugagccucaucaacgacaugcccaucaccaacgaccagaagaagcugaugagcaacaacgugcagaucguccggcagcaguccuacagcaucaugugcaucaucaaggaggaggugcuggccuacgugguccagcucccgcuguacggcgugaucgacacgcccugcuggaagcugcacaccagcccccucugcaccaccaacacgaaggagggguccaacaucugccugacccgcaccgaccggggcugguacugcgacaacgccggcuccgugagcuucuucccccaggcggagaccugcaagguccaguccaaccgcguguucugcgacacgaugaacagccugacccucccguccgaggucaaccugugcaacguggacaucuucaaccccaaguacgacugcaagaucaugaccagcaagaccgacguguccagcuccgucaucacgagccugggggccaucguguccugcuacggcaagaccaagugcaccgccagcaacaagaaccgggggaucaucaagaccuucuccaacggcugcgacuacgugagcaacaagggcgucgacacgguguccguggggaacacccucuacugcgucaacaagcaggagggccagagccuguacgugaagggggagcccaucaucaacuucuacgacccccugguguucccgagcgacgaguucgacgccuccaucagccaggucaacgagaagaucaaccagucccucgccuucauccgcaagagcgacgagcugcugcacaacgugaacgcgggcaaguccaccaccaacaucaugaucaccacgaucaucaucgugaucaucgucauccuccugagccugaucgccguggggcuccugcuguacugcaaggcccggugaggacuagucccuguucccagagcccacuuuuuuuucuuuuuuugaaauaaaauagccugucuuucagaucuaaaaaaaaaaaaaaaaaaaaaaaaaaaaaaaaaaaaaaaaaaaaaaaaaaaaaaaaaaaaaaaaugcaucccccccccccccccccccccccccccccccaaaggcucuuuucagagccaccagaauu

SEQ ID NO: 2040 - RNA, 1867 nt, Artificial Sequence
  mRNA product Design a-4 comprising derived and/or modified sequence from HRSV(A2)__F-del_DSCav1_mut1 (opt2)
gggagacuccugucgggcggaaguaggaggaguagaguuuaaaaacaguacucuuuuuccgguucgggacguaguugaagcaacgacaagccggauaaccgcucuugagacaggaagcuuaccauggagcuccucauccucaaggccaacgccaucaccaccauccucaccgccgucaccuucugcuucgccuccggccagaacaucaccgaggaguucuaccaguccaccugcuccgccgucuccaagggcuaccucggcgcccuccgcaccggcugguacaccuccgucaucaccaucgagcucuccaacaucaaggagaacaagugcaacggcaccgacgccaaggucaagcucaucaagcaggagcucgacaaguacaagaacgccgucaccgagcuccagcuccucaugcaguccacccccgccaccggcuccggcuccgccaucugcuccggcgucgccgucugcaagguccuccaccucgagggcgaggucaacaagaucaaguccgcccuccucuccaccaacaaggccgucgucucccucuccaacggcgucuccguccucaccuucaagguccucgaccucaagaacuacaucgacaagcagcuccuccccauccucaacaagcaguccugcuccauccccaacaucgagaccgucaucgaguuccagcagaagaacaaccgccuccucgagaucacccgcgaguucuccgucaacgccggcgucaccacccccgucuccaccuacaugcucaccaacuccgagcuccucucccucaucaacgacaugcccaucaccaacgaccagaagaagcucauguccaacaacguccagaucguccgccagcaguccuacuccaucaugugcaucaucaaggaggagguccucgccuacgucguccagcucccccucuacggcgucaucgacacccccugcuggaagcuccacaccuccccccucugcaccaccaacaccaaggagggcuccaacaucugccucacccgcaccgaccgcggcugguacugcgacaacgccggcuccgucuccuucuucccccaggccgagaccugcaagguccaguccaaccgcgucuucugcgacaccaugaacucccucacccuccccuccgaggucaaccucugcaacgucgacaucuucaaccccaaguacgacugcaagaucaugaccuccaagaccgacgucuccuccuccgucaucaccucccucggcgccaucgucuccugcuacggcaagaccaagugcaccgccuccaacaagaaccgcggcaucaucaagaccuucuccaacggcugcgacuacgucuccaacaagggcgucgacaccgucuccgucggcaacacccucuacugcgucaacaagcaggagggccagucccucuacgucaagggcgagcccaucaucaacuucuacgacccccucgucuuccccuccgacgaguucgacgccuccaucucccaggucaacgagaagaucaaccagucccucgccuucauccgcaaguccgacgagcuccuccacaacgucaacgccggcaaguccaccaccaacaucaugaucaccaccaucaucaucgucaucaucgucauccuccucucccucaucgccgucggccuccuccucuacugcaaggcccgcugaggacuagucccuguucccagagcccacuuuuuuuucuuuuuuugaaauaaaauagccugucuuucagaucuaaaaaaaaaaaaaaaaaaaaaaaaaaaaaaaaaaaaaaaaaaaaaaaaaaaaaaaaaaaaaaaaugcaucccccccccccccccccccccccccccccccaaaggcucuuuucagagccaccagaauu

SEQ ID NO: 2041 - RNA, 1867 nt, Artificial Sequence
  mRNA product Design a-4 comprising derived and/or modified sequence from HRSV(A2)__F-del_DSCav1_mut1 (opt3)
gggagacuccugucgggcggaaguaggaggaguagaguuuaaaaacaguacucuuuuuccgguucgggacguaguugaagcaacgacaagccggauaaccgcucuugagacaggaagcuuaccauggagcugcucauccuuaaggccaacgcuauuaccacaauacugacugcagugacguucugcuuugccagcggccagaauaucaccgaagaguucuaccaauccacauguucugcggucucaaaaggguauuugggagcuuuaagaacugguugguacaccaguguuauuacaaucgaacugagcaacauuaaggagaauaaaugcaacggcaccgacgccaaggugaaacuaaucaagcaggaacucgauaaguauaaaaaugcaguaacugagcugcagcuucugaugcaguccacacccgccaccgggucuggaucggcuauauguucaggcguggcagucugcaagguguugcaccucgagggugaaguuaacaaaaucaagagcgcccugcugaguacgaauaaagcuguggucucccucucuaacggggugagcguauuaacuuuuaagguucuggaccuuaagaauuacauugauaaacaauugcugccuauccuaaacaagcaguccuguucaauuccaaauaucgagaccgugauagaguuccagcagaaaaacaauaggcuccuggaaauuacacgggaguuuagugucaacgccggagugacuaccccggugagcacauauaugcuuaccaauucugaacuguugucccucaucaacgacaugcccauuacgaacgaucaaaagaaacugaugucaaauaacguccagaucguucgccagcagagcuacaguaucaugugcauuauaaaggaggaaguguuagcguauguagugcaacugccucucuacggcgucaucgacacuccauguuggaaacuucauacaucuccccugugcaccacuaauacaaaggagggcuccaacauuuguuugacccgaacggaucgugggugguacugcgacaaugcaggaagcgugucguucuuuccucaggccgaaaccuguaagguucagucuaacagaguguucugcgauacaaugaacucccuaacucugccaucagaggucaaucucugcaauguggacaucuuuaaccccaaauaugauuguaagauaaugaccaguaaaacagacguaagcuccucuguuauuacuagccugggugcuaucgugucaugcuacggcaagaccaaauguacagccaguaauaagaacagggggaucauuaagaccuucuccaauggaugcgauuaugucagcaacaaaggcguggacacugucucuguggguaauacgcuuuacuguguuaacaagcaagaggggcagucacuguaugugaaaggagaaccuaucauuaacuuuuacgacccauugguauucccgagugaugaguuugacgcaagcauaucccaggucaaugaaaagaucaaccagucucucgcuuucauucggaaaucggaugagcuguuacacaaugugaacgccggcaagagcacaaccaauaucaugaucacuaccauuauaaucguuauuaucgugauucugcuaucccucaucgcggucggccugcuuuuguauugcaaggcccgcugaggacuagucccuguucccagagcccacuuuuuuuucuuuuuuugaaauaaaauagccugucuuucagaucuaaaaaaaaaaaaaaaaaaaaaaaaaaaaaaaaaaaaaaaaaaaaaaaaaaaaaaaaaaaaaaaaugcaucccccccccccccccccccccccccccccccaaaggcucuuuucagagccaccagaauu

SEQ ID NO: 2042 - RNA, 1867 nt, Artificial Sequence
  mRNA product Design a-4 comprising derived and/or modified sequence from HRSV(A2)__F-del_DSCav1_mut1 (opt4)
gggagacuccugucgggcggaaguaggaggaguagaguuuaaaaacaguacucuuuuuccgguucgggacguaguugaagcaacgacaagccggauaaccgcucuugagacaggaagcuuaccauggagcugcugauccugaaggccaacgccaucaccaccauccugaccgccgugaccuucugcuucgccagcggccagaacaucaccgaggaguucuaccagagcaccugcagcgccgugagcaagggcuaccugggcgcccugagaaccggcugguacaccagcgugaucaccaucgagcugagcaacaucaaggagaacaagugcaacggcaccgacgccaaggugaagcugaucaagcaggagcuggacaaguacaagaacgccgugaccgagcugcagcugcugaugcagagcacccccgccaccggcagcggcagcgccaucugcagcggcguggccgugugcaaggugcugcaccuggagggcgaggugaacaagaucaagagcgcccugcugagcaccaacaaggccguggugagccugagcaacggcgugagcgugcugaccuucaaggugcuggaccugaagaacuacaucgacaagcagcugcugcccauccugaacaagcagagcugcagcauccccaacaucgagaccgugaucgaguuccagcagaagaacaacagacugcuggagaucaccagagaguucagcgugaacgccggcgugaccacccccgugagcaccuacaugcugaccaacagcgagcugcugagccugaucaacgacaugcccaucaccaacgaccagaagaagcugaugagcaacaacgugcagaucgugagacagcagagcuacagcaucaugugcaucaucaaggaggaggugcuggccuacguggugcagcugccccuguacggcgugaucgacacccccugcuggaagcugcacaccagcccccugugcaccaccaacaccaaggagggcagcaacaucugccugaccagaaccgacagaggcugguacugcgacaacgccggcagcgugagcuucuucccccaggccgagaccugcaaggugcagagcaacagaguguucugcgacaccaugaacagccugacccugcccagcgaggugaaccugugcaacguggacaucuucaaccccaaguacgacugcaagaucaugaccagcaagaccgacgugagcagcagcgugaucaccagccugggcgccaucgugagcugcuacggcaagaccaagugcaccgccagcaacaagaacagaggcaucaucaagaccuucagcaacggcugcgacuacgugagcaacaagggcguggacaccgugagcgugggcaacacccuguacugcgugaacaagcaggagggccagagccuguacgugaagggcgagcccaucaucaacuucuacgacccccugguguuccccagcgacgaguucgacgccagcaucagccaggugaacgagaagaucaaccagagccuggccuucaucagaaagagcgacgagcugcugcacaacgugaacgccggcaagagcaccaccaacaucaugaucaccaccaucaucaucgugaucaucgugauccugcugagccugaucgccgugggccugcugcuguacugcaaggccagaugaggacuagucccuguucccagagcccacuuuuuuuucuuuuuuugaaauaaaauagccugucuuucagaucuaaaaaaaaaaaaaaaaaaaaaaaaaaaaaaaaaaaaaaaaaaaaaaaaaaaaaaaaaaaaaaaaugcaucccccccccccccccccccccccccccccccaaaggcucuuuucagagccaccagaauu

SEQ ID NO: 2043 - RNA, 1867 nt, Artificial Sequence
  mRNA product Design a-4 comprising derived and/or modified sequence from HRSV(A2)__F-del_DSCav1_mut1 (opt5)
gggagacuccugucgggcggaaguaggaggaguagaguuuaaaaacaguacucuuuuuccgguucgggacguaguugaagcaacgacaagccggauaaccgcucuugagacaggaagcuuaccauggagcugcucauccugaaggccaacgcuauuaccacaauccuuacggccgugaccuucugcuuugcgagcggccagaauauuacagaagaguucuaccaauccaccuguucugcugucagcaaaggguaucugggagcccucagaacaggcugguacaccuccguuaucacaauugaacugucuaacaucaaggagaauaaaugcaacgggaccgacgccaaggugaaacuuaucaagcaggaacuggauaaguauaaaaaugcugugacggagcuccagcugcugaugcagagcacccccgccacaggauccggcucugcuauuuguagcggggucgccgugugcaagguucuccaccuggagggagaagugaacaaaaucaaguccgcgcuucugagcaccaauaaagccgucgugucucucuccaacggcguuagcgugcugacauuuaagguccuugaccugaagaauuacauugauaaacaacuccugccuauccugaacaagcagucuuguuccauuccgaauaucgagaccgugauugaguuccagcagaaaaacaaucggcuccuggaaaucacgcgcgaguuuagcgugaacgcuggcgucacaacccccguuucuacauauaugcuuaccaauuccgaacugcucagccugaucaacgacaugccuauuaccaacgaucaaaagaaacuuauguccaauaacgugcagaucgugagacagcagucuuacagcauuaugugcaucauuaaggaggaaguccuggccuaugugguucaacucccccuguacggggugaucgacacaccuuguuggaaacugcauacgagcccccucugcaccacaaauaccaaggagggauccaacaucugucugacacggaccgaucgcggcugguacugcgacaaugcugggucugucuccuucuuuccucaggccgaaacguguaaggugcagagcaacagaguuuucugcgauacaaugaacucucuuacccugccgagcgaggugaaucucugcaaugucgacauuuuuaaccccaaauaugauuguaagaucaugaccuccaaaacagacgugucuagcuccgucauuaccagccugggagcgaucgugucuugcuacggcaagacaaaauguacggccuccaauaagaaccgggggauuaucaagaccuucagcaauggaugcgauuauguuucuaacaaaggcguggacacagucuccgugggcaauacccuuuacuguguuaacaagcaagaggggcagagccuguaugugaaaggagaaccuaucauuaacuuuuacgacccccucgucuucccuuccgaugaguuugacgcuucuaucagccaggugaaugaaaagauuaaccagucccuggccuucauccgcaaaucugaugagcugcuccacaaugugaacgcuggcaagagcacaaccaauauuaugaucacgaccauuaucaucguuauuaucgucauucugcuuucccugaucgccguggggcuccugcuguauugcaaggccagaugaggacuagucccuguucccagagcccacuuuuuuuucuuuuuuugaaauaaaauagccugucuuucagaucuaaaaaaaaaaaaaaaaaaaaaaaaaaaaaaaaaaaaaaaaaaaaaaaaaaaaaaaaaaaaaaaaugcaucccccccccccccccccccccccccccccccaaaggcucuuuucagagccaccagaauu

SEQ ID NO: 2044 - RNA, 1867 nt, Artificial Sequence
  mRNA product Design a-4 comprising derived and/or modified sequence from HRSV(A2)__F-del_DSCav1_mut1 (opt6)
gggagacuccugucgggcggaaguaggaggaguagaguuuaaaaacaguacucuuuuuccgguucgggacguaguugaagcaacgacaagccggauaaccgcucuugagacaggaagcuuaccauggaacuacucaucuuaaaagcaaacgcaauaacaacuauucuaaccgcaguaacauuuuguuucgcaucaggacaaaacauaaccgaagaauuuuaccaaucaacauguuccgcaguuucaaaaggauacuuaggcgcacuaagaacaggcugguacaccuccgugauaacaauagaauuaucaaacauaaaagaaaacaaauguaauggaacugacgccaaaguaaaacuaauaaaacaagaacuagacaaauauaaaaacgcaguaacugaacuacaauuacuaaugcaauccaccccagcaacaggcucaggcucagcaauuugcuccggagucgcugucugcaaaguacuacaucuugaaggcgaagucaauaaaauaaaaucagcacuucuaucaacaaacaaagcaguagucucacuaucaaacggaguaucaguacuaacauuuaaaguauuagaucuaaaaaacuauauagauaaacaacuacuacccauacucaauaaacaauccuguucaauaccaaauauagaaaccguaauagaauuucaacaaaaaaacaaucgacuauuagaaaucacccgagaauuuucagucaaugcaggcguaacaacaccaguaucaaccuacauguuaaccaacuccgaacuacuaucccucauaaacgacaugccaauaacaaacgaucaaaaaaaacuaauguccaacaacguacaaauagucagacaacaaucuuauucaauaaugugcaucauaaaagaagaaguucuagccuacguaguucaacuuccauuauacggcguaauugauacaccaugcuggaaacuacacacauccccacuauguacaacaaacacaaaagaaggaucaaacaucugcuuaacuagaacagacagaggaugguacugcgacaacgcaggaucagucucauucuuuccacaagcagaaacaugcaagguccaaucaaacagaguauucugcgacacaaugaacuccuuaacacuaccaucugaaguaaaccuauguaauguagacauauuuaacccaaaauacgacugcaaaauaaugaccucaaaaacagacguauccucaucaguaauuacaagccucggagccauaguaucaugcuacggaaaaacaaaauguacagcaucaaacaaaaacagaggaauaauaaaaacguucuccaacggaugcgacuauguaucaaacaaaggcguagacacaguaucagucggaaauacccuuuacugcguaaacaaacaagaaggccaaagucuauacguaaaaggagagccaauaauaaacuuuuaugacccccuuguauucccaucugacgaauuugaugcaucaauaucccaagucaacgaaaaaaucaaccaaucauuagccuuuauuagaaaaagugacgaacuauuacacaacguuaaugcagggaaaucaacaacaaauauaaugauuacaaccauaauuauaguuaucauaguuauacuacucucacuaaucgcaguaggauuacuauuauacugcaaagcaagauaaggacuagucccuguucccagagcccacuuuuuuuucuuuuuuugaaauaaaauagccugucuuucagaucuaaaaaaaaaaaaaaaaaaaaaaaaaaaaaaaaaaaaaaaaaaaaaaaaaaaaaaaaaaaaaaaaugcaucccccccccccccccccccccccccccccccaaaggcucuuuucagagccaccagaauu

SEQ ID NO: 2045 - RNA, 1867 nt, Artificial Sequence
  mRNA product Design a-4 comprising derived and/or modified sequence from HRSV(A2)__F-del_DSCav1_mut1 (opt11)
gggagacuccugucgggcggaaguaggaggaguagaguuuaaaaacaguacucuuuuuccgguucgggacguaguugaagcaacgacaagccggauaaccgcucuugagacaggaagcuuaccauggaacuacucauccuaaaagccaacgcaaucacaaccauacuuacagcuguuaccuucugcuucgcauccggccaaaauaucaccgaagaguucuaccaaucaaccugcuccgccgucagcaaaggauaccucggcgcccuccgaaccggaugguacacuucugucaucacaaucgaacucuccaacaucaaagaaaacaaaugcaacgguaccgacgcgaaagucaaacucaucaaacaagaacuagacaaguacaaaaacgccgucaccgaacugcaacuccucaugcaauccacaccagcaacgggaucaggauccgccaucugcucaggcgucgccgucugcaaaguccugcaccuagaaggagaaguaaacaaaauuaaauccgcccuacucuccaccaacaaagcagucgucucacuauccaacggcgucuccguccucaccuuuaagguccucgaccucaaaaauuauauagacaaacaacuccuccccauccuaaacaaacaaucaugcuccauccccaacauagaaaccgucaucgaauuucaacagaaaaacaaccgacucuuagaaauuacccgcgaguucagcgucaacgccggagucaccacacccgucucaaccuacaugcucaccaacucagaacuccucucacuaaucaaugauaugcccaucacaaacgaccaaaagaaacucauguccaacaacguacaaaucguucgccaacaaagcuacuccaucauguguaucauuaaagaagaaguccucgccuacgucguccaacuuccgcucuacggcguaaucgacacccccugcuggaaacuucacaccucgccccucugcaccacaaacaccaaagaaggcuccaacaucugccuaacccgcaccgaccgcggcugguacugcgacaacgccggcuccgucucauuuuucccccaggcggagaccugcaaaguccaauccaaccgcgucuucugcgacaccaugaacucucuuacccucccaucagaaguaaaccucugcaacgucgacaucuuuaaccccaaauacgauugcaagauaaugaccuccaaaacagacgucucaucguccgucaucaccucccuaggagcuaucgucuccugcuacggcaagaccaaaugcaccgcuuccaacaaaaaccgcggcaucaucaaaaccuucuccaacgggugcgacuacgucucuaacaaaggcguggacacaguauccguaggaaacacacuguacugcguaaacaaacaagagggccaaucgcuuuacgucaaaggcgagccaauuaucaacuucuacgacccgcucgucuucccaucagacgaguucgacgcauccaucucccaagucaacgagaaaaucaaucagucccucgccuucauacgcaaauccgacgaacuccuacauaacguaaacgccggcaaaucuaccacaaacaucaugaucacaaccaucaucaucguaaucaucgucauccuucucucgcucaucgccguaggacugcuacuuuacugcaaggcccgcuaaggacuagucccuguucccagagcccacuuuuuuuucuuuuuuugaaauaaaauagccugucuuucagaucuaaaaaaaaaaaaaaaaaaaaaaaaaaaaaaaaaaaaaaaaaaaaaaaaaaaaaaaaaaaaaaaaugcaucccccccccccccccccccccccccccccccaaaggcucuuuucagagccaccagaauu

SEQ ID NO: 2046 - RNA, 1813 nt, Artificial Sequence
  mRNA product Design a-5 comprising derived and/or modified sequence from HRSV(A2)__F-del_DSCav1_mut1 (opt1)
gggagacuuucccauucuguagcagaauuugguguugccuguggucuuggucccgcggagaagcuuaccauggagcugcucauccugaaggccaacgccaucaccaccauccugacggcggugaccuucugcuucgccagcggccagaacaucaccgaggaguucuaccaguccacgugcagcgccgucuccaagggguaccucggcgcccugcggaccggcugguacaccuccgugaucaccaucgagcugagcaacaucaaggagaacaagugcaacgggaccgacgccaaggugaagcucaucaagcaggagcuggacaaguacaagaacgcggucacggagcugcagcuccugaugcaguccaccccggcaaccggcuccggcuccgccaucugcagcggcgucgccgugugcaaggugcugcaccucgagggggaggucaacaagaucaagagcgcccugcuguccaccaacaaggccguggugagccucuccaacggcgucagcgugcugaccuucaaggugcuggaccucaagaacuacaucgacaagcagcugcugcccauccugaacaagcagagcugcuccauccccaacaucgagacggugaucgaguuccagcagaagaacaaccggcuccuggagaucacccgcgaguucagcgugaacgccggggucaccacccccguguccacguacaugcugaccaacagcgagcuccugucccugaucaacgacaugccgaucaccaacgaccagaagaagcucaugagcaacaacgugcagaucguccggcagcaguccuacagcaucaugugcaucaucaaggaggaggugcuggcguacgugguccagcugccccucuacggcgugaucgacacccccugcuggaagcugcacacgagcccccugugcaccaccaacaccaaggagggguccaacaucugccucacgcgcaccgaccggggcugguacugcgacaacgccggcagcgucuccuucuucccgcaggccgagaccugcaaggugcagagcaaccgcguguucugcgacaccaugaacucccugacgcugcccagcgagguaaaccucugcaacgucgacaucuucaaccccaaguacgacugcaagaucaugaccuccaagaccgacgugagcuccagcgugaucaccucccugggggccaucgucagcugcuacggcaagacgaagugcaccgccagcaacaagaaccgggggaucaucaagaccuucuccaacggcugcgacuacgugagcaacaagggcguggacaccguguccgucgggaacacccuguacugcgugaacaagcaggagggccagagccucuacgugaagggggagcccaucaucaacuucuacgacccgcuggucuuccccuccgacgaguucgacgcgagcaucucccaggugaacgagaagaucaaccagagccuggccuucauccgcaaguccgacgagcugcuccacaacgugaacgccggcaagagcacgaccaacaucaugaucaccaccaucaucaucgucaucaucgugauccugcugucccucaucgccguggggcugcugcucuacugcaaggcccggugaggacuagucccuguucccagagcccacuuuuuuuucuuuuuuugaaauaaaauagccugucuuucagaucuaaaaaaaaaaaaaaaaaaaaaaaaaaaaaaaaaaaaaaaaaaaaaaaaaaaaaaaaaaaaaaaaugcaucccccccccccccccccccccccccccccccaaaggcucuuuucagagccaccagaauu

SEQ ID NO: 2047 - RNA, 1813 nt, Artificial Sequence
  mRNA product Design a-5 comprising derived and/or modified sequence from HRSV(A2)__F-del_DSCav1_mut1 (opt1)
gggagacuuucccauucuguagcagaauuugguguugccuguggucuuggucccgcggagaagcuuaccauggagcugcucauccugaaggccaacgccaucaccaccauccugacggcggugaccuucugcuucgccagcggccagaacaucaccgaggaguucuaccaguccacgugcagcgccgucuccaagggguaccucggcgcccugcgcaccgggugguacaccagcgugaucaccaucgagcuguccaacaucaaggagaacaagugcaacggcaccgacgccaaggugaagcucaucaagcaggagcuggacaaguacaagaacgcggucacggagcugcagcuccugaugcagagcacccccgccaccggguccggcagcgccaucugcuccggcguggccgugugcaagguccugcaccucgagggggaggugaacaagaucaagagcgcgcugcuguccaccaacaaggccguggucagccucuccaacggcgugagcgugcugacguucaagguccuggaccucaagaacuacaucgacaagcagcugcugccgauccucaacaagcaguccugcagcauccccaacaucgagaccgugaucgaguuccagcagaagaacaaccggcugcuggagaucacccgcgaguucuccgugaacgccggggucaccacgcccgugagcaccuacaugcucaccaacuccgagcugcugagccucaucaacgacaugcccaucaccaacgaccagaagaagcugaugagcaacaacgugcagaucguccggcagcaguccuacagcaucaugugcaucaucaaggaggaggugcuggccuacgugguccagcucccgcuguacggcgugaucgacacgcccugcuggaagcugcacaccagcccccucugcaccaccaacacgaaggagggguccaacaucugccugacccgcaccgaccggggcugguacugcgacaacgccggcuccgugagcuucuucccccaggcggagaccugcaagguccaguccaaccgcguguucugcgacacgaugaacagccugacccucccguccgaggucaaccugugcaacguggacaucuucaaccccaaguacgacugcaagaucaugaccagcaagaccgacguguccagcuccgucaucacgagccugggggccaucguguccugcuacggcaagaccaagugcaccgccagcaacaagaaccgggggaucaucaagaccuucuccaacggcugcgacuacgugagcaacaagggcgucgacacgguguccguggggaacacccucuacugcgucaacaagcaggagggccagagccuguacgugaagggggagcccaucaucaacuucuacgacccccugguguucccgagcgacgaguucgacgccuccaucagccaggucaacgagaagaucaaccagucccucgccuucauccgcaagagcgacgagcugcugcacaacgugaacgcgggcaaguccaccaccaacaucaugaucaccacgaucaucaucgugaucaucgucauccuccugagccugaucgccguggggcuccugcuguacugcaaggcccggugaggacuagucccuguucccagagcccacuuuuuuuucuuuuuuugaaauaaaauagccugucuuucagaucuaaaaaaaaaaaaaaaaaaaaaaaaaaaaaaaaaaaaaaaaaaaaaaaaaaaaaaaaaaaaaaaaugcaucccccccccccccccccccccccccccccccaaaggcucuuuucagagccaccagaauu

SEQ ID NO: 2048 - RNA, 1813 nt, Artificial Sequence
  mRNA product Design a-5 comprising derived and/or modified sequence from HRSV(A2)__F-del_DSCav1_mut1 (opt2)
gggagacuuucccauucuguagcagaauuugguguugccuguggucuuggucccgcggagaagcuuaccauggagcuccucauccucaaggccaacgccaucaccaccauccucaccgccgucaccuucugcuucgccuccggccagaacaucaccgaggaguucuaccaguccaccugcuccgccgucuccaagggcuaccucggcgcccuccgcaccggcugguacaccuccgucaucaccaucgagcucuccaacaucaaggagaacaagugcaacggcaccgacgccaaggucaagcucaucaagcaggagcucgacaaguacaagaacgccgucaccgagcuccagcuccucaugcaguccacccccgccaccggcuccggcuccgccaucugcuccggcgucgccgucugcaagguccuccaccucgagggcgaggucaacaagaucaaguccgcccuccucuccaccaacaaggccgucgucucccucuccaacggcgucuccguccucaccuucaagguccucgaccucaagaacuacaucgacaagcagcuccuccccauccucaacaagcaguccugcuccauccccaacaucgagaccgucaucgaguuccagcagaagaacaaccgccuccucgagaucacccgcgaguucuccgucaacgccggcgucaccacccccgucuccaccuacaugcucaccaacuccgagcuccucucccucaucaacgacaugcccaucaccaacgaccagaagaagcucauguccaacaacguccagaucguccgccagcaguccuacuccaucaugugcaucaucaaggaggagguccucgccuacgucguccagcucccccucuacggcgucaucgacacccccugcuggaagcuccacaccuccccccucugcaccaccaacaccaaggagggcuccaacaucugccucacccgcaccgaccgcggcugguacugcgacaacgccggcuccgucuccuucuucccccaggccgagaccugcaagguccaguccaaccgcgucuucugcgacaccaugaacucccucacccuccccuccgaggucaaccucugcaacgucgacaucuucaaccccaaguacgacugcaagaucaugaccuccaagaccgacgucuccuccuccgucaucaccucccucggcgccaucgucuccugcuacggcaagaccaagugcaccgccuccaacaagaaccgcggcaucaucaagaccuucuccaacggcugcgacuacgucuccaacaagggcgucgacaccgucuccgucggcaacacccucuacugcgucaacaagcaggagggccagucccucuacgucaagggcgagcccaucaucaacuucuacgacccccucgucuuccccuccgacgaguucgacgccuccaucucccaggucaacgagaagaucaaccagucccucgccuucauccgcaaguccgacgagcuccuccacaacgucaacgccggcaaguccaccaccaacaucaugaucaccaccaucaucaucgucaucaucgucauccuccucucccucaucgccgucggccuccuccucuacugcaaggcccgcugaggacuagucccuguucccagagcccacuuuuuuuucuuuuuuugaaauaaaauagccugucuuucagaucuaaaaaaaaaaaaaaaaaaaaaaaaaaaaaaaaaaaaaaaaaaaaaaaaaaaaaaaaaaaaaaaaugcaucccccccccccccccccccccccccccccccaaaggcucuuuucagagccaccagaauu

SEQ ID NO: 2049 - RNA, 1813 nt, Artificial Sequence
  mRNA product Design a-5 comprising derived and/or modified sequence from HRSV(A2)__F-del_DSCav1_mut1 (opt3)
gggagacuuucccauucuguagcagaauuugguguugccuguggucuuggucccgcggagaagcuuaccauggagcugcucauccuuaaggccaacgcuauuaccacaauacugacugcagugacguucugcuuugccagcggccagaauaucaccgaagaguucuaccaauccacauguucugcggucucaaaaggguauuugggagcuuuaagaacugguugguacaccaguguuauuacaaucgaacugagcaacauuaaggagaauaaaugcaacggcaccgacgccaaggugaaacuaaucaagcaggaacucgauaaguauaaaaaugcaguaacugagcugcagcuucugaugcaguccacacccgccaccgggucuggaucggcuauauguucaggcguggcagucugcaagguguugcaccucgagggugaaguuaacaaaaucaagagcgcccugcugaguacgaauaaagcuguggucucccucucuaacggggugagcguauuaacuuuuaagguucuggaccuuaagaauuacauugauaaacaauugcugccuauccuaaacaagcaguccuguucaauuccaaauaucgagaccgugauagaguuccagcagaaaaacaauaggcuccuggaaauuacacgggaguuuagugucaacgccggagugacuaccccggugagcacauauaugcuuaccaauucugaacuguugucccucaucaacgacaugcccauuacgaacgaucaaaagaaacugaugucaaauaacguccagaucguucgccagcagagcuacaguaucaugugcauuauaaaggaggaaguguuagcguauguagugcaacugccucucuacggcgucaucgacacuccauguuggaaacuucauacaucuccccugugcaccacuaauacaaaggagggcuccaacauuuguuugacccgaacggaucgugggugguacugcgacaaugcaggaagcgugucguucuuuccucaggccgaaaccuguaagguucagucuaacagaguguucugcgauacaaugaacucccuaacucugccaucagaggucaaucucugcaauguggacaucuuuaaccccaaauaugauuguaagauaaugaccaguaaaacagacguaagcuccucuguuauuacuagccugggugcuaucgugucaugcuacggcaagaccaaauguacagccaguaauaagaacagggggaucauuaagaccuucuccaauggaugcgauuaugucagcaacaaaggcguggacacugucucuguggguaauacgcuuuacuguguuaacaagcaagaggggcagucacuguaugugaaaggagaaccuaucauuaacuuuuacgacccauugguauucccgagugaugaguuugacgcaagcauaucccaggucaaugaaaagaucaaccagucucucgcuuucauucggaaaucggaugagcuguuacacaaugugaacgccggcaagagcacaaccaauaucaugaucacuaccauuauaaucguuauuaucgugauucugcuaucccucaucgcggucggccugcuuuuguauugcaaggcccgcugaggacuagucccuguucccagagcccacuuuuuuuucuuuuuuugaaauaaaauagccugucuuucagaucuaaaaaaaaaaaaaaaaaaaaaaaaaaaaaaaaaaaaaaaaaaaaaaaaaaaaaaaaaaaaaaaaugcaucccccccccccccccccccccccccccccccaaaggcucuuuucagagccaccagaauu

SEQ ID NO: 2050 - RNA, 1813 nt, Artificial Sequence
  mRNA product Design a-5 comprising derived and/or modified sequence from HRSV(A2)__F-del_DSCav1_mut1 (opt4)
gggagacuuucccauucuguagcagaauuugguguugccuguggucuuggucccgcggagaagcuuaccauggagcugcugauccugaaggccaacgccaucaccaccauccugaccgccgugaccuucugcuucgccagcggccagaacaucaccgaggaguucuaccagagcaccugcagcgccgugagcaagggcuaccugggcgcccugagaaccggcugguacaccagcgugaucaccaucgagcugagcaacaucaaggagaacaagugcaacggcaccgacgccaaggugaagcugaucaagcaggagcuggacaaguacaagaacgccgugaccgagcugcagcugcugaugcagagcacccccgccaccggcagcggcagcgccaucugcagcggcguggccgugugcaaggugcugcaccuggagggcgaggugaacaagaucaagagcgcccugcugagcaccaacaaggccguggugagccugagcaacggcgugagcgugcugaccuucaaggugcuggaccugaagaacuacaucgacaagcagcugcugcccauccugaacaagcagagcugcagcauccccaacaucgagaccgugaucgaguuccagcagaagaacaacagacugcuggagaucaccagagaguucagcgugaacgccggcgugaccacccccgugagcaccuacaugcugaccaacagcgagcugcugagccugaucaacgacaugcccaucaccaacgaccagaagaagcugaugagcaacaacgugcagaucgugagacagcagagcuacagcaucaugugcaucaucaaggaggaggugcuggccuacguggugcagcugccccuguacggcgugaucgacacccccugcuggaagcugcacaccagcccccugugcaccaccaacaccaaggagggcagcaacaucugccugaccagaaccgacagaggcugguacugcgacaacgccggcagcgugagcuucuucccccaggccgagaccugcaaggugcagagcaacagaguguucugcgacaccaugaacagccugacccugcccagcgaggugaaccugugcaacguggacaucuucaaccccaaguacgacugcaagaucaugaccagcaagaccgacgugagcagcagcgugaucaccagccugggcgccaucgugagcugcuacggcaagaccaagugcaccgccagcaacaagaacagaggcaucaucaagaccuucagcaacggcugcgacuacgugagcaacaagggcguggacaccgugagcgugggcaacacccuguacugcgugaacaagcaggagggccagagccuguacgugaagggcgagcccaucaucaacuucuacgacccccugguguuccccagcgacgaguucgacgccagcaucagccaggugaacgagaagaucaaccagagccuggccuucaucagaaagagcgacgagcugcugcacaacgugaacgccggcaagagcaccaccaacaucaugaucaccaccaucaucaucgugaucaucgugauccugcugagccugaucgccgugggccugcugcuguacugcaaggccagaugaggacuagucccuguucccagagcccacuuuuuuuucuuuuuuugaaauaaaauagccugucuuucagaucuaaaaaaaaaaaaaaaaaaaaaaaaaaaaaaaaaaaaaaaaaaaaaaaaaaaaaaaaaaaaaaaaugcaucccccccccccccccccccccccccccccccaaaggcucuuuucagagccaccagaauu

SEQ ID NO: 2051 - RNA, 1813 nt, Artificial Sequence
  mRNA product Design a-5 comprising derived and/or modified sequence from HRSV(A2)__F-del_DSCav1_mut1 (opt5)
gggagacuuucccauucuguagcagaauuugguguugccuguggucuuggucccgcggagaagcuuaccauggagcugcucauccugaaggccaacgcuauuaccacaauccuuacggccgugaccuucugcuuugcgagcggccagaauauuacagaagaguucuaccaauccaccuguucugcugucagcaaaggguaucugggagcccucagaacaggcugguacaccuccguuaucacaauugaacugucuaacaucaaggagaauaaaugcaacgggaccgacgccaaggugaaacuuaucaagcaggaacuggauaaguauaaaaaugcugugacggagcuccagcugcugaugcagagcacccccgccacaggauccggcucugcuauuuguagcggggucgccgugugcaagguucuccaccuggagggagaagugaacaaaaucaaguccgcgcuucugagcaccaauaaagccgucgugucucucuccaacggcguuagcgugcugacauuuaagguccuugaccugaagaauuacauugauaaacaacuccugccuauccugaacaagcagucuuguuccauuccgaauaucgagaccgugauugaguuccagcagaaaaacaaucggcuccuggaaaucacgcgcgaguuuagcgugaacgcuggcgucacaacccccguuucuacauauaugcuuaccaauuccgaacugcucagccugaucaacgacaugccuauuaccaacgaucaaaagaaacuuauguccaauaacgugcagaucgugagacagcagucuuacagcauuaugugcaucauuaaggaggaaguccuggccuaugugguucaacucccccuguacggggugaucgacacaccuuguuggaaacugcauacgagcccccucugcaccacaaauaccaaggagggauccaacaucugucugacacggaccgaucgcggcugguacugcgacaaugcugggucugucuccuucuuuccucaggccgaaacguguaaggugcagagcaacagaguuuucugcgauacaaugaacucucuuacccugccgagcgaggugaaucucugcaaugucgacauuuuuaaccccaaauaugauuguaagaucaugaccuccaaaacagacgugucuagcuccgucauuaccagccugggagcgaucgugucuugcuacggcaagacaaaauguacggccuccaauaagaaccgggggauuaucaagaccuucagcaauggaugcgauuauguuucuaacaaaggcguggacacagucuccgugggcaauacccuuuacuguguuaacaagcaagaggggcagagccuguaugugaaaggagaaccuaucauuaacuuuuacgacccccucgucuucccuuccgaugaguuugacgcuucuaucagccaggugaaugaaaagauuaaccagucccuggccuucauccgcaaaucugaugagcugcuccacaaugugaacgcuggcaagagcacaaccaauauuaugaucacgaccauuaucaucguuauuaucgucauucugcuuucccugaucgccguggggcuccugcuguauugcaaggccagaugaggacuagucccuguucccagagcccacuuuuuuuucuuuuuuugaaauaaaauagccugucuuucagaucuaaaaaaaaaaaaaaaaaaaaaaaaaaaaaaaaaaaaaaaaaaaaaaaaaaaaaaaaaaaaaaaaugcaucccccccccccccccccccccccccccccccaaaggcucuuuucagagccaccagaauu

SEQ ID NO: 2052 - RNA, 1813 nt, Artificial Sequence
  mRNA product Design a-5 comprising derived and/or modified sequence from HRSV(A2)__F-del_DSCav1_mut1 (opt6)
gggagacuuucccauucuguagcagaauuugguguugccuguggucuuggucccgcggagaagcuuaccauggaacuacucaucuuaaaagcaaacgcaauaacaacuauucuaaccgcaguaacauuuuguuucgcaucaggacaaaacauaaccgaagaauuuuaccaaucaacauguuccgcaguuucaaaaggauacuuaggcgcacuaagaacaggcugguacaccuccgugauaacaauagaauuaucaaacauaaaagaaaacaaauguaauggaacugacgccaaaguaaaacuaauaaaacaagaacuagacaaauauaaaaacgcaguaacugaacuacaauuacuaaugcaauccaccccagcaacaggcucaggcucagcaauuugcuccggagucgcugucugcaaaguacuacaucuugaaggcgaagucaauaaaauaaaaucagcacuucuaucaacaaacaaagcaguagucucacuaucaaacggaguaucaguacuaacauuuaaaguauuagaucuaaaaaacuauauagauaaacaacuacuacccauacucaauaaacaauccuguucaauaccaaauauagaaaccguaauagaauuucaacaaaaaaacaaucgacuauuagaaaucacccgagaauuuucagucaaugcaggcguaacaacaccaguaucaaccuacauguuaaccaacuccgaacuacuaucccucauaaacgacaugccaauaacaaacgaucaaaaaaaacuaauguccaacaacguacaaauagucagacaacaaucuuauucaauaaugugcaucauaaaagaagaaguucuagccuacguaguucaacuuccauuauacggcguaauugauacaccaugcuggaaacuacacacauccccacuauguacaacaaacacaaaagaaggaucaaacaucugcuuaacuagaacagacagaggaugguacugcgacaacgcaggaucagucucauucuuuccacaagcagaaacaugcaagguccaaucaaacagaguauucugcgacacaaugaacuccuuaacacuaccaucugaaguaaaccuauguaauguagacauauuuaacccaaaauacgacugcaaaauaaugaccucaaaaacagacguauccucaucaguaauuacaagccucggagccauaguaucaugcuacggaaaaacaaaauguacagcaucaaacaaaaacagaggaauaauaaaaacguucuccaacggaugcgacuauguaucaaacaaaggcguagacacaguaucagucggaaauacccuuuacugcguaaacaaacaagaaggccaaagucuauacguaaaaggagagccaauaauaaacuuuuaugacccccuuguauucccaucugacgaauuugaugcaucaauaucccaagucaacgaaaaaaucaaccaaucauuagccuuuauuagaaaaagugacgaacuauuacacaacguuaaugcagggaaaucaacaacaaauauaaugauuacaaccauaauuauaguuaucauaguuauacuacucucacuaaucgcaguaggauuacuauuauacugcaaagcaagauaaggacuagucccuguucccagagcccacuuuuuuuucuuuuuuugaaauaaaauagccugucuuucagaucuaaaaaaaaaaaaaaaaaaaaaaaaaaaaaaaaaaaaaaaaaaaaaaaaaaaaaaaaaaaaaaaaugcaucccccccccccccccccccccccccccccccaaaggcucuuuucagagccaccagaauu

SEQ ID NO: 2053 - RNA, 1813 nt, Artificial Sequence
  mRNA product Design a-5 comprising derived and/or modified sequence from HRSV(A2)__F-del_DSCav1_mut1 (opt11)
gggagacuuucccauucuguagcagaauuugguguugccuguggucuuggucccgcggagaagcuuaccauggaacuacucauccuaaaagccaacgcaaucacaaccauacuuacagcuguuaccuucugcuucgcauccggccaaaauaucaccgaagaguucuaccaaucaaccugcuccgccgucagcaaaggauaccucggcgcccuccgaaccggaugguacacuucugucaucacaaucgaacucuccaacaucaaagaaaacaaaugcaacgguaccgacgcgaaagucaaacucaucaaacaagaacuagacaaguacaaaaacgccgucaccgaacugcaacuccucaugcaauccacaccagcaacgggaucaggauccgccaucugcucaggcgucgccgucugcaaaguccugcaccuagaaggagaaguaaacaaaauuaaauccgcccuacucuccaccaacaaagcagucgucucacuauccaacggcgucuccguccucaccuuuaagguccucgaccucaaaaauuauauagacaaacaacuccuccccauccuaaacaaacaaucaugcuccauccccaacauagaaaccgucaucgaauuucaacagaaaaacaaccgacucuuagaaauuacccgcgaguucagcgucaacgccggagucaccacacccgucucaaccuacaugcucaccaacucagaacuccucucacuaaucaaugauaugcccaucacaaacgaccaaaagaaacucauguccaacaacguacaaaucguucgccaacaaagcuacuccaucauguguaucauuaaagaagaaguccucgccuacgucguccaacuuccgcucuacggcguaaucgacacccccugcuggaaacuucacaccucgccccucugcaccacaaacaccaaagaaggcuccaacaucugccuaacccgcaccgaccgcggcugguacugcgacaacgccggcuccgucucauuuuucccccaggcggagaccugcaaaguccaauccaaccgcgucuucugcgacaccaugaacucucuuacccucccaucagaaguaaaccucugcaacgucgacaucuuuaaccccaaauacgauugcaagauaaugaccuccaaaacagacgucucaucguccgucaucaccucccuaggagcuaucgucuccugcuacggcaagaccaaaugcaccgcuuccaacaaaaaccgcggcaucaucaaaaccuucuccaacgggugcgacuacgucucuaacaaaggcguggacacaguauccguaggaaacacacuguacugcguaaacaaacaagagggccaaucgcuuuacgucaaaggcgagccaauuaucaacuucuacgacccgcucgucuucccaucagacgaguucgacgcauccaucucccaagucaacgagaaaaucaaucagucccucgccuucauacgcaaauccgacgaacuccuacauaacguaaacgccggcaaaucuaccacaaacaucaugaucacaaccaucaucaucguaaucaucgucauccuucucucgcucaucgccguaggacugcuacuuuacugcaaggcccgcuaaggacuagucccuguucccagagcccacuuuuuuuucuuuuuuugaaauaaaauagccugucuuucagaucuaaaaaaaaaaaaaaaaaaaaaaaaaaaaaaaaaaaaaaaaaaaaaaaaaaaaaaaaaaaaaaaaugcaucccccccccccccccccccccccccccccccaaaggcucuuuucagagccaccagaauu

SEQ ID NO: 2054 - RNA, 1994 nt, Artificial Sequence
  mRNA product Design b-1 comprising derived and/or modified sequence from HRSV(A2)__F-del_DSCav1_mut1 (opt1)
gggagacggagacggccugcaggaccugcucucucagcccucagccgaggccuacgccgagccgagugcgcagccgacgaccgggaggagccgcagccuucaacucugagguacugugauccgcgcugcccgccgggccgccccaguccgcugcugcggcaccuccuucccucgcgcccucuucgcucgccagcgccuucccugugagccugcgucaccgcggccgccaagcuuaccauggagcugcucauccugaaggccaacgccaucaccaccauccugacggcggugaccuucugcuucgccagcggccagaacaucaccgaggaguucuaccaguccacgugcagcgccgucuccaagggguaccucggcgcccugcggaccggcugguacaccuccgugaucaccaucgagcugagcaacaucaaggagaacaagugcaacgggaccgacgccaaggugaagcucaucaagcaggagcuggacaaguacaagaacgcggucacggagcugcagcuccugaugcaguccaccccggcaaccggcuccggcuccgccaucugcagcggcgucgccgugugcaaggugcugcaccucgagggggaggucaacaagaucaagagcgcccugcuguccaccaacaaggccguggugagccucuccaacggcgucagcgugcugaccuucaaggugcuggaccucaagaacuacaucgacaagcagcugcugcccauccugaacaagcagagcugcuccauccccaacaucgagacggugaucgaguuccagcagaagaacaaccggcuccuggagaucacccgcgaguucagcgugaacgccggggucaccacccccguguccacguacaugcugaccaacagcgagcuccugucccugaucaacgacaugccgaucaccaacgaccagaagaagcucaugagcaacaacgugcagaucguccggcagcaguccuacagcaucaugugcaucaucaaggaggaggugcuggcguacgugguccagcugccccucuacggcgugaucgacacccccugcuggaagcugcacacgagcccccugugcaccaccaacaccaaggagggguccaacaucugccucacgcgcaccgaccggggcugguacugcgacaacgccggcagcgucuccuucuucccgcaggccgagaccugcaaggugcagagcaaccgcguguucugcgacaccaugaacucccugacgcugcccagcgagguaaaccucugcaacgucgacaucuucaaccccaaguacgacugcaagaucaugaccuccaagaccgacgugagcuccagcgugaucaccucccugggggccaucgucagcugcuacggcaagacgaagugcaccgccagcaacaagaaccgggggaucaucaagaccuucuccaacggcugcgacuacgugagcaacaagggcguggacaccguguccgucgggaacacccuguacugcgugaacaagcaggagggccagagccucuacgugaagggggagcccaucaucaacuucuacgacccgcuggucuuccccuccgacgaguucgacgcgagcaucucccaggugaacgagaagaucaaccagagccuggccuucauccgcaaguccgacgagcugcuccacaacgugaacgccggcaagagcacgaccaacaucaugaucaccaccaucaucaucgucaucaucgugauccugcugucccucaucgccguggggcugcugcucuacugcaaggcccggugaggacuaguguccaccugucccuccugggcugcuggauugucucguuuuccugccaaauaaacaggaucagcgcuuuacagaucuaaaaaaaaaaaaaaaaaaaaaaaaaaaaaaaaaaaaaaaaaaaaaaaaaaaaaaaaaaaaaaaaugcaucccccccccccccccccccccccccccccccaaaggcucuuuucagagccaccagaauu

SEQ ID NO: 2055 - RNA, 1994 nt, Artificial Sequence
  mRNA product Design b-1 comprising derived and/or modified sequence from HRSV(A2)__F-del_DSCav1_mut1 (opt1)
gggagacggagacggccugcaggaccugcucucucagcccucagccgaggccuacgccgagccgagugcgcagccgacgaccgggaggagccgcagccuucaacucugagguacugugauccgcgcugcccgccgggccgccccaguccgcugcugcggcaccuccuucccucgcgcccucuucgcucgccagcgccuucccugugagccugcgucaccgcggccgccaagcuuaccauggagcugcucauccugaaggccaacgccaucaccaccauccugacggcggugaccuucugcuucgccagcggccagaacaucaccgaggaguucuaccaguccacgugcagcgccgucuccaagggguaccucggcgcccugcgcaccgggugguacaccagcgugaucaccaucgagcuguccaacaucaaggagaacaagugcaacggcaccgacgccaaggugaagcucaucaagcaggagcuggacaaguacaagaacgcggucacggagcugcagcuccugaugcagagcacccccgccaccggguccggcagcgccaucugcuccggcguggccgugugcaagguccugcaccucgagggggaggugaacaagaucaagagcgcgcugcuguccaccaacaaggccguggucagccucuccaacggcgugagcgugcugacguucaagguccuggaccucaagaacuacaucgacaagcagcugcugccgauccucaacaagcaguccugcagcauccccaacaucgagaccgugaucgaguuccagcagaagaacaaccggcugcuggagaucacccgcgaguucuccgugaacgccggggucaccacgcccgugagcaccuacaugcucaccaacuccgagcugcugagccucaucaacgacaugcccaucaccaacgaccagaagaagcugaugagcaacaacgugcagaucguccggcagcaguccuacagcaucaugugcaucaucaaggaggaggugcuggccuacgugguccagcucccgcuguacggcgugaucgacacgcccugcuggaagcugcacaccagcccccucugcaccaccaacacgaaggagggguccaacaucugccugacccgcaccgaccggggcugguacugcgacaacgccggcuccgugagcuucuucccccaggcggagaccugcaagguccaguccaaccgcguguucugcgacacgaugaacagccugacccucccguccgaggucaaccugugcaacguggacaucuucaaccccaaguacgacugcaagaucaugaccagcaagaccgacguguccagcuccgucaucacgagccugggggccaucguguccugcuacggcaagaccaagugcaccgccagcaacaagaaccgggggaucaucaagaccuucuccaacggcugcgacuacgugagcaacaagggcgucgacacgguguccguggggaacacccucuacugcgucaacaagcaggagggccagagccuguacgugaagggggagcccaucaucaacuucuacgacccccugguguucccgagcgacgaguucgacgccuccaucagccaggucaacgagaagaucaaccagucccucgccuucauccgcaagagcgacgagcugcugcacaacgugaacgcgggcaaguccaccaccaacaucaugaucaccacgaucaucaucgugaucaucgucauccuccugagccugaucgccguggggcuccugcuguacugcaaggcccggugaggacuaguguccaccugucccuccugggcugcuggauugucucguuuuccugccaaauaaacaggaucagcgcuuuacagaucuaaaaaaaaaaaaaaaaaaaaaaaaaaaaaaaaaaaaaaaaaaaaaaaaaaaaaaaaaaaaaaaaugcaucccccccccccccccccccccccccccccccaaaggcucuuuucagagccaccagaauu

SEQ ID NO: 2056 - RNA, 1994 nt, Artificial Sequence
  mRNA product Design b-1 comprising derived and/or modified sequence from HRSV(A2)__F-del_DSCav1_mut1 (opt2)
gggagacggagacggccugcaggaccugcucucucagcccucagccgaggccuacgccgagccgagugcgcagccgacgaccgggaggagccgcagccuucaacucugagguacugugauccgcgcugcccgccgggccgccccaguccgcugcugcggcaccuccuucccucgcgcccucuucgcucgccagcgccuucccugugagccugcgucaccgcggccgccaagcuuaccauggagcuccucauccucaaggccaacgccaucaccaccauccucaccgccgucaccuucugcuucgccuccggccagaacaucaccgaggaguucuaccaguccaccugcuccgccgucuccaagggcuaccucggcgcccuccgcaccggcugguacaccuccgucaucaccaucgagcucuccaacaucaaggagaacaagugcaacggcaccgacgccaaggucaagcucaucaagcaggagcucgacaaguacaagaacgccgucaccgagcuccagcuccucaugcaguccacccccgccaccggcuccggcuccgccaucugcuccggcgucgccgucugcaagguccuccaccucgagggcgaggucaacaagaucaaguccgcccuccucuccaccaacaaggccgucgucucccucuccaacggcgucuccguccucaccuucaagguccucgaccucaagaacuacaucgacaagcagcuccuccccauccucaacaagcaguccugcuccauccccaacaucgagaccgucaucgaguuccagcagaagaacaaccgccuccucgagaucacccgcgaguucuccgucaacgccggcgucaccacccccgucuccaccuacaugcucaccaacuccgagcuccucucccucaucaacgacaugcccaucaccaacgaccagaagaagcucauguccaacaacguccagaucguccgccagcaguccuacuccaucaugugcaucaucaaggaggagguccucgccuacgucguccagcucccccucuacggcgucaucgacacccccugcuggaagcuccacaccuccccccucugcaccaccaacaccaaggagggcuccaacaucugccucacccgcaccgaccgcggcugguacugcgacaacgccggcuccgucuccuucuucccccaggccgagaccugcaagguccaguccaaccgcgucuucugcgacaccaugaacucccucacccuccccuccgaggucaaccucugcaacgucgacaucuucaaccccaaguacgacugcaagaucaugaccuccaagaccgacgucuccuccuccgucaucaccucccucggcgccaucgucuccugcuacggcaagaccaagugcaccgccuccaacaagaaccgcggcaucaucaagaccuucuccaacggcugcgacuacgucuccaacaagggcgucgacaccgucuccgucggcaacacccucuacugcgucaacaagcaggagggccagucccucuacgucaagggcgagcccaucaucaacuucuacgacccccucgucuuccccuccgacgaguucgacgccuccaucucccaggucaacgagaagaucaaccagucccucgccuucauccgcaaguccgacgagcuccuccacaacgucaacgccggcaaguccaccaccaacaucaugaucaccaccaucaucaucgucaucaucgucauccuccucucccucaucgccgucggccuccuccucuacugcaaggcccgcugaggacuaguguccaccugucccuccugggcugcuggauugucucguuuuccugccaaauaaacaggaucagcgcuuuacagaucuaaaaaaaaaaaaaaaaaaaaaaaaaaaaaaaaaaaaaaaaaaaaaaaaaaaaaaaaaaaaaaaaugcaucccccccccccccccccccccccccccccccaaaggcucuuuucagagccaccagaauu

SEQ ID NO: 2057 - RNA, 1994 nt, Artificial Sequence
  mRNA product Design b-1 comprising derived and/or modified sequence from HRSV(A2)__F-del_DSCav1_mut1 (opt3)
gggagacggagacggccugcaggaccugcucucucagcccucagccgaggccuacgccgagccgagugcgcagccgacgaccgggaggagccgcagccuucaacucugagguacugugauccgcgcugcccgccgggccgccccaguccgcugcugcggcaccuccuucccucgcgcccucuucgcucgccagcgccuucccugugagccugcgucaccgcggccgccaagcuuaccauggagcugcucauccuuaaggccaacgcuauuaccacaauacugacugcagugacguucugcuuugccagcggccagaauaucaccgaagaguucuaccaauccacauguucugcggucucaaaaggguauuugggagcuuuaagaacugguugguacaccaguguuauuacaaucgaacugagcaacauuaaggagaauaaaugcaacggcaccgacgccaaggugaaacuaaucaagcaggaacucgauaaguauaaaaaugcaguaacugagcugcagcuucugaugcaguccacacccgccaccgggucuggaucggcuauauguucaggcguggcagucugcaagguguugcaccucgagggugaaguuaacaaaaucaagagcgcccugcugaguacgaauaaagcuguggucucccucucuaacggggugagcguauuaacuuuuaagguucuggaccuuaagaauuacauugauaaacaauugcugccuauccuaaacaagcaguccuguucaauuccaaauaucgagaccgugauagaguuccagcagaaaaacaauaggcuccuggaaauuacacgggaguuuagugucaacgccggagugacuaccccggugagcacauauaugcuuaccaauucugaacuguugucccucaucaacgacaugcccauuacgaacgaucaaaagaaacugaugucaaauaacguccagaucguucgccagcagagcuacaguaucaugugcauuauaaaggaggaaguguuagcguauguagugcaacugccucucuacggcgucaucgacacuccauguuggaaacuucauacaucuccccugugcaccacuaauacaaaggagggcuccaacauuuguuugacccgaacggaucgugggugguacugcgacaaugcaggaagcgugucguucuuuccucaggccgaaaccuguaagguucagucuaacagaguguucugcgauacaaugaacucccuaacucugccaucagaggucaaucucugcaauguggacaucuuuaaccccaaauaugauuguaagauaaugaccaguaaaacagacguaagcuccucuguuauuacuagccugggugcuaucgugucaugcuacggcaagaccaaauguacagccaguaauaagaacagggggaucauuaagaccuucuccaauggaugcgauuaugucagcaacaaaggcguggacacugucucuguggguaauacgcuuuacuguguuaacaagcaagaggggcagucacuguaugugaaaggagaaccuaucauuaacuuuuacgacccauugguauucccgagugaugaguuugacgcaagcauaucccaggucaaugaaaagaucaaccagucucucgcuuucauucggaaaucggaugagcuguuacacaaugugaacgccggcaagagcacaaccaauaucaugaucacuaccauuauaaucguuauuaucgugauucugcuaucccucaucgcggucggccugcuuuuguauugcaaggcccgcugaggacuaguguccaccugucccuccugggcugcuggauugucucguuuuccugccaaauaaacaggaucagcgcuuuacagaucuaaaaaaaaaaaaaaaaaaaaaaaaaaaaaaaaaaaaaaaaaaaaaaaaaaaaaaaaaaaaaaaaugcaucccccccccccccccccccccccccccccccaaaggcucuuuucagagccaccagaauu

SEQ ID NO: 2058 - RNA, 1994 nt, Artificial Sequence
  mRNA product Design b-1 comprising derived and/or modified sequence from HRSV(A2)__F-del_DSCav1_mut1 (opt4)
gggagacggagacggccugcaggaccugcucucucagcccucagccgaggccuacgccgagccgagugcgcagccgacgaccgggaggagccgcagccuucaacucugagguacugugauccgcgcugcccgccgggccgccccaguccgcugcugcggcaccuccuucccucgcgcccucuucgcucgccagcgccuucccugugagccugcgucaccgcggccgccaagcuuaccauggagcugcugauccugaaggccaacgccaucaccaccauccugaccgccgugaccuucugcuucgccagcggccagaacaucaccgaggaguucuaccagagcaccugcagcgccgugagcaagggcuaccugggcgcccugagaaccggcugguacaccagcgugaucaccaucgagcugagcaacaucaaggagaacaagugcaacggcaccgacgccaaggugaagcugaucaagcaggagcuggacaaguacaagaacgccgugaccgagcugcagcugcugaugcagagcacccccgccaccggcagcggcagcgccaucugcagcggcguggccgugugcaaggugcugcaccuggagggcgaggugaacaagaucaagagcgcccugcugagcaccaacaaggccguggugagccugagcaacggcgugagcgugcugaccuucaaggugcuggaccugaagaacuacaucgacaagcagcugcugcccauccugaacaagcagagcugcagcauccccaacaucgagaccgugaucgaguuccagcagaagaacaacagacugcuggagaucaccagagaguucagcgugaacgccggcgugaccacccccgugagcaccuacaugcugaccaacagcgagcugcugagccugaucaacgacaugcccaucaccaacgaccagaagaagcugaugagcaacaacgugcagaucgugagacagcagagcuacagcaucaugugcaucaucaaggaggaggugcuggccuacguggugcagcugccccuguacggcgugaucgacacccccugcuggaagcugcacaccagcccccugugcaccaccaacaccaaggagggcagcaacaucugccugaccagaaccgacagaggcugguacugcgacaacgccggcagcgugagcuucuucccccaggccgagaccugcaaggugcagagcaacagaguguucugcgacaccaugaacagccugacccugcccagcgaggugaaccugugcaacguggacaucuucaaccccaaguacgacugcaagaucaugaccagcaagaccgacgugagcagcagcgugaucaccagccugggcgccaucgugagcugcuacggcaagaccaagugcaccgccagcaacaagaacagaggcaucaucaagaccuucagcaacggcugcgacuacgugagcaacaagggcguggacaccgugagcgugggcaacacccuguacugcgugaacaagcaggagggccagagccuguacgugaagggcgagcccaucaucaacuucuacgacccccugguguuccccagcgacgaguucgacgccagcaucagccaggugaacgagaagaucaaccagagccuggccuucaucagaaagagcgacgagcugcugcacaacgugaacgccggcaagagcaccaccaacaucaugaucaccaccaucaucaucgugaucaucgugauccugcugagccugaucgccgugggccugcugcuguacugcaaggccagaugaggacuaguguccaccugucccuccugggcugcuggauugucucguuuuccugccaaauaaacaggaucagcgcuuuacagaucuaaaaaaaaaaaaaaaaaaaaaaaaaaaaaaaaaaaaaaaaaaaaaaaaaaaaaaaaaaaaaaaaugcaucccccccccccccccccccccccccccccccaaaggcucuuuucagagccaccagaauu

SEQ ID NO: 2059 - RNA, 1994 nt, Artificial Sequence
  mRNA product Design b-1 comprising derived and/or modified sequence from HRSV(A2)__F-del_DSCav1_mut1 (opt5)
gggagacggagacggccugcaggaccugcucucucagcccucagccgaggccuacgccgagccgagugcgcagccgacgaccgggaggagccgcagccuucaacucugagguacugugauccgcgcugcccgccgggccgccccaguccgcugcugcggcaccuccuucccucgcgcccucuucgcucgccagcgccuucccugugagccugcgucaccgcggccgccaagcuuaccauggagcugcucauccugaaggccaacgcuauuaccacaauccuuacggccgugaccuucugcuuugcgagcggccagaauauuacagaagaguucuaccaauccaccuguucugcugucagcaaaggguaucugggagcccucagaacaggcugguacaccuccguuaucacaauugaacugucuaacaucaaggagaauaaaugcaacgggaccgacgccaaggugaaacuuaucaagcaggaacuggauaaguauaaaaaugcugugacggagcuccagcugcugaugcagagcacccccgccacaggauccggcucugcuauuuguagcggggucgccgugugcaagguucuccaccuggagggagaagugaacaaaaucaaguccgcgcuucugagcaccaauaaagccgucgugucucucuccaacggcguuagcgugcugacauuuaagguccuugaccugaagaauuacauugauaaacaacuccugccuauccugaacaagcagucuuguuccauuccgaauaucgagaccgugauugaguuccagcagaaaaacaaucggcuccuggaaaucacgcgcgaguuuagcgugaacgcuggcgucacaacccccguuucuacauauaugcuuaccaauuccgaacugcucagccugaucaacgacaugccuauuaccaacgaucaaaagaaacuuauguccaauaacgugcagaucgugagacagcagucuuacagcauuaugugcaucauuaaggaggaaguccuggccuaugugguucaacucccccuguacggggugaucgacacaccuuguuggaaacugcauacgagcccccucugcaccacaaauaccaaggagggauccaacaucugucugacacggaccgaucgcggcugguacugcgacaaugcugggucugucuccuucuuuccucaggccgaaacguguaaggugcagagcaacagaguuuucugcgauacaaugaacucucuuacccugccgagcgaggugaaucucugcaaugucgacauuuuuaaccccaaauaugauuguaagaucaugaccuccaaaacagacgugucuagcuccgucauuaccagccugggagcgaucgugucuugcuacggcaagacaaaauguacggccuccaauaagaaccgggggauuaucaagaccuucagcaauggaugcgauuauguuucuaacaaaggcguggacacagucuccgugggcaauacccuuuacuguguuaacaagcaagaggggcagagccuguaugugaaaggagaaccuaucauuaacuuuuacgacccccucgucuucccuuccgaugaguuugacgcuucuaucagccaggugaaugaaaagauuaaccagucccuggccuucauccgcaaaucugaugagcugcuccacaaugugaacgcuggcaagagcacaaccaauauuaugaucacgaccauuaucaucguuauuaucgucauucugcuuucccugaucgccguggggcuccugcuguauugcaaggccagaugaggacuaguguccaccugucccuccugggcugcuggauugucucguuuuccugccaaauaaacaggaucagcgcuuuacagaucuaaaaaaaaaaaaaaaaaaaaaaaaaaaaaaaaaaaaaaaaaaaaaaaaaaaaaaaaaaaaaaaaugcaucccccccccccccccccccccccccccccccaaaggcucuuuucagagccaccagaauu

SEQ ID NO: 2060 - RNA, 1994 nt, Artificial Sequence
  mRNA product Design b-1 comprising derived and/or modified sequence from HRSV(A2)__F-del_DSCav1_mut1 (opt6)
gggagacggagacggccugcaggaccugcucucucagcccucagccgaggccuacgccgagccgagugcgcagccgacgaccgggaggagccgcagccuucaacucugagguacugugauccgcgcugcccgccgggccgccccaguccgcugcugcggcaccuccuucccucgcgcccucuucgcucgccagcgccuucccugugagccugcgucaccgcggccgccaagcuuaccauggaacuacucaucuuaaaagcaaacgcaauaacaacuauucuaaccgcaguaacauuuuguuucgcaucaggacaaaacauaaccgaagaauuuuaccaaucaacauguuccgcaguuucaaaaggauacuuaggcgcacuaagaacaggcugguacaccuccgugauaacaauagaauuaucaaacauaaaagaaaacaaauguaauggaacugacgccaaaguaaaacuaauaaaacaagaacuagacaaauauaaaaacgcaguaacugaacuacaauuacuaaugcaauccaccccagcaacaggcucaggcucagcaauuugcuccggagucgcugucugcaaaguacuacaucuugaaggcgaagucaauaaaauaaaaucagcacuucuaucaacaaacaaagcaguagucucacuaucaaacggaguaucaguacuaacauuuaaaguauuagaucuaaaaaacuauauagauaaacaacuacuacccauacucaauaaacaauccuguucaauaccaaauauagaaaccguaauagaauuucaacaaaaaaacaaucgacuauuagaaaucacccgagaauuuucagucaaugcaggcguaacaacaccaguaucaaccuacauguuaaccaacuccgaacuacuaucccucauaaacgacaugccaauaacaaacgaucaaaaaaaacuaauguccaacaacguacaaauagucagacaacaaucuuauucaauaaugugcaucauaaaagaagaaguucuagccuacguaguucaacuuccauuauacggcguaauugauacaccaugcuggaaacuacacacauccccacuauguacaacaaacacaaaagaaggaucaaacaucugcuuaacuagaacagacagaggaugguacugcgacaacgcaggaucagucucauucuuuccacaagcagaaacaugcaagguccaaucaaacagaguauucugcgacacaaugaacuccuuaacacuaccaucugaaguaaaccuauguaauguagacauauuuaacccaaaauacgacugcaaaauaaugaccucaaaaacagacguauccucaucaguaauuacaagccucggagccauaguaucaugcuacggaaaaacaaaauguacagcaucaaacaaaaacagaggaauaauaaaaacguucuccaacggaugcgacuauguaucaaacaaaggcguagacacaguaucagucggaaauacccuuuacugcguaaacaaacaagaaggccaaagucuauacguaaaaggagagccaauaauaaacuuuuaugacccccuuguauucccaucugacgaauuugaugcaucaauaucccaagucaacgaaaaaaucaaccaaucauuagccuuuauuagaaaaagugacgaacuauuacacaacguuaaugcagggaaaucaacaacaaauauaaugauuacaaccauaauuauaguuaucauaguuauacuacucucacuaaucgcaguaggauuacuauuauacugcaaagcaagauaaggacuaguguccaccugucccuccugggcugcuggauugucucguuuuccugccaaauaaacaggaucagcgcuuuacagaucuaaaaaaaaaaaaaaaaaaaaaaaaaaaaaaaaaaaaaaaaaaaaaaaaaaaaaaaaaaaaaaaaugcaucccccccccccccccccccccccccccccccaaaggcucuuuucagagccaccagaauu

SEQ ID NO: 2061 - RNA, 1994 nt, Artificial Sequence
  mRNA product Design b-1 comprising derived and/or modified sequence from HRSV(A2)__F-del_DSCav1_mut1 (opt11)
gggagacggagacggccugcaggaccugcucucucagcccucagccgaggccuacgccgagccgagugcgcagccgacgaccgggaggagccgcagccuucaacucugagguacugugauccgcgcugcccgccgggccgccccaguccgcugcugcggcaccuccuucccucgcgcccucuucgcucgccagcgccuucccugugagccugcgucaccgcggccgccaagcuuaccauggaacuacucauccuaaaagccaacgcaaucacaaccauacuuacagcuguuaccuucugcuucgcauccggccaaaauaucaccgaagaguucuaccaaucaaccugcuccgccgucagcaaaggauaccucggcgcccuccgaaccggaugguacacuucugucaucacaaucgaacucuccaacaucaaagaaaacaaaugcaacgguaccgacgcgaaagucaaacucaucaaacaagaacuagacaaguacaaaaacgccgucaccgaacugcaacuccucaugcaauccacaccagcaacgggaucaggauccgccaucugcucaggcgucgccgucugcaaaguccugcaccuagaaggagaaguaaacaaaauuaaauccgcccuacucuccaccaacaaagcagucgucucacuauccaacggcgucuccguccucaccuuuaagguccucgaccucaaaaauuauauagacaaacaacuccuccccauccuaaacaaacaaucaugcuccauccccaacauagaaaccgucaucgaauuucaacagaaaaacaaccgacucuuagaaauuacccgcgaguucagcgucaacgccggagucaccacacccgucucaaccuacaugcucaccaacucagaacuccucucacuaaucaaugauaugcccaucacaaacgaccaaaagaaacucauguccaacaacguacaaaucguucgccaacaaagcuacuccaucauguguaucauuaaagaagaaguccucgccuacgucguccaacuuccgcucuacggcguaaucgacacccccugcuggaaacuucacaccucgccccucugcaccacaaacaccaaagaaggcuccaacaucugccuaacccgcaccgaccgcggcugguacugcgacaacgccggcuccgucucauuuuucccccaggcggagaccugcaaaguccaauccaaccgcgucuucugcgacaccaugaacucucuuacccucccaucagaaguaaaccucugcaacgucgacaucuuuaaccccaaauacgauugcaagauaaugaccuccaaaacagacgucucaucguccgucaucaccucccuaggagcuaucgucuccugcuacggcaagaccaaaugcaccgcuuccaacaaaaaccgcggcaucaucaaaaccuucuccaacgggugcgacuacgucucuaacaaaggcguggacacaguauccguaggaaacacacuguacugcguaaacaaacaagagggccaaucgcuuuacgucaaaggcgagccaauuaucaacuucuacgacccgcucgucuucccaucagacgaguucgacgcauccaucucccaagucaacgagaaaaucaaucagucccucgccuucauacgcaaauccgacgaacuccuacauaacguaaacgccggcaaaucuaccacaaacaucaugaucacaaccaucaucaucguaaucaucgucauccuucucucgcucaucgccguaggacugcuacuuuacugcaaggcccgcuaaggacuaguguccaccugucccuccugggcugcuggauugucucguuuuccugccaaauaaacaggaucagcgcuuuacagaucuaaaaaaaaaaaaaaaaaaaaaaaaaaaaaaaaaaaaaaaaaaaaaaaaaaaaaaaaaaaaaaaaugcaucccccccccccccccccccccccccccccccaaaggcucuuuucagagccaccagaauu

SEQ ID NO: 2062 - RNA, 1814 nt, Artificial Sequence
  mRNA product Design b-2 comprising derived and/or modified sequence from HRSV(A2)__F-del_DSCav1_mut1 (opt1)
gggagagccucugcuggaguccggggaguggcguuggcugcuagagcgaagcuuaccauggagcugcucauccugaaggccaacgccaucaccaccauccugacggcggugaccuucugcuucgccagcggccagaacaucaccgaggaguucuaccaguccacgugcagcgccgucuccaagggguaccucggcgcccugcggaccggcugguacaccuccgugaucaccaucgagcugagcaacaucaaggagaacaagugcaacgggaccgacgccaaggugaagcucaucaagcaggagcuggacaaguacaagaacgcggucacggagcugcagcuccugaugcaguccaccccggcaaccggcuccggcuccgccaucugcagcggcgucgccgugugcaaggugcugcaccucgagggggaggucaacaagaucaagagcgcccugcuguccaccaacaaggccguggugagccucuccaacggcgucagcgugcugaccuucaaggugcuggaccucaagaacuacaucgacaagcagcugcugcccauccugaacaagcagagcugcuccauccccaacaucgagacggugaucgaguuccagcagaagaacaaccggcuccuggagaucacccgcgaguucagcgugaacgccggggucaccacccccguguccacguacaugcugaccaacagcgagcuccugucccugaucaacgacaugccgaucaccaacgaccagaagaagcucaugagcaacaacgugcagaucguccggcagcaguccuacagcaucaugugcaucaucaaggaggaggugcuggcguacgugguccagcugccccucuacggcgugaucgacacccccugcuggaagcugcacacgagcccccugugcaccaccaacaccaaggagggguccaacaucugccucacgcgcaccgaccggggcugguacugcgacaacgccggcagcgucuccuucuucccgcaggccgagaccugcaaggugcagagcaaccgcguguucugcgacaccaugaacucccugacgcugcccagcgagguaaaccucugcaacgucgacaucuucaaccccaaguacgacugcaagaucaugaccuccaagaccgacgugagcuccagcgugaucaccucccugggggccaucgucagcugcuacggcaagacgaagugcaccgccagcaacaagaaccgggggaucaucaagaccuucuccaacggcugcgacuacgugagcaacaagggcguggacaccguguccgucgggaacacccuguacugcgugaacaagcaggagggccagagccucuacgugaagggggagcccaucaucaacuucuacgacccgcuggucuuccccuccgacgaguucgacgcgagcaucucccaggugaacgagaagaucaaccagagccuggccuucauccgcaaguccgacgagcugcuccacaacgugaacgccggcaagagcacgaccaacaucaugaucaccaccaucaucaucgucaucaucgugauccugcugucccucaucgccguggggcugcugcucuacugcaaggcccggugaggacuaguguccaccugucccuccugggcugcuggauugucucguuuuccugccaaauaaacaggaucagcgcuuuacagaucuaaaaaaaaaaaaaaaaaaaaaaaaaaaaaaaaaaaaaaaaaaaaaaaaaaaaaaaaaaaaaaaaugcaucccccccccccccccccccccccccccccccaaaggcucuuuucagagccaccagaauu

SEQ ID NO: 2063 - RNA, 1814 nt, Artificial Sequence
  mRNA product Design b-2 comprising derived and/or modified sequence from HRSV(A2)__F-del_DSCav1_mut1 (opt1)
gggagagccucugcuggaguccggggaguggcguuggcugcuagagcgaagcuuaccauggagcugcucauccugaaggccaacgccaucaccaccauccugacggcggugaccuucugcuucgccagcggccagaacaucaccgaggaguucuaccaguccacgugcagcgccgucuccaagggguaccucggcgcccugcgcaccgggugguacaccagcgugaucaccaucgagcuguccaacaucaaggagaacaagugcaacggcaccgacgccaaggugaagcucaucaagcaggagcuggacaaguacaagaacgcggucacggagcugcagcuccugaugcagagcacccccgccaccggguccggcagcgccaucugcuccggcguggccgugugcaagguccugcaccucgagggggaggugaacaagaucaagagcgcgcugcuguccaccaacaaggccguggucagccucuccaacggcgugagcgugcugacguucaagguccuggaccucaagaacuacaucgacaagcagcugcugccgauccucaacaagcaguccugcagcauccccaacaucgagaccgugaucgaguuccagcagaagaacaaccggcugcuggagaucacccgcgaguucuccgugaacgccggggucaccacgcccgugagcaccuacaugcucaccaacuccgagcugcugagccucaucaacgacaugcccaucaccaacgaccagaagaagcugaugagcaacaacgugcagaucguccggcagcaguccuacagcaucaugugcaucaucaaggaggaggugcuggccuacgugguccagcucccgcuguacggcgugaucgacacgcccugcuggaagcugcacaccagcccccucugcaccaccaacacgaaggagggguccaacaucugccugacccgcaccgaccggggcugguacugcgacaacgccggcuccgugagcuucuucccccaggcggagaccugcaagguccaguccaaccgcguguucugcgacacgaugaacagccugacccucccguccgaggucaaccugugcaacguggacaucuucaaccccaaguacgacugcaagaucaugaccagcaagaccgacguguccagcuccgucaucacgagccugggggccaucguguccugcuacggcaagaccaagugcaccgccagcaacaagaaccgggggaucaucaagaccuucuccaacggcugcgacuacgugagcaacaagggcgucgacacgguguccguggggaacacccucuacugcgucaacaagcaggagggccagagccuguacgugaagggggagcccaucaucaacuucuacgacccccugguguucccgagcgacgaguucgacgccuccaucagccaggucaacgagaagaucaaccagucccucgccuucauccgcaagagcgacgagcugcugcacaacgugaacgcgggcaaguccaccaccaacaucaugaucaccacgaucaucaucgugaucaucgucauccuccugagccugaucgccguggggcuccugcuguacugcaaggcccggugaggacuaguguccaccugucccuccugggcugcuggauugucucguuuuccugccaaauaaacaggaucagcgcuuuacagaucuaaaaaaaaaaaaaaaaaaaaaaaaaaaaaaaaaaaaaaaaaaaaaaaaaaaaaaaaaaaaaaaaugcaucccccccccccccccccccccccccccccccaaaggcucuuuucagagccaccagaauu

SEQ ID NO: 2064 - RNA, 1814 nt, Artificial Sequence
  mRNA product Design b-2 comprising derived and/or modified sequence from HRSV(A2)__F-del_DSCav1_mut1 (opt2)
gggagagccucugcuggaguccggggaguggcguuggcugcuagagcgaagcuuaccauggagcuccucauccucaaggccaacgccaucaccaccauccucaccgccgucaccuucugcuucgccuccggccagaacaucaccgaggaguucuaccaguccaccugcuccgccgucuccaagggcuaccucggcgcccuccgcaccggcugguacaccuccgucaucaccaucgagcucuccaacaucaaggagaacaagugcaacggcaccgacgccaaggucaagcucaucaagcaggagcucgacaaguacaagaacgccgucaccgagcuccagcuccucaugcaguccacccccgccaccggcuccggcuccgccaucugcuccggcgucgccgucugcaagguccuccaccucgagggcgaggucaacaagaucaaguccgcccuccucuccaccaacaaggccgucgucucccucuccaacggcgucuccguccucaccuucaagguccucgaccucaagaacuacaucgacaagcagcuccuccccauccucaacaagcaguccugcuccauccccaacaucgagaccgucaucgaguuccagcagaagaacaaccgccuccucgagaucacccgcgaguucuccgucaacgccggcgucaccacccccgucuccaccuacaugcucaccaacuccgagcuccucucccucaucaacgacaugcccaucaccaacgaccagaagaagcucauguccaacaacguccagaucguccgccagcaguccuacuccaucaugugcaucaucaaggaggagguccucgccuacgucguccagcucccccucuacggcgucaucgacacccccugcuggaagcuccacaccuccccccucugcaccaccaacaccaaggagggcuccaacaucugccucacccgcaccgaccgcggcugguacugcgacaacgccggcuccgucuccuucuucccccaggccgagaccugcaagguccaguccaaccgcgucuucugcgacaccaugaacucccucacccuccccuccgaggucaaccucugcaacgucgacaucuucaaccccaaguacgacugcaagaucaugaccuccaagaccgacgucuccuccuccgucaucaccucccucggcgccaucgucuccugcuacggcaagaccaagugcaccgccuccaacaagaaccgcggcaucaucaagaccuucuccaacggcugcgacuacgucuccaacaagggcgucgacaccgucuccgucggcaacacccucuacugcgucaacaagcaggagggccagucccucuacgucaagggcgagcccaucaucaacuucuacgacccccucgucuuccccuccgacgaguucgacgccuccaucucccaggucaacgagaagaucaaccagucccucgccuucauccgcaaguccgacgagcuccuccacaacgucaacgccggcaaguccaccaccaacaucaugaucaccaccaucaucaucgucaucaucgucauccuccucucccucaucgccgucggccuccuccucuacugcaaggcccgcugaggacuaguguccaccugucccuccugggcugcuggauugucucguuuuccugccaaauaaacaggaucagcgcuuuacagaucuaaaaaaaaaaaaaaaaaaaaaaaaaaaaaaaaaaaaaaaaaaaaaaaaaaaaaaaaaaaaaaaaugcaucccccccccccccccccccccccccccccccaaaggcucuuuucagagccaccagaauu

SEQ ID NO: 2065 - RNA, 1814 nt, Artificial Sequence
  mRNA product Design b-2 comprising derived and/or modified sequence from HRSV(A2)__F-del_DSCav1_mut1 (opt3)
gggagagccucugcuggaguccggggaguggcguuggcugcuagagcgaagcuuaccauggagcugcucauccuuaaggccaacgcuauuaccacaauacugacugcagugacguucugcuuugccagcggccagaauaucaccgaagaguucuaccaauccacauguucugcggucucaaaaggguauuugggagcuuuaagaacugguugguacaccaguguuauuacaaucgaacugagcaacauuaaggagaauaaaugcaacggcaccgacgccaaggugaaacuaaucaagcaggaacucgauaaguauaaaaaugcaguaacugagcugcagcuucugaugcaguccacacccgccaccgggucuggaucggcuauauguucaggcguggcagucugcaagguguugcaccucgagggugaaguuaacaaaaucaagagcgcccugcugaguacgaauaaagcuguggucucccucucuaacggggugagcguauuaacuuuuaagguucuggaccuuaagaauuacauugauaaacaauugcugccuauccuaaacaagcaguccuguucaauuccaaauaucgagaccgugauagaguuccagcagaaaaacaauaggcuccuggaaauuacacgggaguuuagugucaacgccggagugacuaccccggugagcacauauaugcuuaccaauucugaacuguugucccucaucaacgacaugcccauuacgaacgaucaaaagaaacugaugucaaauaacguccagaucguucgccagcagagcuacaguaucaugugcauuauaaaggaggaaguguuagcguauguagugcaacugccucucuacggcgucaucgacacuccauguuggaaacuucauacaucuccccugugcaccacuaauacaaaggagggcuccaacauuuguuugacccgaacggaucgugggugguacugcgacaaugcaggaagcgugucguucuuuccucaggccgaaaccuguaagguucagucuaacagaguguucugcgauacaaugaacucccuaacucugccaucagaggucaaucucugcaauguggacaucuuuaaccccaaauaugauuguaagauaaugaccaguaaaacagacguaagcuccucuguuauuacuagccugggugcuaucgugucaugcuacggcaagaccaaauguacagccaguaauaagaacagggggaucauuaagaccuucuccaauggaugcgauuaugucagcaacaaaggcguggacacugucucuguggguaauacgcuuuacuguguuaacaagcaagaggggcagucacuguaugugaaaggagaaccuaucauuaacuuuuacgacccauugguauucccgagugaugaguuugacgcaagcauaucccaggucaaugaaaagaucaaccagucucucgcuuucauucggaaaucggaugagcuguuacacaaugugaacgccggcaagagcacaaccaauaucaugaucacuaccauuauaaucguuauuaucgugauucugcuaucccucaucgcggucggccugcuuuuguauugcaaggcccgcugaggacuaguguccaccugucccuccugggcugcuggauugucucguuuuccugccaaauaaacaggaucagcgcuuuacagaucuaaaaaaaaaaaaaaaaaaaaaaaaaaaaaaaaaaaaaaaaaaaaaaaaaaaaaaaaaaaaaaaaugcaucccccccccccccccccccccccccccccccaaaggcucuuuucagagccaccagaauu

SEQ ID NO: 2066 - RNA, 1814 nt, Artificial Sequence
  mRNA product Design b-2 comprising derived and/or modified sequence from HRSV(A2)__F-del_DSCav1_mut1 (opt4)
gggagagccucugcuggaguccggggaguggcguuggcugcuagagcgaagcuuaccauggagcugcugauccugaaggccaacgccaucaccaccauccugaccgccgugaccuucugcuucgccagcggccagaacaucaccgaggaguucuaccagagcaccugcagcgccgugagcaagggcuaccugggcgcccugagaaccggcugguacaccagcgugaucaccaucgagcugagcaacaucaaggagaacaagugcaacggcaccgacgccaaggugaagcugaucaagcaggagcuggacaaguacaagaacgccgugaccgagcugcagcugcugaugcagagcacccccgccaccggcagcggcagcgccaucugcagcggcguggccgugugcaaggugcugcaccuggagggcgaggugaacaagaucaagagcgcccugcugagcaccaacaaggccguggugagccugagcaacggcgugagcgugcugaccuucaaggugcuggaccugaagaacuacaucgacaagcagcugcugcccauccugaacaagcagagcugcagcauccccaacaucgagaccgugaucgaguuccagcagaagaacaacagacugcuggagaucaccagagaguucagcgugaacgccggcgugaccacccccgugagcaccuacaugcugaccaacagcgagcugcugagccugaucaacgacaugcccaucaccaacgaccagaagaagcugaugagcaacaacgugcagaucgugagacagcagagcuacagcaucaugugcaucaucaaggaggaggugcuggccuacguggugcagcugccccuguacggcgugaucgacacccccugcuggaagcugcacaccagcccccugugcaccaccaacaccaaggagggcagcaacaucugccugaccagaaccgacagaggcugguacugcgacaacgccggcagcgugagcuucuucccccaggccgagaccugcaaggugcagagcaacagaguguucugcgacaccaugaacagccugacccugcccagcgaggugaaccugugcaacguggacaucuucaaccccaaguacgacugcaagaucaugaccagcaagaccgacgugagcagcagcgugaucaccagccugggcgccaucgugagcugcuacggcaagaccaagugcaccgccagcaacaagaacagaggcaucaucaagaccuucagcaacggcugcgacuacgugagcaacaagggcguggacaccgugagcgugggcaacacccuguacugcgugaacaagcaggagggccagagccuguacgugaagggcgagcccaucaucaacuucuacgacccccugguguuccccagcgacgaguucgacgccagcaucagccaggugaacgagaagaucaaccagagccuggccuucaucagaaagagcgacgagcugcugcacaacgugaacgccggcaagagcaccaccaacaucaugaucaccaccaucaucaucgugaucaucgugauccugcugagccugaucgccgugggccugcugcuguacugcaaggccagaugaggacuaguguccaccugucccuccugggcugcuggauugucucguuuuccugccaaauaaacaggaucagcgcuuuacagaucuaaaaaaaaaaaaaaaaaaaaaaaaaaaaaaaaaaaaaaaaaaaaaaaaaaaaaaaaaaaaaaaaugcaucccccccccccccccccccccccccccccccaaaggcucuuuucagagccaccagaauu

SEQ ID NO: 2067 - RNA, 1814 nt, Artificial Sequence
  mRNA product Design b-2 comprising derived and/or modified sequence from HRSV(A2)__F-del_DSCav1_mut1 (opt5)
gggagagccucugcuggaguccggggaguggcguuggcugcuagagcgaagcuuaccauggagcugcucauccugaaggccaacgcuauuaccacaauccuuacggccgugaccuucugcuuugcgagcggccagaauauuacagaagaguucuaccaauccaccuguucugcugucagcaaaggguaucugggagcccucagaacaggcugguacaccuccguuaucacaauugaacugucuaacaucaaggagaauaaaugcaacgggaccgacgccaaggugaaacuuaucaagcaggaacuggauaaguauaaaaaugcugugacggagcuccagcugcugaugcagagcacccccgccacaggauccggcucugcuauuuguagcggggucgccgugugcaagguucuccaccuggagggagaagugaacaaaaucaaguccgcgcuucugagcaccaauaaagccgucgugucucucuccaacggcguuagcgugcugacauuuaagguccuugaccugaagaauuacauugauaaacaacuccugccuauccugaacaagcagucuuguuccauuccgaauaucgagaccgugauugaguuccagcagaaaaacaaucggcuccuggaaaucacgcgcgaguuuagcgugaacgcuggcgucacaacccccguuucuacauauaugcuuaccaauuccgaacugcucagccugaucaacgacaugccuauuaccaacgaucaaaagaaacuuauguccaauaacgugcagaucgugagacagcagucuuacagcauuaugugcaucauuaaggaggaaguccuggccuaugugguucaacucccccuguacggggugaucgacacaccuuguuggaaacugcauacgagcccccucugcaccacaaauaccaaggagggauccaacaucugucugacacggaccgaucgcggcugguacugcgacaaugcugggucugucuccuucuuuccucaggccgaaacguguaaggugcagagcaacagaguuuucugcgauacaaugaacucucuuacccugccgagcgaggugaaucucugcaaugucgacauuuuuaaccccaaauaugauuguaagaucaugaccuccaaaacagacgugucuagcuccgucauuaccagccugggagcgaucgugucuugcuacggcaagacaaaauguacggccuccaauaagaaccgggggauuaucaagaccuucagcaauggaugcgauuauguuucuaacaaaggcguggacacagucuccgugggcaauacccuuuacuguguuaacaagcaagaggggcagagccuguaugugaaaggagaaccuaucauuaacuuuuacgacccccucgucuucccuuccgaugaguuugacgcuucuaucagccaggugaaugaaaagauuaaccagucccuggccuucauccgcaaaucugaugagcugcuccacaaugugaacgcuggcaagagcacaaccaauauuaugaucacgaccauuaucaucguuauuaucgucauucugcuuucccugaucgccguggggcuccugcuguauugcaaggccagaugaggacuaguguccaccugucccuccugggcugcuggauugucucguuuuccugccaaauaaacaggaucagcgcuuuacagaucuaaaaaaaaaaaaaaaaaaaaaaaaaaaaaaaaaaaaaaaaaaaaaaaaaaaaaaaaaaaaaaaaugcaucccccccccccccccccccccccccccccccaaaggcucuuuucagagccaccagaauu

SEQ ID NO: 2068 - RNA, 1814 nt, Artificial Sequence
  mRNA product Design b-2 comprising derived and/or modified sequence from HRSV(A2)__F-del_DSCav1_mut1 (opt6)
gggagagccucugcuggaguccggggaguggcguuggcugcuagagcgaagcuuaccauggaacuacucaucuuaaaagcaaacgcaauaacaacuauucuaaccgcaguaacauuuuguuucgcaucaggacaaaacauaaccgaagaauuuuaccaaucaacauguuccgcaguuucaaaaggauacuuaggcgcacuaagaacaggcugguacaccuccgugauaacaauagaauuaucaaacauaaaagaaaacaaauguaauggaacugacgccaaaguaaaacuaauaaaacaagaacuagacaaauauaaaaacgcaguaacugaacuacaauuacuaaugcaauccaccccagcaacaggcucaggcucagcaauuugcuccggagucgcugucugcaaaguacuacaucuugaaggcgaagucaauaaaauaaaaucagcacuucuaucaacaaacaaagcaguagucucacuaucaaacggaguaucaguacuaacauuuaaaguauuagaucuaaaaaacuauauagauaaacaacuacuacccauacucaauaaacaauccuguucaauaccaaauauagaaaccguaauagaauuucaacaaaaaaacaaucgacuauuagaaaucacccgagaauuuucagucaaugcaggcguaacaacaccaguaucaaccuacauguuaaccaacuccgaacuacuaucccucauaaacgacaugccaauaacaaacgaucaaaaaaaacuaauguccaacaacguacaaauagucagacaacaaucuuauucaauaaugugcaucauaaaagaagaaguucuagccuacguaguucaacuuccauuauacggcguaauugauacaccaugcuggaaacuacacacauccccacuauguacaacaaacacaaaagaaggaucaaacaucugcuuaacuagaacagacagaggaugguacugcgacaacgcaggaucagucucauucuuuccacaagcagaaacaugcaagguccaaucaaacagaguauucugcgacacaaugaacuccuuaacacuaccaucugaaguaaaccuauguaauguagacauauuuaacccaaaauacgacugcaaaauaaugaccucaaaaacagacguauccucaucaguaauuacaagccucggagccauaguaucaugcuacggaaaaacaaaauguacagcaucaaacaaaaacagaggaauaauaaaaacguucuccaacggaugcgacuauguaucaaacaaaggcguagacacaguaucagucggaaauacccuuuacugcguaaacaaacaagaaggccaaagucuauacguaaaaggagagccaauaauaaacuuuuaugacccccuuguauucccaucugacgaauuugaugcaucaauaucccaagucaacgaaaaaaucaaccaaucauuagccuuuauuagaaaaagugacgaacuauuacacaacguuaaugcagggaaaucaacaacaaauauaaugauuacaaccauaauuauaguuaucauaguuauacuacucucacuaaucgcaguaggauuacuauuauacugcaaagcaagauaaggacuaguguccaccugucccuccugggcugcuggauugucucguuuuccugccaaauaaacaggaucagcgcuuuacagaucuaaaaaaaaaaaaaaaaaaaaaaaaaaaaaaaaaaaaaaaaaaaaaaaaaaaaaaaaaaaaaaaaugcaucccccccccccccccccccccccccccccccaaaggcucuuuucagagccaccagaauu

SEQ ID NO: 2069 - RNA, 1814 nt, Artificial Sequence
  mRNA product Design b-2 comprising derived and/or modified sequence from HRSV(A2)__F-del_DSCav1_mut1 (opt11)
gggagagccucugcuggaguccggggaguggcguuggcugcuagagcgaagcuuaccauggaacuacucauccuaaaagccaacgcaaucacaaccauacuuacagcuguuaccuucugcuucgcauccggccaaaauaucaccgaagaguucuaccaaucaaccugcuccgccgucagcaaaggauaccucggcgcccuccgaaccggaugguacacuucugucaucacaaucgaacucuccaacaucaaagaaaacaaaugcaacgguaccgacgcgaaagucaaacucaucaaacaagaacuagacaaguacaaaaacgccgucaccgaacugcaacuccucaugcaauccacaccagcaacgggaucaggauccgccaucugcucaggcgucgccgucugcaaaguccugcaccuagaaggagaaguaaacaaaauuaaauccgcccuacucuccaccaacaaagcagucgucucacuauccaacggcgucuccguccucaccuuuaagguccucgaccucaaaaauuauauagacaaacaacuccuccccauccuaaacaaacaaucaugcuccauccccaacauagaaaccgucaucgaauuucaacagaaaaacaaccgacucuuagaaauuacccgcgaguucagcgucaacgccggagucaccacacccgucucaaccuacaugcucaccaacucagaacuccucucacuaaucaaugauaugcccaucacaaacgaccaaaagaaacucauguccaacaacguacaaaucguucgccaacaaagcuacuccaucauguguaucauuaaagaagaaguccucgccuacgucguccaacuuccgcucuacggcguaaucgacacccccugcuggaaacuucacaccucgccccucugcaccacaaacaccaaagaaggcuccaacaucugccuaacccgcaccgaccgcggcugguacugcgacaacgccggcuccgucucauuuuucccccaggcggagaccugcaaaguccaauccaaccgcgucuucugcgacaccaugaacucucuuacccucccaucagaaguaaaccucugcaacgucgacaucuuuaaccccaaauacgauugcaagauaaugaccuccaaaacagacgucucaucguccgucaucaccucccuaggagcuaucgucuccugcuacggcaagaccaaaugcaccgcuuccaacaaaaaccgcggcaucaucaaaaccuucuccaacgggugcgacuacgucucuaacaaaggcguggacacaguauccguaggaaacacacuguacugcguaaacaaacaagagggccaaucgcuuuacgucaaaggcgagccaauuaucaacuucuacgacccgcucgucuucccaucagacgaguucgacgcauccaucucccaagucaacgagaaaaucaaucagucccucgccuucauacgcaaauccgacgaacuccuacauaacguaaacgccggcaaaucuaccacaaacaucaugaucacaaccaucaucaucguaaucaucgucauccuucucucgcucaucgccguaggacugcuacuuuacugcaaggcccgcuaaggacuaguguccaccugucccuccugggcugcuggauugucucguuuuccugccaaauaaacaggaucagcgcuuuacagaucuaaaaaaaaaaaaaaaaaaaaaaaaaaaaaaaaaaaaaaaaaaaaaaaaaaaaaaaaaaaaaaaaugcaucccccccccccccccccccccccccccccccaaaggcucuuuucagagccaccagaauu

SEQ ID NO: 2070 - RNA, 1834 nt, Artificial Sequence
  mRNA product Design b-3 comprising derived and/or modified sequence from HRSV(A2)__F-del_DSCav1_mut1 (opt1)
gggagagucccgcagucggcguccagcggcucugcuuguucgugugugugucguugcaggccuuauucaagcuuaccauggagcugcucauccugaaggccaacgccaucaccaccauccugacggcggugaccuucugcuucgccagcggccagaacaucaccgaggaguucuaccaguccacgugcagcgccgucuccaagggguaccucggcgcccugcggaccggcugguacaccuccgugaucaccaucgagcugagcaacaucaaggagaacaagugcaacgggaccgacgccaaggugaagcucaucaagcaggagcuggacaaguacaagaacgcggucacggagcugcagcuccugaugcaguccaccccggcaaccggcuccggcuccgccaucugcagcggcgucgccgugugcaaggugcugcaccucgagggggaggucaacaagaucaagagcgcccugcuguccaccaacaaggccguggugagccucuccaacggcgucagcgugcugaccuucaaggugcuggaccucaagaacuacaucgacaagcagcugcugcccauccugaacaagcagagcugcuccauccccaacaucgagacggugaucgaguuccagcagaagaacaaccggcuccuggagaucacccgcgaguucagcgugaacgccggggucaccacccccguguccacguacaugcugaccaacagcgagcuccugucccugaucaacgacaugccgaucaccaacgaccagaagaagcucaugagcaacaacgugcagaucguccggcagcaguccuacagcaucaugugcaucaucaaggaggaggugcuggcguacgugguccagcugccccucuacggcgugaucgacacccccugcuggaagcugcacacgagcccccugugcaccaccaacaccaaggagggguccaacaucugccucacgcgcaccgaccggggcugguacugcgacaacgccggcagcgucuccuucuucccgcaggccgagaccugcaaggugcagagcaaccgcguguucugcgacaccaugaacucccugacgcugcccagcgagguaaaccucugcaacgucgacaucuucaaccccaaguacgacugcaagaucaugaccuccaagaccgacgugagcuccagcgugaucaccucccugggggccaucgucagcugcuacggcaagacgaagugcaccgccagcaacaagaaccgggggaucaucaagaccuucuccaacggcugcgacuacgugagcaacaagggcguggacaccguguccgucgggaacacccuguacugcgugaacaagcaggagggccagagccucuacgugaagggggagcccaucaucaacuucuacgacccgcuggucuuccccuccgacgaguucgacgcgagcaucucccaggugaacgagaagaucaaccagagccuggccuucauccgcaaguccgacgagcugcuccacaacgugaacgccggcaagagcacgaccaacaucaugaucaccaccaucaucaucgucaucaucgugauccugcugucccucaucgccguggggcugcugcucuacugcaaggcccggugaggacuaguguccaccugucccuccugggcugcuggauugucucguuuuccugccaaauaaacaggaucagcgcuuuacagaucuaaaaaaaaaaaaaaaaaaaaaaaaaaaaaaaaaaaaaaaaaaaaaaaaaaaaaaaaaaaaaaaaugcaucccccccccccccccccccccccccccccccaaaggcucuuuucagagccaccagaauu

SEQ ID NO: 2071 - RNA, 1834 nt, Artificial Sequence
  mRNA product Design b-3 comprising derived and/or modified sequence from HRSV(A2)__F-del_DSCav1_mut1 (opt1)
gggagagucccgcagucggcguccagcggcucugcuuguucgugugugugucguugcaggccuuauucaagcuuaccauggagcugcucauccugaaggccaacgccaucaccaccauccugacggcggugaccuucugcuucgccagcggccagaacaucaccgaggaguucuaccaguccacgugcagcgccgucuccaagggguaccucggcgcccugcgcaccgggugguacaccagcgugaucaccaucgagcuguccaacaucaaggagaacaagugcaacggcaccgacgccaaggugaagcucaucaagcaggagcuggacaaguacaagaacgcggucacggagcugcagcuccugaugcagagcacccccgccaccggguccggcagcgccaucugcuccggcguggccgugugcaagguccugcaccucgagggggaggugaacaagaucaagagcgcgcugcuguccaccaacaaggccguggucagccucuccaacggcgugagcgugcugacguucaagguccuggaccucaagaacuacaucgacaagcagcugcugccgauccucaacaagcaguccugcagcauccccaacaucgagaccgugaucgaguuccagcagaagaacaaccggcugcuggagaucacccgcgaguucuccgugaacgccggggucaccacgcccgugagcaccuacaugcucaccaacuccgagcugcugagccucaucaacgacaugcccaucaccaacgaccagaagaagcugaugagcaacaacgugcagaucguccggcagcaguccuacagcaucaugugcaucaucaaggaggaggugcuggccuacgugguccagcucccgcuguacggcgugaucgacacgcccugcuggaagcugcacaccagcccccucugcaccaccaacacgaaggagggguccaacaucugccugacccgcaccgaccggggcugguacugcgacaacgccggcuccgugagcuucuucccccaggcggagaccugcaagguccaguccaaccgcguguucugcgacacgaugaacagccugacccucccguccgaggucaaccugugcaacguggacaucuucaaccccaaguacgacugcaagaucaugaccagcaagaccgacguguccagcuccgucaucacgagccugggggccaucguguccugcuacggcaagaccaagugcaccgccagcaacaagaaccgggggaucaucaagaccuucuccaacggcugcgacuacgugagcaacaagggcgucgacacgguguccguggggaacacccucuacugcgucaacaagcaggagggccagagccuguacgugaagggggagcccaucaucaacuucuacgacccccugguguucccgagcgacgaguucgacgccuccaucagccaggucaacgagaagaucaaccagucccucgccuucauccgcaagagcgacgagcugcugcacaacgugaacgcgggcaaguccaccaccaacaucaugaucaccacgaucaucaucgugaucaucgucauccuccugagccugaucgccguggggcuccugcuguacugcaaggcccggugaggacuaguguccaccugucccuccugggcugcuggauugucucguuuuccugccaaauaaacaggaucagcgcuuuacagaucuaaaaaaaaaaaaaaaaaaaaaaaaaaaaaaaaaaaaaaaaaaaaaaaaaaaaaaaaaaaaaaaaugcaucccccccccccccccccccccccccccccccaaaggcucuuuucagagccaccagaauu

SEQ ID NO: 2072 - RNA, 1834 nt, Artificial Sequence
  mRNA product Design b-3 comprising derived and/or modified sequence from HRSV(A2)__F-del_DSCav1_mut1 (opt2)
gggagagucccgcagucggcguccagcggcucugcuuguucgugugugugucguugcaggccuuauucaagcuuaccauggagcuccucauccucaaggccaacgccaucaccaccauccucaccgccgucaccuucugcuucgccuccggccagaacaucaccgaggaguucuaccaguccaccugcuccgccgucuccaagggcuaccucggcgcccuccgcaccggcugguacaccuccgucaucaccaucgagcucuccaacaucaaggagaacaagugcaacggcaccgacgccaaggucaagcucaucaagcaggagcucgacaaguacaagaacgccgucaccgagcuccagcuccucaugcaguccacccccgccaccggcuccggcuccgccaucugcuccggcgucgccgucugcaagguccuccaccucgagggcgaggucaacaagaucaaguccgcccuccucuccaccaacaaggccgucgucucccucuccaacggcgucuccguccucaccuucaagguccucgaccucaagaacuacaucgacaagcagcuccuccccauccucaacaagcaguccugcuccauccccaacaucgagaccgucaucgaguuccagcagaagaacaaccgccuccucgagaucacccgcgaguucuccgucaacgccggcgucaccacccccgucuccaccuacaugcucaccaacuccgagcuccucucccucaucaacgacaugcccaucaccaacgaccagaagaagcucauguccaacaacguccagaucguccgccagcaguccuacuccaucaugugcaucaucaaggaggagguccucgccuacgucguccagcucccccucuacggcgucaucgacacccccugcuggaagcuccacaccuccccccucugcaccaccaacaccaaggagggcuccaacaucugccucacccgcaccgaccgcggcugguacugcgacaacgccggcuccgucuccuucuucccccaggccgagaccugcaagguccaguccaaccgcgucuucugcgacaccaugaacucccucacccuccccuccgaggucaaccucugcaacgucgacaucuucaaccccaaguacgacugcaagaucaugaccuccaagaccgacgucuccuccuccgucaucaccucccucggcgccaucgucuccugcuacggcaagaccaagugcaccgccuccaacaagaaccgcggcaucaucaagaccuucuccaacggcugcgacuacgucuccaacaagggcgucgacaccgucuccgucggcaacacccucuacugcgucaacaagcaggagggccagucccucuacgucaagggcgagcccaucaucaacuucuacgacccccucgucuuccccuccgacgaguucgacgccuccaucucccaggucaacgagaagaucaaccagucccucgccuucauccgcaaguccgacgagcuccuccacaacgucaacgccggcaaguccaccaccaacaucaugaucaccaccaucaucaucgucaucaucgucauccuccucucccucaucgccgucggccuccuccucuacugcaaggcccgcugaggacuaguguccaccugucccuccugggcugcuggauugucucguuuuccugccaaauaaacaggaucagcgcuuuacagaucuaaaaaaaaaaaaaaaaaaaaaaaaaaaaaaaaaaaaaaaaaaaaaaaaaaaaaaaaaaaaaaaaugcaucccccccccccccccccccccccccccccccaaaggcucuuuucagagccaccagaauu

SEQ ID NO: 2073 - RNA, 1834 nt, Artificial Sequence
  mRNA product Design b-3 comprising derived and/or modified sequence from HRSV(A2)__F-del_DSCav1_mut1 (opt3)
gggagagucccgcagucggcguccagcggcucugcuuguucgugugugugucguugcaggccuuauucaagcuuaccauggagcugcucauccuuaaggccaacgcuauuaccacaauacugacugcagugacguucugcuuugccagcggccagaauaucaccgaagaguucuaccaauccacauguucugcggucucaaaaggguauuugggagcuuuaagaacugguugguacaccaguguuauuacaaucgaacugagcaacauuaaggagaauaaaugcaacggcaccgacgccaaggugaaacuaaucaagcaggaacucgauaaguauaaaaaugcaguaacugagcugcagcuucugaugcaguccacacccgccaccgggucuggaucggcuauauguucaggcguggcagucugcaagguguugcaccucgagggugaaguuaacaaaaucaagagcgcccugcugaguacgaauaaagcuguggucucccucucuaacggggugagcguauuaacuuuuaagguucuggaccuuaagaauuacauugauaaacaauugcugccuauccuaaacaagcaguccuguucaauuccaaauaucgagaccgugauagaguuccagcagaaaaacaauaggcuccuggaaauuacacgggaguuuagugucaacgccggagugacuaccccggugagcacauauaugcuuaccaauucugaacuguugucccucaucaacgacaugcccauuacgaacgaucaaaagaaacugaugucaaauaacguccagaucguucgccagcagagcuacaguaucaugugcauuauaaaggaggaaguguuagcguauguagugcaacugccucucuacggcgucaucgacacuccauguuggaaacuucauacaucuccccugugcaccacuaauacaaaggagggcuccaacauuuguuugacccgaacggaucgugggugguacugcgacaaugcaggaagcgugucguucuuuccucaggccgaaaccuguaagguucagucuaacagaguguucugcgauacaaugaacucccuaacucugccaucagaggucaaucucugcaauguggacaucuuuaaccccaaauaugauuguaagauaaugaccaguaaaacagacguaagcuccucuguuauuacuagccugggugcuaucgugucaugcuacggcaagaccaaauguacagccaguaauaagaacagggggaucauuaagaccuucuccaauggaugcgauuaugucagcaacaaaggcguggacacugucucuguggguaauacgcuuuacuguguuaacaagcaagaggggcagucacuguaugugaaaggagaaccuaucauuaacuuuuacgacccauugguauucccgagugaugaguuugacgcaagcauaucccaggucaaugaaaagaucaaccagucucucgcuuucauucggaaaucggaugagcuguuacacaaugugaacgccggcaagagcacaaccaauaucaugaucacuaccauuauaaucguuauuaucgugauucugcuaucccucaucgcggucggccugcuuuuguauugcaaggcccgcugaggacuaguguccaccugucccuccugggcugcuggauugucucguuuuccugccaaauaaacaggaucagcgcuuuacagaucuaaaaaaaaaaaaaaaaaaaaaaaaaaaaaaaaaaaaaaaaaaaaaaaaaaaaaaaaaaaaaaaaugcaucccccccccccccccccccccccccccccccaaaggcucuuuucagagccaccagaauu

SEQ ID NO: 2074 - RNA, 1834 nt, Artificial Sequence
  mRNA product Design b-3 comprising derived and/or modified sequence from HRSV(A2)__F-del_DSCav1_mut1 (opt4)
gggagagucccgcagucggcguccagcggcucugcuuguucgugugugugucguugcaggccuuauucaagcuuaccauggagcugcugauccugaaggccaacgccaucaccaccauccugaccgccgugaccuucugcuucgccagcggccagaacaucaccgaggaguucuaccagagcaccugcagcgccgugagcaagggcuaccugggcgcccugagaaccggcugguacaccagcgugaucaccaucgagcugagcaacaucaaggagaacaagugcaacggcaccgacgccaaggugaagcugaucaagcaggagcuggacaaguacaagaacgccgugaccgagcugcagcugcugaugcagagcacccccgccaccggcagcggcagcgccaucugcagcggcguggccgugugcaaggugcugcaccuggagggcgaggugaacaagaucaagagcgcccugcugagcaccaacaaggccguggugagccugagcaacggcgugagcgugcugaccuucaaggugcuggaccugaagaacuacaucgacaagcagcugcugcccauccugaacaagcagagcugcagcauccccaacaucgagaccgugaucgaguuccagcagaagaacaacagacugcuggagaucaccagagaguucagcgugaacgccggcgugaccacccccgugagcaccuacaugcugaccaacagcgagcugcugagccugaucaacgacaugcccaucaccaacgaccagaagaagcugaugagcaacaacgugcagaucgugagacagcagagcuacagcaucaugugcaucaucaaggaggaggugcuggccuacguggugcagcugccccuguacggcgugaucgacacccccugcuggaagcugcacaccagcccccugugcaccaccaacaccaaggagggcagcaacaucugccugaccagaaccgacagaggcugguacugcgacaacgccggcagcgugagcuucuucccccaggccgagaccugcaaggugcagagcaacagaguguucugcgacaccaugaacagccugacccugcccagcgaggugaaccugugcaacguggacaucuucaaccccaaguacgacugcaagaucaugaccagcaagaccgacgugagcagcagcgugaucaccagccugggcgccaucgugagcugcuacggcaagaccaagugcaccgccagcaacaagaacagaggcaucaucaagaccuucagcaacggcugcgacuacgugagcaacaagggcguggacaccgugagcgugggcaacacccuguacugcgugaacaagcaggagggccagagccuguacgugaagggcgagcccaucaucaacuucuacgacccccugguguuccccagcgacgaguucgacgccagcaucagccaggugaacgagaagaucaaccagagccuggccuucaucagaaagagcgacgagcugcugcacaacgugaacgccggcaagagcaccaccaacaucaugaucaccaccaucaucaucgugaucaucgugauccugcugagccugaucgccgugggccugcugcuguacugcaaggccagaugaggacuaguguccaccugucccuccugggcugcuggauugucucguuuuccugccaaauaaacaggaucagcgcuuuacagaucuaaaaaaaaaaaaaaaaaaaaaaaaaaaaaaaaaaaaaaaaaaaaaaaaaaaaaaaaaaaaaaaaugcaucccccccccccccccccccccccccccccccaaaggcucuuuucagagccaccagaauu

SEQ ID NO: 2075 - RNA, 1834 nt, Artificial Sequence
  mRNA product Design b-3 comprising derived and/or modified sequence from HRSV(A2)__F-del_DSCav1_mut1 (opt5)
gggagagucccgcagucggcguccagcggcucugcuuguucgugugugugucguugcaggccuuauucaagcuuaccauggagcugcucauccugaaggccaacgcuauuaccacaauccuuacggccgugaccuucugcuuugcgagcggccagaauauuacagaagaguucuaccaauccaccuguucugcugucagcaaaggguaucugggagcccucagaacaggcugguacaccuccguuaucacaauugaacugucuaacaucaaggagaauaaaugcaacgggaccgacgccaaggugaaacuuaucaagcaggaacuggauaaguauaaaaaugcugugacggagcuccagcugcugaugcagagcacccccgccacaggauccggcucugcuauuuguagcggggucgccgugugcaagguucuccaccuggagggagaagugaacaaaaucaaguccgcgcuucugagcaccaauaaagccgucgugucucucuccaacggcguuagcgugcugacauuuaagguccuugaccugaagaauuacauugauaaacaacuccugccuauccugaacaagcagucuuguuccauuccgaauaucgagaccgugauugaguuccagcagaaaaacaaucggcuccuggaaaucacgcgcgaguuuagcgugaacgcuggcgucacaacccccguuucuacauauaugcuuaccaauuccgaacugcucagccugaucaacgacaugccuauuaccaacgaucaaaagaaacuuauguccaauaacgugcagaucgugagacagcagucuuacagcauuaugugcaucauuaaggaggaaguccuggccuaugugguucaacucccccuguacggggugaucgacacaccuuguuggaaacugcauacgagcccccucugcaccacaaauaccaaggagggauccaacaucugucugacacggaccgaucgcggcugguacugcgacaaugcugggucugucuccuucuuuccucaggccgaaacguguaaggugcagagcaacagaguuuucugcgauacaaugaacucucuuacccugccgagcgaggugaaucucugcaaugucgacauuuuuaaccccaaauaugauuguaagaucaugaccuccaaaacagacgugucuagcuccgucauuaccagccugggagcgaucgugucuugcuacggcaagacaaaauguacggccuccaauaagaaccgggggauuaucaagaccuucagcaauggaugcgauuauguuucuaacaaaggcguggacacagucuccgugggcaauacccuuuacuguguuaacaagcaagaggggcagagccuguaugugaaaggagaaccuaucauuaacuuuuacgacccccucgucuucccuuccgaugaguuugacgcuucuaucagccaggugaaugaaaagauuaaccagucccuggccuucauccgcaaaucugaugagcugcuccacaaugugaacgcuggcaagagcacaaccaauauuaugaucacgaccauuaucaucguuauuaucgucauucugcuuucccugaucgccguggggcuccugcuguauugcaaggccagaugaggacuaguguccaccugucccuccugggcugcuggauugucucguuuuccugccaaauaaacaggaucagcgcuuuacagaucuaaaaaaaaaaaaaaaaaaaaaaaaaaaaaaaaaaaaaaaaaaaaaaaaaaaaaaaaaaaaaaaaugcaucccccccccccccccccccccccccccccccaaaggcucuuuucagagccaccagaauu

SEQ ID NO: 2076 - RNA, 1834 nt, Artificial Sequence
  mRNA product Design b-3 comprising derived and/or modified sequence from HRSV(A2)__F-del_DSCav1_mut1 (opt6)
gggagagucccgcagucggcguccagcggcucugcuuguucgugugugugucguugcaggccuuauucaagcuuaccauggaacuacucaucuuaaaagcaaacgcaauaacaacuauucuaaccgcaguaacauuuuguuucgcaucaggacaaaacauaaccgaagaauuuuaccaaucaacauguuccgcaguuucaaaaggauacuuaggcgcacuaagaacaggcugguacaccuccgugauaacaauagaauuaucaaacauaaaagaaaacaaauguaauggaacugacgccaaaguaaaacuaauaaaacaagaacuagacaaauauaaaaacgcaguaacugaacuacaauuacuaaugcaauccaccccagcaacaggcucaggcucagcaauuugcuccggagucgcugucugcaaaguacuacaucuugaaggcgaagucaauaaaauaaaaucagcacuucuaucaacaaacaaagcaguagucucacuaucaaacggaguaucaguacuaacauuuaaaguauuagaucuaaaaaacuauauagauaaacaacuacuacccauacucaauaaacaauccuguucaauaccaaauauagaaaccguaauagaauuucaacaaaaaaacaaucgacuauuagaaaucacccgagaauuuucagucaaugcaggcguaacaacaccaguaucaaccuacauguuaaccaacuccgaacuacuaucccucauaaacgacaugccaauaacaaacgaucaaaaaaaacuaauguccaacaacguacaaauagucagacaacaaucuuauucaauaaugugcaucauaaaagaagaaguucuagccuacguaguucaacuuccauuauacggcguaauugauacaccaugcuggaaacuacacacauccccacuauguacaacaaacacaaaagaaggaucaaacaucugcuuaacuagaacagacagaggaugguacugcgacaacgcaggaucagucucauucuuuccacaagcagaaacaugcaagguccaaucaaacagaguauucugcgacacaaugaacuccuuaacacuaccaucugaaguaaaccuauguaauguagacauauuuaacccaaaauacgacugcaaaauaaugaccucaaaaacagacguauccucaucaguaauuacaagccucggagccauaguaucaugcuacggaaaaacaaaauguacagcaucaaacaaaaacagaggaauaauaaaaacguucuccaacggaugcgacuauguaucaaacaaaggcguagacacaguaucagucggaaauacccuuuacugcguaaacaaacaagaaggccaaagucuauacguaaaaggagagccaauaauaaacuuuuaugacccccuuguauucccaucugacgaauuugaugcaucaauaucccaagucaacgaaaaaaucaaccaaucauuagccuuuauuagaaaaagugacgaacuauuacacaacguuaaugcagggaaaucaacaacaaauauaaugauuacaaccauaauuauaguuaucauaguuauacuacucucacuaaucgcaguaggauuacuauuauacugcaaagcaagauaaggacuaguguccaccugucccuccugggcugcuggauugucucguuuuccugccaaauaaacaggaucagcgcuuuacagaucuaaaaaaaaaaaaaaaaaaaaaaaaaaaaaaaaaaaaaaaaaaaaaaaaaaaaaaaaaaaaaaaaugcaucccccccccccccccccccccccccccccccaaaggcucuuuucagagccaccagaauu

SEQ ID NO: 2077 - RNA, 1834 nt, Artificial Sequence
  mRNA product Design b-3 comprising derived and/or modified sequence from HRSV(A2)__F-del_DSCav1_mut1 (opt11)
gggagagucccgcagucggcguccagcggcucugcuuguucgugugugugucguugcaggccuuauucaagcuuaccauggaacuacucauccuaaaagccaacgcaaucacaaccauacuuacagcuguuaccuucugcuucgcauccggccaaaauaucaccgaagaguucuaccaaucaaccugcuccgccgucagcaaaggauaccucggcgcccuccgaaccggaugguacacuucugucaucacaaucgaacucuccaacaucaaagaaaacaaaugcaacgguaccgacgcgaaagucaaacucaucaaacaagaacuagacaaguacaaaaacgccgucaccgaacugcaacuccucaugcaauccacaccagcaacgggaucaggauccgccaucugcucaggcgucgccgucugcaaaguccugcaccuagaaggagaaguaaacaaaauuaaauccgcccuacucuccaccaacaaagcagucgucucacuauccaacggcgucuccguccucaccuuuaagguccucgaccucaaaaauuauauagacaaacaacuccuccccauccuaaacaaacaaucaugcuccauccccaacauagaaaccgucaucgaauuucaacagaaaaacaaccgacucuuagaaauuacccgcgaguucagcgucaacgccggagucaccacacccgucucaaccuacaugcucaccaacucagaacuccucucacuaaucaaugauaugcccaucacaaacgaccaaaagaaacucauguccaacaacguacaaaucguucgccaacaaagcuacuccaucauguguaucauuaaagaagaaguccucgccuacgucguccaacuuccgcucuacggcguaaucgacacccccugcuggaaacuucacaccucgccccucugcaccacaaacaccaaagaaggcuccaacaucugccuaacccgcaccgaccgcggcugguacugcgacaacgccggcuccgucucauuuuucccccaggcggagaccugcaaaguccaauccaaccgcgucuucugcgacaccaugaacucucuuacccucccaucagaaguaaaccucugcaacgucgacaucuuuaaccccaaauacgauugcaagauaaugaccuccaaaacagacgucucaucguccgucaucaccucccuaggagcuaucgucuccugcuacggcaagaccaaaugcaccgcuuccaacaaaaaccgcggcaucaucaaaaccuucuccaacgggugcgacuacgucucuaacaaaggcguggacacaguauccguaggaaacacacuguacugcguaaacaaacaagagggccaaucgcuuuacgucaaaggcgagccaauuaucaacuucuacgacccgcucgucuucccaucagacgaguucgacgcauccaucucccaagucaacgagaaaaucaaucagucccucgccuucauacgcaaauccgacgaacuccuacauaacguaaacgccggcaaaucuaccacaaacaucaugaucacaaccaucaucaucguaaucaucgucauccuucucucgcucaucgccguaggacugcuacuuuacugcaaggcccgcuaaggacuaguguccaccugucccuccugggcugcuggauugucucguuuuccugccaaauaaacaggaucagcgcuuuacagaucuaaaaaaaaaaaaaaaaaaaaaaaaaaaaaaaaaaaaaaaaaaaaaaaaaaaaaaaaaaaaaaaaugcaucccccccccccccccccccccccccccccccaaaggcucuuuucagagccaccagaauu

SEQ ID NO: 2078 - RNA, 1885 nt, Artificial Sequence
  mRNA product Design b-4 comprising derived and/or modified sequence from HRSV(A2)__F-del_DSCav1_mut1 (opt1)
gggagagucccgcagucggcguccagcggcucugcuuguucgugugugugucguugcaggccuuauucaagcuuaccauggagcugcucauccugaaggccaacgccaucaccaccauccugacggcggugaccuucugcuucgccagcggccagaacaucaccgaggaguucuaccaguccacgugcagcgccgucuccaagggguaccucggcgcccugcggaccggcugguacaccuccgugaucaccaucgagcugagcaacaucaaggagaacaagugcaacgggaccgacgccaaggugaagcucaucaagcaggagcuggacaaguacaagaacgcggucacggagcugcagcuccugaugcaguccaccccggcaaccggcuccggcuccgccaucugcagcggcgucgccgugugcaaggugcugcaccucgagggggaggucaacaagaucaagagcgcccugcuguccaccaacaaggccguggugagccucuccaacggcgucagcgugcugaccuucaaggugcuggaccucaagaacuacaucgacaagcagcugcugcccauccugaacaagcagagcugcuccauccccaacaucgagacggugaucgaguuccagcagaagaacaaccggcuccuggagaucacccgcgaguucagcgugaacgccggggucaccacccccguguccacguacaugcugaccaacagcgagcuccugucccugaucaacgacaugccgaucaccaacgaccagaagaagcucaugagcaacaacgugcagaucguccggcagcaguccuacagcaucaugugcaucaucaaggaggaggugcuggcguacgugguccagcugccccucuacggcgugaucgacacccccugcuggaagcugcacacgagcccccugugcaccaccaacaccaaggagggguccaacaucugccucacgcgcaccgaccggggcugguacugcgacaacgccggcagcgucuccuucuucccgcaggccgagaccugcaaggugcagagcaaccgcguguucugcgacaccaugaacucccugacgcugcccagcgagguaaaccucugcaacgucgacaucuucaaccccaaguacgacugcaagaucaugaccuccaagaccgacgugagcuccagcgugaucaccucccugggggccaucgucagcugcuacggcaagacgaagugcaccgccagcaacaagaaccgggggaucaucaagaccuucuccaacggcugcgacuacgugagcaacaagggcguggacaccguguccgucgggaacacccuguacugcgugaacaagcaggagggccagagccucuacgugaagggggagcccaucaucaacuucuacgacccgcuggucuuccccuccgacgaguucgacgcgagcaucucccaggugaacgagaagaucaaccagagccuggccuucauccgcaaguccgacgagcugcuccacaacgugaacgccggcaagagcacgaccaacaucaugaucaccaccaucaucaucgucaucaucgugauccugcugucccucaucgccguggggcugcugcucuacugcaaggcccggugaggacuaguaauaaggaaacuguaugaaugucugugggcaggaagugaagagauccuucuguaaagguuuuuggaauuaugucugcugaauaauaaacuuuuuugaaauaauaaaucugguagaaaaaugagaucuaaaaaaaaaaaaaaaaaaaaaaaaaaaaaaaaaaaaaaaaaaaaaaaaaaaaaaaaaaaaaaaaugcaucccccccccccccccccccccccccccccccaaaggcucuuuucagagccaccagaauu

SEQ ID NO: 2079 - RNA, 1885 nt, Artificial Sequence
  mRNA product Design b-4 comprising derived and/or modified sequence from HRSV(A2)__F-del_DSCav1_mut1 (opt1)
gggagagucccgcagucggcguccagcggcucugcuuguucgugugugugucguugcaggccuuauucaagcuuaccauggagcugcucauccugaaggccaacgccaucaccaccauccugacggcggugaccuucugcuucgccagcggccagaacaucaccgaggaguucuaccaguccacgugcagcgccgucuccaagggguaccucggcgcccugcgcaccgggugguacaccagcgugaucaccaucgagcuguccaacaucaaggagaacaagugcaacggcaccgacgccaaggugaagcucaucaagcaggagcuggacaaguacaagaacgcggucacggagcugcagcuccugaugcagagcacccccgccaccggguccggcagcgccaucugcuccggcguggccgugugcaagguccugcaccucgagggggaggugaacaagaucaagagcgcgcugcuguccaccaacaaggccguggucagccucuccaacggcgugagcgugcugacguucaagguccuggaccucaagaacuacaucgacaagcagcugcugccgauccucaacaagcaguccugcagcauccccaacaucgagaccgugaucgaguuccagcagaagaacaaccggcugcuggagaucacccgcgaguucuccgugaacgccggggucaccacgcccgugagcaccuacaugcucaccaacuccgagcugcugagccucaucaacgacaugcccaucaccaacgaccagaagaagcugaugagcaacaacgugcagaucguccggcagcaguccuacagcaucaugugcaucaucaaggaggaggugcuggccuacgugguccagcucccgcuguacggcgugaucgacacgcccugcuggaagcugcacaccagcccccucugcaccaccaacacgaaggagggguccaacaucugccugacccgcaccgaccggggcugguacugcgacaacgccggcuccgugagcuucuucccccaggcggagaccugcaagguccaguccaaccgcguguucugcgacacgaugaacagccugacccucccguccgaggucaaccugugcaacguggacaucuucaaccccaaguacgacugcaagaucaugaccagcaagaccgacguguccagcuccgucaucacgagccugggggccaucguguccugcuacggcaagaccaagugcaccgccagcaacaagaaccgggggaucaucaagaccuucuccaacggcugcgacuacgugagcaacaagggcgucgacacgguguccguggggaacacccucuacugcgucaacaagcaggagggccagagccuguacgugaagggggagcccaucaucaacuucuacgacccccugguguucccgagcgacgaguucgacgccuccaucagccaggucaacgagaagaucaaccagucccucgccuucauccgcaagagcgacgagcugcugcacaacgugaacgcgggcaaguccaccaccaacaucaugaucaccacgaucaucaucgugaucaucgucauccuccugagccugaucgccguggggcuccugcuguacugcaaggcccggugaggacuaguaauaaggaaacuguaugaaugucugugggcaggaagugaagagauccuucuguaaagguuuuuggaauuaugucugcugaauaauaaacuuuuuugaaauaauaaaucugguagaaaaaugagaucuaaaaaaaaaaaaaaaaaaaaaaaaaaaaaaaaaaaaaaaaaaaaaaaaaaaaaaaaaaaaaaaaugcaucccccccccccccccccccccccccccccccaaaggcucuuuucagagccaccagaauu

SEQ ID NO: 2080 - RNA, 1885 nt, Artificial Sequence
  mRNA product Design b-4 comprising derived and/or modified sequence from HRSV(A2)__F-del_DSCav1_mut1 (opt2)
gggagagucccgcagucggcguccagcggcucugcuuguucgugugugugucguugcaggccuuauucaagcuuaccauggagcuccucauccucaaggccaacgccaucaccaccauccucaccgccgucaccuucugcuucgccuccggccagaacaucaccgaggaguucuaccaguccaccugcuccgccgucuccaagggcuaccucggcgcccuccgcaccggcugguacaccuccgucaucaccaucgagcucuccaacaucaaggagaacaagugcaacggcaccgacgccaaggucaagcucaucaagcaggagcucgacaaguacaagaacgccgucaccgagcuccagcuccucaugcaguccacccccgccaccggcuccggcuccgccaucugcuccggcgucgccgucugcaagguccuccaccucgagggcgaggucaacaagaucaaguccgcccuccucuccaccaacaaggccgucgucucccucuccaacggcgucuccguccucaccuucaagguccucgaccucaagaacuacaucgacaagcagcuccuccccauccucaacaagcaguccugcuccauccccaacaucgagaccgucaucgaguuccagcagaagaacaaccgccuccucgagaucacccgcgaguucuccgucaacgccggcgucaccacccccgucuccaccuacaugcucaccaacuccgagcuccucucccucaucaacgacaugcccaucaccaacgaccagaagaagcucauguccaacaacguccagaucguccgccagcaguccuacuccaucaugugcaucaucaaggaggagguccucgccuacgucguccagcucccccucuacggcgucaucgacacccccugcuggaagcuccacaccuccccccucugcaccaccaacaccaaggagggcuccaacaucugccucacccgcaccgaccgcggcugguacugcgacaacgccggcuccgucuccuucuucccccaggccgagaccugcaagguccaguccaaccgcgucuucugcgacaccaugaacucccucacccuccccuccgaggucaaccucugcaacgucgacaucuucaaccccaaguacgacugcaagaucaugaccuccaagaccgacgucuccuccuccgucaucaccucccucggcgccaucgucuccugcuacggcaagaccaagugcaccgccuccaacaagaaccgcggcaucaucaagaccuucuccaacggcugcgacuacgucuccaacaagggcgucgacaccgucuccgucggcaacacccucuacugcgucaacaagcaggagggccagucccucuacgucaagggcgagcccaucaucaacuucuacgacccccucgucuuccccuccgacgaguucgacgccuccaucucccaggucaacgagaagaucaaccagucccucgccuucauccgcaaguccgacgagcuccuccacaacgucaacgccggcaaguccaccaccaacaucaugaucaccaccaucaucaucgucaucaucgucauccuccucucccucaucgccgucggccuccuccucuacugcaaggcccgcugaggacuaguaauaaggaaacuguaugaaugucugugggcaggaagugaagagauccuucuguaaagguuuuuggaauuaugucugcugaauaauaaacuuuuuugaaauaauaaaucugguagaaaaaugagaucuaaaaaaaaaaaaaaaaaaaaaaaaaaaaaaaaaaaaaaaaaaaaaaaaaaaaaaaaaaaaaaaaugcaucccccccccccccccccccccccccccccccaaaggcucuuuucagagccaccagaauu

SEQ ID NO: 2081 - RNA, 1885 nt, Artificial Sequence
  mRNA product Design b-4 comprising derived and/or modified sequence from HRSV(A2)__F-del_DSCav1_mut1 (opt3)
gggagagucccgcagucggcguccagcggcucugcuuguucgugugugugucguugcaggccuuauucaagcuuaccauggagcugcucauccuuaaggccaacgcuauuaccacaauacugacugcagugacguucugcuuugccagcggccagaauaucaccgaagaguucuaccaauccacauguucugcggucucaaaaggguauuugggagcuuuaagaacugguugguacaccaguguuauuacaaucgaacugagcaacauuaaggagaauaaaugcaacggcaccgacgccaaggugaaacuaaucaagcaggaacucgauaaguauaaaaaugcaguaacugagcugcagcuucugaugcaguccacacccgccaccgggucuggaucggcuauauguucaggcguggcagucugcaagguguugcaccucgagggugaaguuaacaaaaucaagagcgcccugcugaguacgaauaaagcuguggucucccucucuaacggggugagcguauuaacuuuuaagguucuggaccuuaagaauuacauugauaaacaauugcugccuauccuaaacaagcaguccuguucaauuccaaauaucgagaccgugauagaguuccagcagaaaaacaauaggcuccuggaaauuacacgggaguuuagugucaacgccggagugacuaccccggugagcacauauaugcuuaccaauucugaacuguugucccucaucaacgacaugcccauuacgaacgaucaaaagaaacugaugucaaauaacguccagaucguucgccagcagagcuacaguaucaugugcauuauaaaggaggaaguguuagcguauguagugcaacugccucucuacggcgucaucgacacuccauguuggaaacuucauacaucuccccugugcaccacuaauacaaaggagggcuccaacauuuguuugacccgaacggaucgugggugguacugcgacaaugcaggaagcgugucguucuuuccucaggccgaaaccuguaagguucagucuaacagaguguucugcgauacaaugaacucccuaacucugccaucagaggucaaucucugcaauguggacaucuuuaaccccaaauaugauuguaagauaaugaccaguaaaacagacguaagcuccucuguuauuacuagccugggugcuaucgugucaugcuacggcaagaccaaauguacagccaguaauaagaacagggggaucauuaagaccuucuccaauggaugcgauuaugucagcaacaaaggcguggacacugucucuguggguaauacgcuuuacuguguuaacaagcaagaggggcagucacuguaugugaaaggagaaccuaucauuaacuuuuacgacccauugguauucccgagugaugaguuugacgcaagcauaucccaggucaaugaaaagaucaaccagucucucgcuuucauucggaaaucggaugagcuguuacacaaugugaacgccggcaagagcacaaccaauaucaugaucacuaccauuauaaucguuauuaucgugauucugcuaucccucaucgcggucggccugcuuuuguauugcaaggcccgcugaggacuaguaauaaggaaacuguaugaaugucugugggcaggaagugaagagauccuucuguaaagguuuuuggaauuaugucugcugaauaauaaacuuuuuugaaauaauaaaucugguagaaaaaugagaucuaaaaaaaaaaaaaaaaaaaaaaaaaaaaaaaaaaaaaaaaaaaaaaaaaaaaaaaaaaaaaaaaugcaucccccccccccccccccccccccccccccccaaaggcucuuuucagagccaccagaauu

SEQ ID NO: 2082 - RNA, 1885 nt, Artificial Sequence
  mRNA product Design b-4 comprising derived and/or modified sequence from HRSV(A2)__F-del_DSCav1_mut1 (opt4)
gggagagucccgcagucggcguccagcggcucugcuuguucgugugugugucguugcaggccuuauucaagcuuaccauggagcugcugauccugaaggccaacgccaucaccaccauccugaccgccgugaccuucugcuucgccagcggccagaacaucaccgaggaguucuaccagagcaccugcagcgccgugagcaagggcuaccugggcgcccugagaaccggcugguacaccagcgugaucaccaucgagcugagcaacaucaaggagaacaagugcaacggcaccgacgccaaggugaagcugaucaagcaggagcuggacaaguacaagaacgccgugaccgagcugcagcugcugaugcagagcacccccgccaccggcagcggcagcgccaucugcagcggcguggccgugugcaaggugcugcaccuggagggcgaggugaacaagaucaagagcgcccugcugagcaccaacaaggccguggugagccugagcaacggcgugagcgugcugaccuucaaggugcuggaccugaagaacuacaucgacaagcagcugcugcccauccugaacaagcagagcugcagcauccccaacaucgagaccgugaucgaguuccagcagaagaacaacagacugcuggagaucaccagagaguucagcgugaacgccggcgugaccacccccgugagcaccuacaugcugaccaacagcgagcugcugagccugaucaacgacaugcccaucaccaacgaccagaagaagcugaugagcaacaacgugcagaucgugagacagcagagcuacagcaucaugugcaucaucaaggaggaggugcuggccuacguggugcagcugccccuguacggcgugaucgacacccccugcuggaagcugcacaccagcccccugugcaccaccaacaccaaggagggcagcaacaucugccugaccagaaccgacagaggcugguacugcgacaacgccggcagcgugagcuucuucccccaggccgagaccugcaaggugcagagcaacagaguguucugcgacaccaugaacagccugacccugcccagcgaggugaaccugugcaacguggacaucuucaaccccaaguacgacugcaagaucaugaccagcaagaccgacgugagcagcagcgugaucaccagccugggcgccaucgugagcugcuacggcaagaccaagugcaccgccagcaacaagaacagaggcaucaucaagaccuucagcaacggcugcgacuacgugagcaacaagggcguggacaccgugagcgugggcaacacccuguacugcgugaacaagcaggagggccagagccuguacgugaagggcgagcccaucaucaacuucuacgacccccugguguuccccagcgacgaguucgacgccagcaucagccaggugaacgagaagaucaaccagagccuggccuucaucagaaagagcgacgagcugcugcacaacgugaacgccggcaagagcaccaccaacaucaugaucaccaccaucaucaucgugaucaucgugauccugcugagccugaucgccgugggccugcugcuguacugcaaggccagaugaggacuaguaauaaggaaacuguaugaaugucugugggcaggaagugaagagauccuucuguaaagguuuuuggaauuaugucugcugaauaauaaacuuuuuugaaauaauaaaucugguagaaaaaugagaucuaaaaaaaaaaaaaaaaaaaaaaaaaaaaaaaaaaaaaaaaaaaaaaaaaaaaaaaaaaaaaaaaugcaucccccccccccccccccccccccccccccccaaaggcucuuuucagagccaccagaauu

SEQ ID NO: 2083 - RNA, 1885 nt, Artificial Sequence
  mRNA product Design b-4 comprising derived and/or modified sequence from HRSV(A2)__F-del_DSCav1_mut1 (opt5)
gggagagucccgcagucggcguccagcggcucugcuuguucgugugugugucguugcaggccuuauucaagcuuaccauggagcugcucauccugaaggccaacgcuauuaccacaauccuuacggccgugaccuucugcuuugcgagcggccagaauauuacagaagaguucuaccaauccaccuguucugcugucagcaaaggguaucugggagcccucagaacaggcugguacaccuccguuaucacaauugaacugucuaacaucaaggagaauaaaugcaacgggaccgacgccaaggugaaacuuaucaagcaggaacuggauaaguauaaaaaugcugugacggagcuccagcugcugaugcagagcacccccgccacaggauccggcucugcuauuuguagcggggucgccgugugcaagguucuccaccuggagggagaagugaacaaaaucaaguccgcgcuucugagcaccaauaaagccgucgugucucucuccaacggcguuagcgugcugacauuuaagguccuugaccugaagaauuacauugauaaacaacuccugccuauccugaacaagcagucuuguuccauuccgaauaucgagaccgugauugaguuccagcagaaaaacaaucggcuccuggaaaucacgcgcgaguuuagcgugaacgcuggcgucacaacccccguuucuacauauaugcuuaccaauuccgaacugcucagccugaucaacgacaugccuauuaccaacgaucaaaagaaacuuauguccaauaacgugcagaucgugagacagcagucuuacagcauuaugugcaucauuaaggaggaaguccuggccuaugugguucaacucccccuguacggggugaucgacacaccuuguuggaaacugcauacgagcccccucugcaccacaaauaccaaggagggauccaacaucugucugacacggaccgaucgcggcugguacugcgacaaugcugggucugucuccuucuuuccucaggccgaaacguguaaggugcagagcaacagaguuuucugcgauacaaugaacucucuuacccugccgagcgaggugaaucucugcaaugucgacauuuuuaaccccaaauaugauuguaagaucaugaccuccaaaacagacgugucuagcuccgucauuaccagccugggagcgaucgugucuugcuacggcaagacaaaauguacggccuccaauaagaaccgggggauuaucaagaccuucagcaauggaugcgauuauguuucuaacaaaggcguggacacagucuccgugggcaauacccuuuacuguguuaacaagcaagaggggcagagccuguaugugaaaggagaaccuaucauuaacuuuuacgacccccucgucuucccuuccgaugaguuugacgcuucuaucagccaggugaaugaaaagauuaaccagucccuggccuucauccgcaaaucugaugagcugcuccacaaugugaacgcuggcaagagcacaaccaauauuaugaucacgaccauuaucaucguuauuaucgucauucugcuuucccugaucgccguggggcuccugcuguauugcaaggccagaugaggacuaguaauaaggaaacuguaugaaugucugugggcaggaagugaagagauccuucuguaaagguuuuuggaauuaugucugcugaauaauaaacuuuuuugaaauaauaaaucugguagaaaaaugagaucuaaaaaaaaaaaaaaaaaaaaaaaaaaaaaaaaaaaaaaaaaaaaaaaaaaaaaaaaaaaaaaaaugcaucccccccccccccccccccccccccccccccaaaggcucuuuucagagccaccagaauu

SEQ ID NO: 2084 - RNA, 1885 nt, Artificial Sequence
  mRNA product Design b-4 comprising derived and/or modified sequence from HRSV(A2)__F-del_DSCav1_mut1 (opt6)
gggagagucccgcagucggcguccagcggcucugcuuguucgugugugugucguugcaggccuuauucaagcuuaccauggaacuacucaucuuaaaagcaaacgcaauaacaacuauucuaaccgcaguaacauuuuguuucgcaucaggacaaaacauaaccgaagaauuuuaccaaucaacauguuccgcaguuucaaaaggauacuuaggcgcacuaagaacaggcugguacaccuccgugauaacaauagaauuaucaaacauaaaagaaaacaaauguaauggaacugacgccaaaguaaaacuaauaaaacaagaacuagacaaauauaaaaacgcaguaacugaacuacaauuacuaaugcaauccaccccagcaacaggcucaggcucagcaauuugcuccggagucgcugucugcaaaguacuacaucuugaaggcgaagucaauaaaauaaaaucagcacuucuaucaacaaacaaagcaguagucucacuaucaaacggaguaucaguacuaacauuuaaaguauuagaucuaaaaaacuauauagauaaacaacuacuacccauacucaauaaacaauccuguucaauaccaaauauagaaaccguaauagaauuucaacaaaaaaacaaucgacuauuagaaaucacccgagaauuuucagucaaugcaggcguaacaacaccaguaucaaccuacauguuaaccaacuccgaacuacuaucccucauaaacgacaugccaauaacaaacgaucaaaaaaaacuaauguccaacaacguacaaauagucagacaacaaucuuauucaauaaugugcaucauaaaagaagaaguucuagccuacguaguucaacuuccauuauacggcguaauugauacaccaugcuggaaacuacacacauccccacuauguacaacaaacacaaaagaaggaucaaacaucugcuuaacuagaacagacagaggaugguacugcgacaacgcaggaucagucucauucuuuccacaagcagaaacaugcaagguccaaucaaacagaguauucugcgacacaaugaacuccuuaacacuaccaucugaaguaaaccuauguaauguagacauauuuaacccaaaauacgacugcaaaauaaugaccucaaaaacagacguauccucaucaguaauuacaagccucggagccauaguaucaugcuacggaaaaacaaaauguacagcaucaaacaaaaacagaggaauaauaaaaacguucuccaacggaugcgacuauguaucaaacaaaggcguagacacaguaucagucggaaauacccuuuacugcguaaacaaacaagaaggccaaagucuauacguaaaaggagagccaauaauaaacuuuuaugacccccuuguauucccaucugacgaauuugaugcaucaauaucccaagucaacgaaaaaaucaaccaaucauuagccuuuauuagaaaaagugacgaacuauuacacaacguuaaugcagggaaaucaacaacaaauauaaugauuacaaccauaauuauaguuaucauaguuauacuacucucacuaaucgcaguaggauuacuauuauacugcaaagcaagauaaggacuaguaauaaggaaacuguaugaaugucugugggcaggaagugaagagauccuucuguaaagguuuuuggaauuaugucugcugaauaauaaacuuuuuugaaauaauaaaucugguagaaaaaugagaucuaaaaaaaaaaaaaaaaaaaaaaaaaaaaaaaaaaaaaaaaaaaaaaaaaaaaaaaaaaaaaaaaugcaucccccccccccccccccccccccccccccccaaaggcucuuuucagagccaccagaauu

SEQ ID NO: 2085 - RNA, 1885 nt, Artificial Sequence
  mRNA product Design b-4 comprising derived and/or modified sequence from HRSV(A2)__F-del_DSCav1_mut1 (opt11)
gggagagucccgcagucggcguccagcggcucugcuuguucgugugugugucguugcaggccuuauucaagcuuaccauggaacuacucauccuaaaagccaacgcaaucacaaccauacuuacagcuguuaccuucugcuucgcauccggccaaaauaucaccgaagaguucuaccaaucaaccugcuccgccgucagcaaaggauaccucggcgcccuccgaaccggaugguacacuucugucaucacaaucgaacucuccaacaucaaagaaaacaaaugcaacgguaccgacgcgaaagucaaacucaucaaacaagaacuagacaaguacaaaaacgccgucaccgaacugcaacuccucaugcaauccacaccagcaacgggaucaggauccgccaucugcucaggcgucgccgucugcaaaguccugcaccuagaaggagaaguaaacaaaauuaaauccgcccuacucuccaccaacaaagcagucgucucacuauccaacggcgucuccguccucaccuuuaagguccucgaccucaaaaauuauauagacaaacaacuccuccccauccuaaacaaacaaucaugcuccauccccaacauagaaaccgucaucgaauuucaacagaaaaacaaccgacucuuagaaauuacccgcgaguucagcgucaacgccggagucaccacacccgucucaaccuacaugcucaccaacucagaacuccucucacuaaucaaugauaugcccaucacaaacgaccaaaagaaacucauguccaacaacguacaaaucguucgccaacaaagcuacuccaucauguguaucauuaaagaagaaguccucgccuacgucguccaacuuccgcucuacggcguaaucgacacccccugcuggaaacuucacaccucgccccucugcaccacaaacaccaaagaaggcuccaacaucugccuaacccgcaccgaccgcggcugguacugcgacaacgccggcuccgucucauuuuucccccaggcggagaccugcaaaguccaauccaaccgcgucuucugcgacaccaugaacucucuuacccucccaucagaaguaaaccucugcaacgucgacaucuuuaaccccaaauacgauugcaagauaaugaccuccaaaacagacgucucaucguccgucaucaccucccuaggagcuaucgucuccugcuacggcaagaccaaaugcaccgcuuccaacaaaaaccgcggcaucaucaaaaccuucuccaacgggugcgacuacgucucuaacaaaggcguggacacaguauccguaggaaacacacuguacugcguaaacaaacaagagggccaaucgcuuuacgucaaaggcgagccaauuaucaacuucuacgacccgcucgucuucccaucagacgaguucgacgcauccaucucccaagucaacgagaaaaucaaucagucccucgccuucauacgcaaauccgacgaacuccuacauaacguaaacgccggcaaaucuaccacaaacaucaugaucacaaccaucaucaucguaaucaucgucauccuucucucgcucaucgccguaggacugcuacuuuacugcaaggcccgcuaaggacuaguaauaaggaaacuguaugaaugucugugggcaggaagugaagagauccuucuguaaagguuuuuggaauuaugucugcugaauaauaaacuuuuuugaaauaauaaaucugguagaaaaaugagaucuaaaaaaaaaaaaaaaaaaaaaaaaaaaaaaaaaaaaaaaaaaaaaaaaaaaaaaaaaaaaaaaaugcaucccccccccccccccccccccccccccccccaaaggcucuuuucagagccaccagaauu

SEQ ID NO: 2086 - RNA, 1947 nt, Artificial Sequence
  mRNA product Design b-5 comprising derived and/or modified sequence from HRSV(A2)__F-del_DSCav1_mut1 (opt1)
gggagacuccugucgggcggaaguaggaggaguagaguuuaaaaacaguacucuuuuuccgguucgggacguaguugaagcaacgacaagccggauaaccgcucuugagacaggaagcuuaccauggagcugcucauccugaaggccaacgccaucaccaccauccugacggcggugaccuucugcuucgccagcggccagaacaucaccgaggaguucuaccaguccacgugcagcgccgucuccaagggguaccucggcgcccugcggaccggcugguacaccuccgugaucaccaucgagcugagcaacaucaaggagaacaagugcaacgggaccgacgccaaggugaagcucaucaagcaggagcuggacaaguacaagaacgcggucacggagcugcagcuccugaugcaguccaccccggcaaccggcuccggcuccgccaucugcagcggcgucgccgugugcaaggugcugcaccucgagggggaggucaacaagaucaagagcgcccugcuguccaccaacaaggccguggugagccucuccaacggcgucagcgugcugaccuucaaggugcuggaccucaagaacuacaucgacaagcagcugcugcccauccugaacaagcagagcugcuccauccccaacaucgagacggugaucgaguuccagcagaagaacaaccggcuccuggagaucacccgcgaguucagcgugaacgccggggucaccacccccguguccacguacaugcugaccaacagcgagcuccugucccugaucaacgacaugccgaucaccaacgaccagaagaagcucaugagcaacaacgugcagaucguccggcagcaguccuacagcaucaugugcaucaucaaggaggaggugcuggcguacgugguccagcugccccucuacggcgugaucgacacccccugcuggaagcugcacacgagcccccugugcaccaccaacaccaaggagggguccaacaucugccucacgcgcaccgaccggggcugguacugcgacaacgccggcagcgucuccuucuucccgcaggccgagaccugcaaggugcagagcaaccgcguguucugcgacaccaugaacucccugacgcugcccagcgagguaaaccucugcaacgucgacaucuucaaccccaaguacgacugcaagaucaugaccuccaagaccgacgugagcuccagcgugaucaccucccugggggccaucgucagcugcuacggcaagacgaagugcaccgccagcaacaagaaccgggggaucaucaagaccuucuccaacggcugcgacuacgugagcaacaagggcguggacaccguguccgucgggaacacccuguacugcgugaacaagcaggagggccagagccucuacgugaagggggagcccaucaucaacuucuacgacccgcuggucuuccccuccgacgaguucgacgcgagcaucucccaggugaacgagaagaucaaccagagccuggccuucauccgcaaguccgacgagcugcuccacaacgugaacgccggcaagagcacgaccaacaucaugaucaccaccaucaucaucgucaucaucgugauccugcugucccucaucgccguggggcugcugcucuacugcaaggcccggugaggacuaguacuggcugcaucucccuuuccucuguccuccauccuucucccaggauggugaagggggaccugguacccagugauccccaccccaggauccuaaaucaugacuuaccugcuaauaaaaacucauuggaaaagugagaagaucuaaaaaaaaaaaaaaaaaaaaaaaaaaaaaaaaaaaaaaaaaaaaaaaaaaaaaaaaaaaaaaaaugcaucccccccccccccccccccccccccccccccaaaggcucuuuucagagccaccagaauu

SEQ ID NO: 2087 - RNA, 1947 nt, Artificial Sequence
  mRNA product Design b-5 comprising derived and/or modified sequence from HRSV(A2)__F-del_DSCav1_mut1 (opt1)
gggagacuccugucgggcggaaguaggaggaguagaguuuaaaaacaguacucuuuuuccgguucgggacguaguugaagcaacgacaagccggauaaccgcucuugagacaggaagcuuaccauggagcugcucauccugaaggccaacgccaucaccaccauccugacggcggugaccuucugcuucgccagcggccagaacaucaccgaggaguucuaccaguccacgugcagcgccgucuccaagggguaccucggcgcccugcgcaccgggugguacaccagcgugaucaccaucgagcuguccaacaucaaggagaacaagugcaacggcaccgacgccaaggugaagcucaucaagcaggagcuggacaaguacaagaacgcggucacggagcugcagcuccugaugcagagcacccccgccaccggguccggcagcgccaucugcuccggcguggccgugugcaagguccugcaccucgagggggaggugaacaagaucaagagcgcgcugcuguccaccaacaaggccguggucagccucuccaacggcgugagcgugcugacguucaagguccuggaccucaagaacuacaucgacaagcagcugcugccgauccucaacaagcaguccugcagcauccccaacaucgagaccgugaucgaguuccagcagaagaacaaccggcugcuggagaucacccgcgaguucuccgugaacgccggggucaccacgcccgugagcaccuacaugcucaccaacuccgagcugcugagccucaucaacgacaugcccaucaccaacgaccagaagaagcugaugagcaacaacgugcagaucguccggcagcaguccuacagcaucaugugcaucaucaaggaggaggugcuggccuacgugguccagcucccgcuguacggcgugaucgacacgcccugcuggaagcugcacaccagcccccucugcaccaccaacacgaaggagggguccaacaucugccugacccgcaccgaccggggcugguacugcgacaacgccggcuccgugagcuucuucccccaggcggagaccugcaagguccaguccaaccgcguguucugcgacacgaugaacagccugacccucccguccgaggucaaccugugcaacguggacaucuucaaccccaaguacgacugcaagaucaugaccagcaagaccgacguguccagcuccgucaucacgagccugggggccaucguguccugcuacggcaagaccaagugcaccgccagcaacaagaaccgggggaucaucaagaccuucuccaacggcugcgacuacgugagcaacaagggcgucgacacgguguccguggggaacacccucuacugcgucaacaagcaggagggccagagccuguacgugaagggggagcccaucaucaacuucuacgacccccugguguucccgagcgacgaguucgacgccuccaucagccaggucaacgagaagaucaaccagucccucgccuucauccgcaagagcgacgagcugcugcacaacgugaacgcgggcaaguccaccaccaacaucaugaucaccacgaucaucaucgugaucaucgucauccuccugagccugaucgccguggggcuccugcuguacugcaaggcccggugaggacuaguacuggcugcaucucccuuuccucuguccuccauccuucucccaggauggugaagggggaccugguacccagugauccccaccccaggauccuaaaucaugacuuaccugcuaauaaaaacucauuggaaaagugagaagaucuaaaaaaaaaaaaaaaaaaaaaaaaaaaaaaaaaaaaaaaaaaaaaaaaaaaaaaaaaaaaaaaaugcaucccccccccccccccccccccccccccccccaaaggcucuuuucagagccaccagaauu

SEQ ID NO: 2088 - RNA, 1947 nt, Artificial Sequence
  mRNA product Design b-5 comprising derived and/or modified sequence from HRSV(A2)__F-del_DSCav1_mut1 (opt2)
gggagacuccugucgggcggaaguaggaggaguagaguuuaaaaacaguacucuuuuuccgguucgggacguaguugaagcaacgacaagccggauaaccgcucuugagacaggaagcuuaccauggagcuccucauccucaaggccaacgccaucaccaccauccucaccgccgucaccuucugcuucgccuccggccagaacaucaccgaggaguucuaccaguccaccugcuccgccgucuccaagggcuaccucggcgcccuccgcaccggcugguacaccuccgucaucaccaucgagcucuccaacaucaaggagaacaagugcaacggcaccgacgccaaggucaagcucaucaagcaggagcucgacaaguacaagaacgccgucaccgagcuccagcuccucaugcaguccacccccgccaccggcuccggcuccgccaucugcuccggcgucgccgucugcaagguccuccaccucgagggcgaggucaacaagaucaaguccgcccuccucuccaccaacaaggccgucgucucccucuccaacggcgucuccguccucaccuucaagguccucgaccucaagaacuacaucgacaagcagcuccuccccauccucaacaagcaguccugcuccauccccaacaucgagaccgucaucgaguuccagcagaagaacaaccgccuccucgagaucacccgcgaguucuccgucaacgccggcgucaccacccccgucuccaccuacaugcucaccaacuccgagcuccucucccucaucaacgacaugcccaucaccaacgaccagaagaagcucauguccaacaacguccagaucguccgccagcaguccuacuccaucaugugcaucaucaaggaggagguccucgccuacgucguccagcucccccucuacggcgucaucgacacccccugcuggaagcuccacaccuccccccucugcaccaccaacaccaaggagggcuccaacaucugccucacccgcaccgaccgcggcugguacugcgacaacgccggcuccgucuccuucuucccccaggccgagaccugcaagguccaguccaaccgcgucuucugcgacaccaugaacucccucacccuccccuccgaggucaaccucugcaacgucgacaucuucaaccccaaguacgacugcaagaucaugaccuccaagaccgacgucuccuccuccgucaucaccucccucggcgccaucgucuccugcuacggcaagaccaagugcaccgccuccaacaagaaccgcggcaucaucaagaccuucuccaacggcugcgacuacgucuccaacaagggcgucgacaccgucuccgucggcaacacccucuacugcgucaacaagcaggagggccagucccucuacgucaagggcgagcccaucaucaacuucuacgacccccucgucuuccccuccgacgaguucgacgccuccaucucccaggucaacgagaagaucaaccagucccucgccuucauccgcaaguccgacgagcuccuccacaacgucaacgccggcaaguccaccaccaacaucaugaucaccaccaucaucaucgucaucaucgucauccuccucucccucaucgccgucggccuccuccucuacugcaaggcccgcugaggacuaguacuggcugcaucucccuuuccucuguccuccauccuucucccaggauggugaagggggaccugguacccagugauccccaccccaggauccuaaaucaugacuuaccugcuaauaaaaacucauuggaaaagugagaagaucuaaaaaaaaaaaaaaaaaaaaaaaaaaaaaaaaaaaaaaaaaaaaaaaaaaaaaaaaaaaaaaaaugcaucccccccccccccccccccccccccccccccaaaggcucuuuucagagccaccagaauu

SEQ ID NO: 2089 - RNA, 1947 nt, Artificial Sequence
  mRNA product Design b-5 comprising derived and/or modified sequence from HRSV(A2)__F-del_DSCav1_mut1 (opt3)
gggagacuccugucgggcggaaguaggaggaguagaguuuaaaaacaguacucuuuuuccgguucgggacguaguugaagcaacgacaagccggauaaccgcucuugagacaggaagcuuaccauggagcugcucauccuuaaggccaacgcuauuaccacaauacugacugcagugacguucugcuuugccagcggccagaauaucaccgaagaguucuaccaauccacauguucugcggucucaaaaggguauuugggagcuuuaagaacugguugguacaccaguguuauuacaaucgaacugagcaacauuaaggagaauaaaugcaacggcaccgacgccaaggugaaacuaaucaagcaggaacucgauaaguauaaaaaugcaguaacugagcugcagcuucugaugcaguccacacccgccaccgggucuggaucggcuauauguucaggcguggcagucugcaagguguugcaccucgagggugaaguuaacaaaaucaagagcgcccugcugaguacgaauaaagcuguggucucccucucuaacggggugagcguauuaacuuuuaagguucuggaccuuaagaauuacauugauaaacaauugcugccuauccuaaacaagcaguccuguucaauuccaaauaucgagaccgugauagaguuccagcagaaaaacaauaggcuccuggaaauuacacgggaguuuagugucaacgccggagugacuaccccggugagcacauauaugcuuaccaauucugaacuguugucccucaucaacgacaugcccauuacgaacgaucaaaagaaacugaugucaaauaacguccagaucguucgccagcagagcuacaguaucaugugcauuauaaaggaggaaguguuagcguauguagugcaacugccucucuacggcgucaucgacacuccauguuggaaacuucauacaucuccccugugcaccacuaauacaaaggagggcuccaacauuuguuugacccgaacggaucgugggugguacugcgacaaugcaggaagcgugucguucuuuccucaggccgaaaccuguaagguucagucuaacagaguguucugcgauacaaugaacucccuaacucugccaucagaggucaaucucugcaauguggacaucuuuaaccccaaauaugauuguaagauaaugaccaguaaaacagacguaagcuccucuguuauuacuagccugggugcuaucgugucaugcuacggcaagaccaaauguacagccaguaauaagaacagggggaucauuaagaccuucuccaauggaugcgauuaugucagcaacaaaggcguggacacugucucuguggguaauacgcuuuacuguguuaacaagcaagaggggcagucacuguaugugaaaggagaaccuaucauuaacuuuuacgacccauugguauucccgagugaugaguuugacgcaagcauaucccaggucaaugaaaagaucaaccagucucucgcuuucauucggaaaucggaugagcuguuacacaaugugaacgccggcaagagcacaaccaauaucaugaucacuaccauuauaaucguuauuaucgugauucugcuaucccucaucgcggucggccugcuuuuguauugcaaggcccgcugaggacuaguacuggcugcaucucccuuuccucuguccuccauccuucucccaggauggugaagggggaccugguacccagugauccccaccccaggauccuaaaucaugacuuaccugcuaauaaaaacucauuggaaaagugagaagaucuaaaaaaaaaaaaaaaaaaaaaaaaaaaaaaaaaaaaaaaaaaaaaaaaaaaaaaaaaaaaaaaaugcaucccccccccccccccccccccccccccccccaaaggcucuuuucagagccaccagaauu

SEQ ID NO: 2090 - RNA, 1947 nt, Artificial Sequence
  mRNA product Design b-5 comprising derived and/or modified sequence from HRSV(A2)__F-del_DSCav1_mut1 (opt4)
gggagacuccugucgggcggaaguaggaggaguagaguuuaaaaacaguacucuuuuuccgguucgggacguaguugaagcaacgacaagccggauaaccgcucuugagacaggaagcuuaccauggagcugcugauccugaaggccaacgccaucaccaccauccugaccgccgugaccuucugcuucgccagcggccagaacaucaccgaggaguucuaccagagcaccugcagcgccgugagcaagggcuaccugggcgcccugagaaccggcugguacaccagcgugaucaccaucgagcugagcaacaucaaggagaacaagugcaacggcaccgacgccaaggugaagcugaucaagcaggagcuggacaaguacaagaacgccgugaccgagcugcagcugcugaugcagagcacccccgccaccggcagcggcagcgccaucugcagcggcguggccgugugcaaggugcugcaccuggagggcgaggugaacaagaucaagagcgcccugcugagcaccaacaaggccguggugagccugagcaacggcgugagcgugcugaccuucaaggugcuggaccugaagaacuacaucgacaagcagcugcugcccauccugaacaagcagagcugcagcauccccaacaucgagaccgugaucgaguuccagcagaagaacaacagacugcuggagaucaccagagaguucagcgugaacgccggcgugaccacccccgugagcaccuacaugcugaccaacagcgagcugcugagccugaucaacgacaugcccaucaccaacgaccagaagaagcugaugagcaacaacgugcagaucgugagacagcagagcuacagcaucaugugcaucaucaaggaggaggugcuggccuacguggugcagcugccccuguacggcgugaucgacacccccugcuggaagcugcacaccagcccccugugcaccaccaacaccaaggagggcagcaacaucugccugaccagaaccgacagaggcugguacugcgacaacgccggcagcgugagcuucuucccccaggccgagaccugcaaggugcagagcaacagaguguucugcgacaccaugaacagccugacccugcccagcgaggugaaccugugcaacguggacaucuucaaccccaaguacgacugcaagaucaugaccagcaagaccgacgugagcagcagcgugaucaccagccugggcgccaucgugagcugcuacggcaagaccaagugcaccgccagcaacaagaacagaggcaucaucaagaccuucagcaacggcugcgacuacgugagcaacaagggcguggacaccgugagcgugggcaacacccuguacugcgugaacaagcaggagggccagagccuguacgugaagggcgagcccaucaucaacuucuacgacccccugguguuccccagcgacgaguucgacgccagcaucagccaggugaacgagaagaucaaccagagccuggccuucaucagaaagagcgacgagcugcugcacaacgugaacgccggcaagagcaccaccaacaucaugaucaccaccaucaucaucgugaucaucgugauccugcugagccugaucgccgugggccugcugcuguacugcaaggccagaugaggacuaguacuggcugcaucucccuuuccucuguccuccauccuucucccaggauggugaagggggaccugguacccagugauccccaccccaggauccuaaaucaugacuuaccugcuaauaaaaacucauuggaaaagugagaagaucuaaaaaaaaaaaaaaaaaaaaaaaaaaaaaaaaaaaaaaaaaaaaaaaaaaaaaaaaaaaaaaaaugcaucccccccccccccccccccccccccccccccaaaggcucuuuucagagccaccagaauu

SEQ ID NO: 2091 - RNA, 1947 nt, Artificial Sequence
  mRNA product Design b-5 comprising derived and/or modified sequence from HRSV(A2)__F-del_DSCav1_mut1 (opt5)
gggagacuccugucgggcggaaguaggaggaguagaguuuaaaaacaguacucuuuuuccgguucgggacguaguugaagcaacgacaagccggauaaccgcucuugagacaggaagcuuaccauggagcugcucauccugaaggccaacgcuauuaccacaauccuuacggccgugaccuucugcuuugcgagcggccagaauauuacagaagaguucuaccaauccaccuguucugcugucagcaaaggguaucugggagcccucagaacaggcugguacaccuccguuaucacaauugaacugucuaacaucaaggagaauaaaugcaacgggaccgacgccaaggugaaacuuaucaagcaggaacuggauaaguauaaaaaugcugugacggagcuccagcugcugaugcagagcacccccgccacaggauccggcucugcuauuuguagcggggucgccgugugcaagguucuccaccuggagggagaagugaacaaaaucaaguccgcgcuucugagcaccaauaaagccgucgugucucucuccaacggcguuagcgugcugacauuuaagguccuugaccugaagaauuacauugauaaacaacuccugccuauccugaacaagcagucuuguuccauuccgaauaucgagaccgugauugaguuccagcagaaaaacaaucggcuccuggaaaucacgcgcgaguuuagcgugaacgcuggcgucacaacccccguuucuacauauaugcuuaccaauuccgaacugcucagccugaucaacgacaugccuauuaccaacgaucaaaagaaacuuauguccaauaacgugcagaucgugagacagcagucuuacagcauuaugugcaucauuaaggaggaaguccuggccuaugugguucaacucccccuguacggggugaucgacacaccuuguuggaaacugcauacgagcccccucugcaccacaaauaccaaggagggauccaacaucugucugacacggaccgaucgcggcugguacugcgacaaugcugggucugucuccuucuuuccucaggccgaaacguguaaggugcagagcaacagaguuuucugcgauacaaugaacucucuuacccugccgagcgaggugaaucucugcaaugucgacauuuuuaaccccaaauaugauuguaagaucaugaccuccaaaacagacgugucuagcuccgucauuaccagccugggagcgaucgugucuugcuacggcaagacaaaauguacggccuccaauaagaaccgggggauuaucaagaccuucagcaauggaugcgauuauguuucuaacaaaggcguggacacagucuccgugggcaauacccuuuacuguguuaacaagcaagaggggcagagccuguaugugaaaggagaaccuaucauuaacuuuuacgacccccucgucuucccuuccgaugaguuugacgcuucuaucagccaggugaaugaaaagauuaaccagucccuggccuucauccgcaaaucugaugagcugcuccacaaugugaacgcuggcaagagcacaaccaauauuaugaucacgaccauuaucaucguuauuaucgucauucugcuuucccugaucgccguggggcuccugcuguauugcaaggccagaugaggacuaguacuggcugcaucucccuuuccucuguccuccauccuucucccaggauggugaagggggaccugguacccagugauccccaccccaggauccuaaaucaugacuuaccugcuaauaaaaacucauuggaaaagugagaagaucuaaaaaaaaaaaaaaaaaaaaaaaaaaaaaaaaaaaaaaaaaaaaaaaaaaaaaaaaaaaaaaaaugcaucccccccccccccccccccccccccccccccaaaggcucuuuucagagccaccagaauu

SEQ ID NO: 2092 - RNA, 1947 nt, Artificial Sequence
  mRNA product Design b-5 comprising derived and/or modified sequence from HRSV(A2)__F-del_DSCav1_mut1 (opt6)
gggagacuccugucgggcggaaguaggaggaguagaguuuaaaaacaguacucuuuuuccgguucgggacguaguugaagcaacgacaagccggauaaccgcucuugagacaggaagcuuaccauggaacuacucaucuuaaaagcaaacgcaauaacaacuauucuaaccgcaguaacauuuuguuucgcaucaggacaaaacauaaccgaagaauuuuaccaaucaacauguuccgcaguuucaaaaggauacuuaggcgcacuaagaacaggcugguacaccuccgugauaacaauagaauuaucaaacauaaaagaaaacaaauguaauggaacugacgccaaaguaaaacuaauaaaacaagaacuagacaaauauaaaaacgcaguaacugaacuacaauuacuaaugcaauccaccccagcaacaggcucaggcucagcaauuugcuccggagucgcugucugcaaaguacuacaucuugaaggcgaagucaauaaaauaaaaucagcacuucuaucaacaaacaaagcaguagucucacuaucaaacggaguaucaguacuaacauuuaaaguauuagaucuaaaaaacuauauagauaaacaacuacuacccauacucaauaaacaauccuguucaauaccaaauauagaaaccguaauagaauuucaacaaaaaaacaaucgacuauuagaaaucacccgagaauuuucagucaaugcaggcguaacaacaccaguaucaaccuacauguuaaccaacuccgaacuacuaucccucauaaacgacaugccaauaacaaacgaucaaaaaaaacuaauguccaacaacguacaaauagucagacaacaaucuuauucaauaaugugcaucauaaaagaagaaguucuagccuacguaguucaacuuccauuauacggcguaauugauacaccaugcuggaaacuacacacauccccacuauguacaacaaacacaaaagaaggaucaaacaucugcuuaacuagaacagacagaggaugguacugcgacaacgcaggaucagucucauucuuuccacaagcagaaacaugcaagguccaaucaaacagaguauucugcgacacaaugaacuccuuaacacuaccaucugaaguaaaccuauguaauguagacauauuuaacccaaaauacgacugcaaaauaaugaccucaaaaacagacguauccucaucaguaauuacaagccucggagccauaguaucaugcuacggaaaaacaaaauguacagcaucaaacaaaaacagaggaauaauaaaaacguucuccaacggaugcgacuauguaucaaacaaaggcguagacacaguaucagucggaaauacccuuuacugcguaaacaaacaagaaggccaaagucuauacguaaaaggagagccaauaauaaacuuuuaugacccccuuguauucccaucugacgaauuugaugcaucaauaucccaagucaacgaaaaaaucaaccaaucauuagccuuuauuagaaaaagugacgaacuauuacacaacguuaaugcagggaaaucaacaacaaauauaaugauuacaaccauaauuauaguuaucauaguuauacuacucucacuaaucgcaguaggauuacuauuauacugcaaagcaagauaaggacuaguacuggcugcaucucccuuuccucuguccuccauccuucucccaggauggugaagggggaccugguacccagugauccccaccccaggauccuaaaucaugacuuaccugcuaauaaaaacucauuggaaaagugagaagaucuaaaaaaaaaaaaaaaaaaaaaaaaaaaaaaaaaaaaaaaaaaaaaaaaaaaaaaaaaaaaaaaaugcaucccccccccccccccccccccccccccccccaaaggcucuuuucagagccaccagaauu

SEQ ID NO: 2093 - RNA, 1947 nt, Artificial Sequence
  mRNA product Design b-5 comprising derived and/or modified sequence from HRSV(A2)__F-del_DSCav1_mut1 (opt11)
gggagacuccugucgggcggaaguaggaggaguagaguuuaaaaacaguacucuuuuuccgguucgggacguaguugaagcaacgacaagccggauaaccgcucuugagacaggaagcuuaccauggaacuacucauccuaaaagccaacgcaaucacaaccauacuuacagcuguuaccuucugcuucgcauccggccaaaauaucaccgaagaguucuaccaaucaaccugcuccgccgucagcaaaggauaccucggcgcccuccgaaccggaugguacacuucugucaucacaaucgaacucuccaacaucaaagaaaacaaaugcaacgguaccgacgcgaaagucaaacucaucaaacaagaacuagacaaguacaaaaacgccgucaccgaacugcaacuccucaugcaauccacaccagcaacgggaucaggauccgccaucugcucaggcgucgccgucugcaaaguccugcaccuagaaggagaaguaaacaaaauuaaauccgcccuacucuccaccaacaaagcagucgucucacuauccaacggcgucuccguccucaccuuuaagguccucgaccucaaaaauuauauagacaaacaacuccuccccauccuaaacaaacaaucaugcuccauccccaacauagaaaccgucaucgaauuucaacagaaaaacaaccgacucuuagaaauuacccgcgaguucagcgucaacgccggagucaccacacccgucucaaccuacaugcucaccaacucagaacuccucucacuaaucaaugauaugcccaucacaaacgaccaaaagaaacucauguccaacaacguacaaaucguucgccaacaaagcuacuccaucauguguaucauuaaagaagaaguccucgccuacgucguccaacuuccgcucuacggcguaaucgacacccccugcuggaaacuucacaccucgccccucugcaccacaaacaccaaagaaggcuccaacaucugccuaacccgcaccgaccgcggcugguacugcgacaacgccggcuccgucucauuuuucccccaggcggagaccugcaaaguccaauccaaccgcgucuucugcgacaccaugaacucucuuacccucccaucagaaguaaaccucugcaacgucgacaucuuuaaccccaaauacgauugcaagauaaugaccuccaaaacagacgucucaucguccgucaucaccucccuaggagcuaucgucuccugcuacggcaagaccaaaugcaccgcuuccaacaaaaaccgcggcaucaucaaaaccuucuccaacgggugcgacuacgucucuaacaaaggcguggacacaguauccguaggaaacacacuguacugcguaaacaaacaagagggccaaucgcuuuacgucaaaggcgagccaauuaucaacuucuacgacccgcucgucuucccaucagacgaguucgacgcauccaucucccaagucaacgagaaaaucaaucagucccucgccuucauacgcaaauccgacgaacuccuacauaacguaaacgccggcaaaucuaccacaaacaucaugaucacaaccaucaucaucguaaucaucgucauccuucucucgcucaucgccguaggacugcuacuuuacugcaaggcccgcuaaggacuaguacuggcugcaucucccuuuccucuguccuccauccuucucccaggauggugaagggggaccugguacccagugauccccaccccaggauccuaaaucaugacuuaccugcuaauaaaaacucauuggaaaagugagaagaucuaaaaaaaaaaaaaaaaaaaaaaaaaaaaaaaaaaaaaaaaaaaaaaaaaaaaaaaaaaaaaaaaugcaucccccccccccccccccccccccccccccccaaaggcucuuuucagagccaccagaauu

SEQ ID NO: 2094 - RNA, 1853 nt, Artificial Sequence
  mRNA product Design c-1 comprising derived and/or modified sequence from HRSV(A2)__F-del_DSCav1_mut1 (opt1)
gggagaguccgcucagccagguugcagaagcggcuuagcguguguccuaaucuucucucugcguguagguaggccugugccgcaaacaagcuuaccauggagcugcucauccugaaggccaacgccaucaccaccauccugacggcggugaccuucugcuucgccagcggccagaacaucaccgaggaguucuaccaguccacgugcagcgccgucuccaagggguaccucggcgcccugcggaccggcugguacaccuccgugaucaccaucgagcugagcaacaucaaggagaacaagugcaacgggaccgacgccaaggugaagcucaucaagcaggagcuggacaaguacaagaacgcggucacggagcugcagcuccugaugcaguccaccccggcaaccggcuccggcuccgccaucugcagcggcgucgccgugugcaaggugcugcaccucgagggggaggucaacaagaucaagagcgcccugcuguccaccaacaaggccguggugagccucuccaacggcgucagcgugcugaccuucaaggugcuggaccucaagaacuacaucgacaagcagcugcugcccauccugaacaagcagagcugcuccauccccaacaucgagacggugaucgaguuccagcagaagaacaaccggcuccuggagaucacccgcgaguucagcgugaacgccggggucaccacccccguguccacguacaugcugaccaacagcgagcuccugucccugaucaacgacaugccgaucaccaacgaccagaagaagcucaugagcaacaacgugcagaucguccggcagcaguccuacagcaucaugugcaucaucaaggaggaggugcuggcguacgugguccagcugccccucuacggcgugaucgacacccccugcuggaagcugcacacgagcccccugugcaccaccaacaccaaggagggguccaacaucugccucacgcgcaccgaccggggcugguacugcgacaacgccggcagcgucuccuucuucccgcaggccgagaccugcaaggugcagagcaaccgcguguucugcgacaccaugaacucccugacgcugcccagcgagguaaaccucugcaacgucgacaucuucaaccccaaguacgacugcaagaucaugaccuccaagaccgacgugagcuccagcgugaucaccucccugggggccaucgucagcugcuacggcaagacgaagugcaccgccagcaacaagaaccgggggaucaucaagaccuucuccaacggcugcgacuacgugagcaacaagggcguggacaccguguccgucgggaacacccuguacugcgugaacaagcaggagggccagagccucuacgugaagggggagcccaucaucaacuucuacgacccgcuggucuuccccuccgacgaguucgacgcgagcaucucccaggugaacgagaagaucaaccagagccuggccuucauccgcaaguccgacgagcugcuccacaacgugaacgccggcaagagcacgaccaacaucaugaucaccaccaucaucaucgucaucaucgugauccugcugucccucaucgccguggggcugcugcucuacugcaaggcccggugaggacuaguguccaccugucccuccugggcugcuggauugucucguuuuccugccaaauaaacaggaucagcgcuuuacagaucuaaaaaaaaaaaaaaaaaaaaaaaaaaaaaaaaaaaaaaaaaaaaaaaaaaaaaaaaaaaaaaaaugcaucccccccccccccccccccccccccccccccaaaggcucuuuucagagccaccagaauu

SEQ ID NO: 2095 - RNA, 1853 nt, Artificial Sequence
  mRNA product Design c-1 comprising derived and/or modified sequence from HRSV(A2)__F-del_DSCav1_mut1 (opt1)
gggagaguccgcucagccagguugcagaagcggcuuagcguguguccuaaucuucucucugcguguagguaggccugugccgcaaacaagcuuaccauggagcugcucauccugaaggccaacgccaucaccaccauccugacggcggugaccuucugcuucgccagcggccagaacaucaccgaggaguucuaccaguccacgugcagcgccgucuccaagggguaccucggcgcccugcgcaccgggugguacaccagcgugaucaccaucgagcuguccaacaucaaggagaacaagugcaacggcaccgacgccaaggugaagcucaucaagcaggagcuggacaaguacaagaacgcggucacggagcugcagcuccugaugcagagcacccccgccaccggguccggcagcgccaucugcuccggcguggccgugugcaagguccugcaccucgagggggaggugaacaagaucaagagcgcgcugcuguccaccaacaaggccguggucagccucuccaacggcgugagcgugcugacguucaagguccuggaccucaagaacuacaucgacaagcagcugcugccgauccucaacaagcaguccugcagcauccccaacaucgagaccgugaucgaguuccagcagaagaacaaccggcugcuggagaucacccgcgaguucuccgugaacgccggggucaccacgcccgugagcaccuacaugcucaccaacuccgagcugcugagccucaucaacgacaugcccaucaccaacgaccagaagaagcugaugagcaacaacgugcagaucguccggcagcaguccuacagcaucaugugcaucaucaaggaggaggugcuggccuacgugguccagcucccgcuguacggcgugaucgacacgcccugcuggaagcugcacaccagcccccucugcaccaccaacacgaaggagggguccaacaucugccugacccgcaccgaccggggcugguacugcgacaacgccggcuccgugagcuucuucccccaggcggagaccugcaagguccaguccaaccgcguguucugcgacacgaugaacagccugacccucccguccgaggucaaccugugcaacguggacaucuucaaccccaaguacgacugcaagaucaugaccagcaagaccgacguguccagcuccgucaucacgagccugggggccaucguguccugcuacggcaagaccaagugcaccgccagcaacaagaaccgggggaucaucaagaccuucuccaacggcugcgacuacgugagcaacaagggcgucgacacgguguccguggggaacacccucuacugcgucaacaagcaggagggccagagccuguacgugaagggggagcccaucaucaacuucuacgacccccugguguucccgagcgacgaguucgacgccuccaucagccaggucaacgagaagaucaaccagucccucgccuucauccgcaagagcgacgagcugcugcacaacgugaacgcgggcaaguccaccaccaacaucaugaucaccacgaucaucaucgugaucaucgucauccuccugagccugaucgccguggggcuccugcuguacugcaaggcccggugaggacuaguguccaccugucccuccugggcugcuggauugucucguuuuccugccaaauaaacaggaucagcgcuuuacagaucuaaaaaaaaaaaaaaaaaaaaaaaaaaaaaaaaaaaaaaaaaaaaaaaaaaaaaaaaaaaaaaaaugcaucccccccccccccccccccccccccccccccaaaggcucuuuucagagccaccagaauu

SEQ ID NO: 2096 - RNA, 1853 nt, Artificial Sequence
  mRNA product Design c-1 comprising derived and/or modified sequence from HRSV(A2)__F-del_DSCav1_mut1 (opt2)
gggagaguccgcucagccagguugcagaagcggcuuagcguguguccuaaucuucucucugcguguagguaggccugugccgcaaacaagcuuaccauggagcuccucauccucaaggccaacgccaucaccaccauccucaccgccgucaccuucugcuucgccuccggccagaacaucaccgaggaguucuaccaguccaccugcuccgccgucuccaagggcuaccucggcgcccuccgcaccggcugguacaccuccgucaucaccaucgagcucuccaacaucaaggagaacaagugcaacggcaccgacgccaaggucaagcucaucaagcaggagcucgacaaguacaagaacgccgucaccgagcuccagcuccucaugcaguccacccccgccaccggcuccggcuccgccaucugcuccggcgucgccgucugcaagguccuccaccucgagggcgaggucaacaagaucaaguccgcccuccucuccaccaacaaggccgucgucucccucuccaacggcgucuccguccucaccuucaagguccucgaccucaagaacuacaucgacaagcagcuccuccccauccucaacaagcaguccugcuccauccccaacaucgagaccgucaucgaguuccagcagaagaacaaccgccuccucgagaucacccgcgaguucuccgucaacgccggcgucaccacccccgucuccaccuacaugcucaccaacuccgagcuccucucccucaucaacgacaugcccaucaccaacgaccagaagaagcucauguccaacaacguccagaucguccgccagcaguccuacuccaucaugugcaucaucaaggaggagguccucgccuacgucguccagcucccccucuacggcgucaucgacacccccugcuggaagcuccacaccuccccccucugcaccaccaacaccaaggagggcuccaacaucugccucacccgcaccgaccgcggcugguacugcgacaacgccggcuccgucuccuucuucccccaggccgagaccugcaagguccaguccaaccgcgucuucugcgacaccaugaacucccucacccuccccuccgaggucaaccucugcaacgucgacaucuucaaccccaaguacgacugcaagaucaugaccuccaagaccgacgucuccuccuccgucaucaccucccucggcgccaucgucuccugcuacggcaagaccaagugcaccgccuccaacaagaaccgcggcaucaucaagaccuucuccaacggcugcgacuacgucuccaacaagggcgucgacaccgucuccgucggcaacacccucuacugcgucaacaagcaggagggccagucccucuacgucaagggcgagcccaucaucaacuucuacgacccccucgucuuccccuccgacgaguucgacgccuccaucucccaggucaacgagaagaucaaccagucccucgccuucauccgcaaguccgacgagcuccuccacaacgucaacgccggcaaguccaccaccaacaucaugaucaccaccaucaucaucgucaucaucgucauccuccucucccucaucgccgucggccuccuccucuacugcaaggcccgcugaggacuaguguccaccugucccuccugggcugcuggauugucucguuuuccugccaaauaaacaggaucagcgcuuuacagaucuaaaaaaaaaaaaaaaaaaaaaaaaaaaaaaaaaaaaaaaaaaaaaaaaaaaaaaaaaaaaaaaaugcaucccccccccccccccccccccccccccccccaaaggcucuuuucagagccaccagaauu

SEQ ID NO: 2097 - RNA, 1853 nt, Artificial Sequence
  mRNA product Design c-1 comprising derived and/or modified sequence from HRSV(A2)__F-del_DSCav1_mut1 (opt3)
gggagaguccgcucagccagguugcagaagcggcuuagcguguguccuaaucuucucucugcguguagguaggccugugccgcaaacaagcuuaccauggagcugcucauccuuaaggccaacgcuauuaccacaauacugacugcagugacguucugcuuugccagcggccagaauaucaccgaagaguucuaccaauccacauguucugcggucucaaaaggguauuugggagcuuuaagaacugguugguacaccaguguuauuacaaucgaacugagcaacauuaaggagaauaaaugcaacggcaccgacgccaaggugaaacuaaucaagcaggaacucgauaaguauaaaaaugcaguaacugagcugcagcuucugaugcaguccacacccgccaccgggucuggaucggcuauauguucaggcguggcagucugcaagguguugcaccucgagggugaaguuaacaaaaucaagagcgcccugcugaguacgaauaaagcuguggucucccucucuaacggggugagcguauuaacuuuuaagguucuggaccuuaagaauuacauugauaaacaauugcugccuauccuaaacaagcaguccuguucaauuccaaauaucgagaccgugauagaguuccagcagaaaaacaauaggcuccuggaaauuacacgggaguuuagugucaacgccggagugacuaccccggugagcacauauaugcuuaccaauucugaacuguugucccucaucaacgacaugcccauuacgaacgaucaaaagaaacugaugucaaauaacguccagaucguucgccagcagagcuacaguaucaugugcauuauaaaggaggaaguguuagcguauguagugcaacugccucucuacggcgucaucgacacuccauguuggaaacuucauacaucuccccugugcaccacuaauacaaaggagggcuccaacauuuguuugacccgaacggaucgugggugguacugcgacaaugcaggaagcgugucguucuuuccucaggccgaaaccuguaagguucagucuaacagaguguucugcgauacaaugaacucccuaacucugccaucagaggucaaucucugcaauguggacaucuuuaaccccaaauaugauuguaagauaaugaccaguaaaacagacguaagcuccucuguuauuacuagccugggugcuaucgugucaugcuacggcaagaccaaauguacagccaguaauaagaacagggggaucauuaagaccuucuccaauggaugcgauuaugucagcaacaaaggcguggacacugucucuguggguaauacgcuuuacuguguuaacaagcaagaggggcagucacuguaugugaaaggagaaccuaucauuaacuuuuacgacccauugguauucccgagugaugaguuugacgcaagcauaucccaggucaaugaaaagaucaaccagucucucgcuuucauucggaaaucggaugagcuguuacacaaugugaacgccggcaagagcacaaccaauaucaugaucacuaccauuauaaucguuauuaucgugauucugcuaucccucaucgcggucggccugcuuuuguauugcaaggcccgcugaggacuaguguccaccugucccuccugggcugcuggauugucucguuuuccugccaaauaaacaggaucagcgcuuuacagaucuaaaaaaaaaaaaaaaaaaaaaaaaaaaaaaaaaaaaaaaaaaaaaaaaaaaaaaaaaaaaaaaaugcaucccccccccccccccccccccccccccccccaaaggcucuuuucagagccaccagaauu

SEQ ID NO: 2098 - RNA, 1853 nt, Artificial Sequence
  mRNA product Design c-1 comprising derived and/or modified sequence from HRSV(A2)__F-del_DSCav1_mut1 (opt4)
gggagaguccgcucagccagguugcagaagcggcuuagcguguguccuaaucuucucucugcguguagguaggccugugccgcaaacaagcuuaccauggagcugcugauccugaaggccaacgccaucaccaccauccugaccgccgugaccuucugcuucgccagcggccagaacaucaccgaggaguucuaccagagcaccugcagcgccgugagcaagggcuaccugggcgcccugagaaccggcugguacaccagcgugaucaccaucgagcugagcaacaucaaggagaacaagugcaacggcaccgacgccaaggugaagcugaucaagcaggagcuggacaaguacaagaacgccgugaccgagcugcagcugcugaugcagagcacccccgccaccggcagcggcagcgccaucugcagcggcguggccgugugcaaggugcugcaccuggagggcgaggugaacaagaucaagagcgcccugcugagcaccaacaaggccguggugagccugagcaacggcgugagcgugcugaccuucaaggugcuggaccugaagaacuacaucgacaagcagcugcugcccauccugaacaagcagagcugcagcauccccaacaucgagaccgugaucgaguuccagcagaagaacaacagacugcuggagaucaccagagaguucagcgugaacgccggcgugaccacccccgugagcaccuacaugcugaccaacagcgagcugcugagccugaucaacgacaugcccaucaccaacgaccagaagaagcugaugagcaacaacgugcagaucgugagacagcagagcuacagcaucaugugcaucaucaaggaggaggugcuggccuacguggugcagcugccccuguacggcgugaucgacacccccugcuggaagcugcacaccagcccccugugcaccaccaacaccaaggagggcagcaacaucugccugaccagaaccgacagaggcugguacugcgacaacgccggcagcgugagcuucuucccccaggccgagaccugcaaggugcagagcaacagaguguucugcgacaccaugaacagccugacccugcccagcgaggugaaccugugcaacguggacaucuucaaccccaaguacgacugcaagaucaugaccagcaagaccgacgugagcagcagcgugaucaccagccugggcgccaucgugagcugcuacggcaagaccaagugcaccgccagcaacaagaacagaggcaucaucaagaccuucagcaacggcugcgacuacgugagcaacaagggcguggacaccgugagcgugggcaacacccuguacugcgugaacaagcaggagggccagagccuguacgugaagggcgagcccaucaucaacuucuacgacccccugguguuccccagcgacgaguucgacgccagcaucagccaggugaacgagaagaucaaccagagccuggccuucaucagaaagagcgacgagcugcugcacaacgugaacgccggcaagagcaccaccaacaucaugaucaccaccaucaucaucgugaucaucgugauccugcugagccugaucgccgugggccugcugcuguacugcaaggccagaugaggacuaguguccaccugucccuccugggcugcuggauugucucguuuuccugccaaauaaacaggaucagcgcuuuacagaucuaaaaaaaaaaaaaaaaaaaaaaaaaaaaaaaaaaaaaaaaaaaaaaaaaaaaaaaaaaaaaaaaugcaucccccccccccccccccccccccccccccccaaaggcucuuuucagagccaccagaauu

SEQ ID NO: 2099 - RNA, 1853 nt, Artificial Sequence
  mRNA product Design c-1 comprising derived and/or modified sequence from HRSV(A2)__F-del_DSCav1_mut1 (opt5)
gggagaguccgcucagccagguugcagaagcggcuuagcguguguccuaaucuucucucugcguguagguaggccugugccgcaaacaagcuuaccauggagcugcucauccugaaggccaacgcuauuaccacaauccuuacggccgugaccuucugcuuugcgagcggccagaauauuacagaagaguucuaccaauccaccuguucugcugucagcaaaggguaucugggagcccucagaacaggcugguacaccuccguuaucacaauugaacugucuaacaucaaggagaauaaaugcaacgggaccgacgccaaggugaaacuuaucaagcaggaacuggauaaguauaaaaaugcugugacggagcuccagcugcugaugcagagcacccccgccacaggauccggcucugcuauuuguagcggggucgccgugugcaagguucuccaccuggagggagaagugaacaaaaucaaguccgcgcuucugagcaccaauaaagccgucgugucucucuccaacggcguuagcgugcugacauuuaagguccuugaccugaagaauuacauugauaaacaacuccugccuauccugaacaagcagucuuguuccauuccgaauaucgagaccgugauugaguuccagcagaaaaacaaucggcuccuggaaaucacgcgcgaguuuagcgugaacgcuggcgucacaacccccguuucuacauauaugcuuaccaauuccgaacugcucagccugaucaacgacaugccuauuaccaacgaucaaaagaaacuuauguccaauaacgugcagaucgugagacagcagucuuacagcauuaugugcaucauuaaggaggaaguccuggccuaugugguucaacucccccuguacggggugaucgacacaccuuguuggaaacugcauacgagcccccucugcaccacaaauaccaaggagggauccaacaucugucugacacggaccgaucgcggcugguacugcgacaaugcugggucugucuccuucuuuccucaggccgaaacguguaaggugcagagcaacagaguuuucugcgauacaaugaacucucuuacccugccgagcgaggugaaucucugcaaugucgacauuuuuaaccccaaauaugauuguaagaucaugaccuccaaaacagacgugucuagcuccgucauuaccagccugggagcgaucgugucuugcuacggcaagacaaaauguacggccuccaauaagaaccgggggauuaucaagaccuucagcaauggaugcgauuauguuucuaacaaaggcguggacacagucuccgugggcaauacccuuuacuguguuaacaagcaagaggggcagagccuguaugugaaaggagaaccuaucauuaacuuuuacgacccccucgucuucccuuccgaugaguuugacgcuucuaucagccaggugaaugaaaagauuaaccagucccuggccuucauccgcaaaucugaugagcugcuccacaaugugaacgcuggcaagagcacaaccaauauuaugaucacgaccauuaucaucguuauuaucgucauucugcuuucccugaucgccguggggcuccugcuguauugcaaggccagaugaggacuaguguccaccugucccuccugggcugcuggauugucucguuuuccugccaaauaaacaggaucagcgcuuuacagaucuaaaaaaaaaaaaaaaaaaaaaaaaaaaaaaaaaaaaaaaaaaaaaaaaaaaaaaaaaaaaaaaaugcaucccccccccccccccccccccccccccccccaaaggcucuuuucagagccaccagaauu

SEQ ID NO: 2100 - RNA, 1853 nt, Artificial Sequence
  mRNA product Design c-1 comprising derived and/or modified sequence from HRSV(A2)__F-del_DSCav1_mut1 (opt6)
gggagaguccgcucagccagguugcagaagcggcuuagcguguguccuaaucuucucucugcguguagguaggccugugccgcaaacaagcuuaccauggaacuacucaucuuaaaagcaaacgcaauaacaacuauucuaaccgcaguaacauuuuguuucgcaucaggacaaaacauaaccgaagaauuuuaccaaucaacauguuccgcaguuucaaaaggauacuuaggcgcacuaagaacaggcugguacaccuccgugauaacaauagaauuaucaaacauaaaagaaaacaaauguaauggaacugacgccaaaguaaaacuaauaaaacaagaacuagacaaauauaaaaacgcaguaacugaacuacaauuacuaaugcaauccaccccagcaacaggcucaggcucagcaauuugcuccggagucgcugucugcaaaguacuacaucuugaaggcgaagucaauaaaauaaaaucagcacuucuaucaacaaacaaagcaguagucucacuaucaaacggaguaucaguacuaacauuuaaaguauuagaucuaaaaaacuauauagauaaacaacuacuacccauacucaauaaacaauccuguucaauaccaaauauagaaaccguaauagaauuucaacaaaaaaacaaucgacuauuagaaaucacccgagaauuuucagucaaugcaggcguaacaacaccaguaucaaccuacauguuaaccaacuccgaacuacuaucccucauaaacgacaugccaauaacaaacgaucaaaaaaaacuaauguccaacaacguacaaauagucagacaacaaucuuauucaauaaugugcaucauaaaagaagaaguucuagccuacguaguucaacuuccauuauacggcguaauugauacaccaugcuggaaacuacacacauccccacuauguacaacaaacacaaaagaaggaucaaacaucugcuuaacuagaacagacagaggaugguacugcgacaacgcaggaucagucucauucuuuccacaagcagaaacaugcaagguccaaucaaacagaguauucugcgacacaaugaacuccuuaacacuaccaucugaaguaaaccuauguaauguagacauauuuaacccaaaauacgacugcaaaauaaugaccucaaaaacagacguauccucaucaguaauuacaagccucggagccauaguaucaugcuacggaaaaacaaaauguacagcaucaaacaaaaacagaggaauaauaaaaacguucuccaacggaugcgacuauguaucaaacaaaggcguagacacaguaucagucggaaauacccuuuacugcguaaacaaacaagaaggccaaagucuauacguaaaaggagagccaauaauaaacuuuuaugacccccuuguauucccaucugacgaauuugaugcaucaauaucccaagucaacgaaaaaaucaaccaaucauuagccuuuauuagaaaaagugacgaacuauuacacaacguuaaugcagggaaaucaacaacaaauauaaugauuacaaccauaauuauaguuaucauaguuauacuacucucacuaaucgcaguaggauuacuauuauacugcaaagcaagauaaggacuaguguccaccugucccuccugggcugcuggauugucucguuuuccugccaaauaaacaggaucagcgcuuuacagaucuaaaaaaaaaaaaaaaaaaaaaaaaaaaaaaaaaaaaaaaaaaaaaaaaaaaaaaaaaaaaaaaaugcaucccccccccccccccccccccccccccccccaaaggcucuuuucagagccaccagaauu

SEQ ID NO: 2101 - RNA, 1853 nt, Artificial Sequence
  mRNA product Design c-1 comprising derived and/or modified sequence from HRSV(A2)__F-del_DSCav1_mut1 (opt11)
gggagaguccgcucagccagguugcagaagcggcuuagcguguguccuaaucuucucucugcguguagguaggccugugccgcaaacaagcuuaccauggaacuacucauccuaaaagccaacgcaaucacaaccauacuuacagcuguuaccuucugcuucgcauccggccaaaauaucaccgaagaguucuaccaaucaaccugcuccgccgucagcaaaggauaccucggcgcccuccgaaccggaugguacacuucugucaucacaaucgaacucuccaacaucaaagaaaacaaaugcaacgguaccgacgcgaaagucaaacucaucaaacaagaacuagacaaguacaaaaacgccgucaccgaacugcaacuccucaugcaauccacaccagcaacgggaucaggauccgccaucugcucaggcgucgccgucugcaaaguccugcaccuagaaggagaaguaaacaaaauuaaauccgcccuacucuccaccaacaaagcagucgucucacuauccaacggcgucuccguccucaccuuuaagguccucgaccucaaaaauuauauagacaaacaacuccuccccauccuaaacaaacaaucaugcuccauccccaacauagaaaccgucaucgaauuucaacagaaaaacaaccgacucuuagaaauuacccgcgaguucagcgucaacgccggagucaccacacccgucucaaccuacaugcucaccaacucagaacuccucucacuaaucaaugauaugcccaucacaaacgaccaaaagaaacucauguccaacaacguacaaaucguucgccaacaaagcuacuccaucauguguaucauuaaagaagaaguccucgccuacgucguccaacuuccgcucuacggcguaaucgacacccccugcuggaaacuucacaccucgccccucugcaccacaaacaccaaagaaggcuccaacaucugccuaacccgcaccgaccgcggcugguacugcgacaacgccggcuccgucucauuuuucccccaggcggagaccugcaaaguccaauccaaccgcgucuucugcgacaccaugaacucucuuacccucccaucagaaguaaaccucugcaacgucgacaucuuuaaccccaaauacgauugcaagauaaugaccuccaaaacagacgucucaucguccgucaucaccucccuaggagcuaucgucuccugcuacggcaagaccaaaugcaccgcuuccaacaaaaaccgcggcaucaucaaaaccuucuccaacgggugcgacuacgucucuaacaaaggcguggacacaguauccguaggaaacacacuguacugcguaaacaaacaagagggccaaucgcuuuacgucaaaggcgagccaauuaucaacuucuacgacccgcucgucuucccaucagacgaguucgacgcauccaucucccaagucaacgagaaaaucaaucagucccucgccuucauacgcaaauccgacgaacuccuacauaacguaaacgccggcaaaucuaccacaaacaucaugaucacaaccaucaucaucguaaucaucgucauccuucucucgcucaucgccguaggacugcuacuuuacugcaaggcccgcuaaggacuaguguccaccugucccuccugggcugcuggauugucucguuuuccugccaaauaaacaggaucagcgcuuuacagaucuaaaaaaaaaaaaaaaaaaaaaaaaaaaaaaaaaaaaaaaaaaaaaaaaaaaaaaaaaaaaaaaaugcaucccccccccccccccccccccccccccccccaaaggcucuuuucagagccaccagaauu

SEQ ID NO: 2102 - RNA, 1943 nt, Artificial Sequence
  mRNA product Design c-2 comprising derived and/or modified sequence from HRSV(A2)__F-del_DSCav1_mut1 (opt1)
gggagacuccugucgggcggaaguaggaggaguagaguuuaaaaacaguacucuuuuuccgguucgggacguaguugaagcaacgacaagccggauaaccgcucuugagacaggaagcuuaccauggagcugcucauccugaaggccaacgccaucaccaccauccugacggcggugaccuucugcuucgccagcggccagaacaucaccgaggaguucuaccaguccacgugcagcgccgucuccaagggguaccucggcgcccugcggaccggcugguacaccuccgugaucaccaucgagcugagcaacaucaaggagaacaagugcaacgggaccgacgccaaggugaagcucaucaagcaggagcuggacaaguacaagaacgcggucacggagcugcagcuccugaugcaguccaccccggcaaccggcuccggcuccgccaucugcagcggcgucgccgugugcaaggugcugcaccucgagggggaggucaacaagaucaagagcgcccugcuguccaccaacaaggccguggugagccucuccaacggcgucagcgugcugaccuucaaggugcuggaccucaagaacuacaucgacaagcagcugcugcccauccugaacaagcagagcugcuccauccccaacaucgagacggugaucgaguuccagcagaagaacaaccggcuccuggagaucacccgcgaguucagcgugaacgccggggucaccacccccguguccacguacaugcugaccaacagcgagcuccugucccugaucaacgacaugccgaucaccaacgaccagaagaagcucaugagcaacaacgugcagaucguccggcagcaguccuacagcaucaugugcaucaucaaggaggaggugcuggcguacgugguccagcugccccucuacggcgugaucgacacccccugcuggaagcugcacacgagcccccugugcaccaccaacaccaaggagggguccaacaucugccucacgcgcaccgaccggggcugguacugcgacaacgccggcagcgucuccuucuucccgcaggccgagaccugcaaggugcagagcaaccgcguguucugcgacaccaugaacucccugacgcugcccagcgagguaaaccucugcaacgucgacaucuucaaccccaaguacgacugcaagaucaugaccuccaagaccgacgugagcuccagcgugaucaccucccugggggccaucgucagcugcuacggcaagacgaagugcaccgccagcaacaagaaccgggggaucaucaagaccuucuccaacggcugcgacuacgugagcaacaagggcguggacaccguguccgucgggaacacccuguacugcgugaacaagcaggagggccagagccucuacgugaagggggagcccaucaucaacuucuacgacccgcuggucuuccccuccgacgaguucgacgcgagcaucucccaggugaacgagaagaucaaccagagccuggccuucauccgcaaguccgacgagcugcuccacaacgugaacgccggcaagagcacgaccaacaucaugaucaccaccaucaucaucgucaucaucgugauccugcugucccucaucgccguggggcugcugcucuacugcaaggcccggugaggacuaguggaagcauuuuccuggcugauuaaaagaaauuacucagcuauggucaucuguuccuguuagaaggcuaugcagcauauuauauacuaugcgcauguuaugaaaugcauaauaaaaaauuuuaaaaaaucuaaaagaucuaaaaaaaaaaaaaaaaaaaaaaaaaaaaaaaaaaaaaaaaaaaaaaaaaaaaaaaaaaaaaaaaugcaucccccccccccccccccccccccccccccccaaaggcucuuuucagagccaccagaauu

SEQ ID NO: 2103 - RNA, 1943 nt, Artificial Sequence
  mRNA product Design c-2 comprising derived and/or modified sequence from HRSV(A2)__F-del_DSCav1_mut1 (opt1)
gggagacuccugucgggcggaaguaggaggaguagaguuuaaaaacaguacucuuuuuccgguucgggacguaguugaagcaacgacaagccggauaaccgcucuugagacaggaagcuuaccauggagcugcucauccugaaggccaacgccaucaccaccauccugacggcggugaccuucugcuucgccagcggccagaacaucaccgaggaguucuaccaguccacgugcagcgccgucuccaagggguaccucggcgcccugcgcaccgggugguacaccagcgugaucaccaucgagcuguccaacaucaaggagaacaagugcaacggcaccgacgccaaggugaagcucaucaagcaggagcuggacaaguacaagaacgcggucacggagcugcagcuccugaugcagagcacccccgccaccggguccggcagcgccaucugcuccggcguggccgugugcaagguccugcaccucgagggggaggugaacaagaucaagagcgcgcugcuguccaccaacaaggccguggucagccucuccaacggcgugagcgugcugacguucaagguccuggaccucaagaacuacaucgacaagcagcugcugccgauccucaacaagcaguccugcagcauccccaacaucgagaccgugaucgaguuccagcagaagaacaaccggcugcuggagaucacccgcgaguucuccgugaacgccggggucaccacgcccgugagcaccuacaugcucaccaacuccgagcugcugagccucaucaacgacaugcccaucaccaacgaccagaagaagcugaugagcaacaacgugcagaucguccggcagcaguccuacagcaucaugugcaucaucaaggaggaggugcuggccuacgugguccagcucccgcuguacggcgugaucgacacgcccugcuggaagcugcacaccagcccccucugcaccaccaacacgaaggagggguccaacaucugccugacccgcaccgaccggggcugguacugcgacaacgccggcuccgugagcuucuucccccaggcggagaccugcaagguccaguccaaccgcguguucugcgacacgaugaacagccugacccucccguccgaggucaaccugugcaacguggacaucuucaaccccaaguacgacugcaagaucaugaccagcaagaccgacguguccagcuccgucaucacgagccugggggccaucguguccugcuacggcaagaccaagugcaccgccagcaacaagaaccgggggaucaucaagaccuucuccaacggcugcgacuacgugagcaacaagggcgucgacacgguguccguggggaacacccucuacugcgucaacaagcaggagggccagagccuguacgugaagggggagcccaucaucaacuucuacgacccccugguguucccgagcgacgaguucgacgccuccaucagccaggucaacgagaagaucaaccagucccucgccuucauccgcaagagcgacgagcugcugcacaacgugaacgcgggcaaguccaccaccaacaucaugaucaccacgaucaucaucgugaucaucgucauccuccugagccugaucgccguggggcuccugcuguacugcaaggcccggugaggacuaguggaagcauuuuccuggcugauuaaaagaaauuacucagcuauggucaucuguuccuguuagaaggcuaugcagcauauuauauacuaugcgcauguuaugaaaugcauaauaaaaaauuuuaaaaaaucuaaaagaucuaaaaaaaaaaaaaaaaaaaaaaaaaaaaaaaaaaaaaaaaaaaaaaaaaaaaaaaaaaaaaaaaugcaucccccccccccccccccccccccccccccccaaaggcucuuuucagagccaccagaauu

SEQ ID NO: 2104 - RNA, 1943 nt, Artificial Sequence
  mRNA product Design c-2 comprising derived and/or modified sequence from HRSV(A2)__F-del_DSCav1_mut1 (opt2)
gggagacuccugucgggcggaaguaggaggaguagaguuuaaaaacaguacucuuuuuccgguucgggacguaguugaagcaacgacaagccggauaaccgcucuugagacaggaagcuuaccauggagcuccucauccucaaggccaacgccaucaccaccauccucaccgccgucaccuucugcuucgccuccggccagaacaucaccgaggaguucuaccaguccaccugcuccgccgucuccaagggcuaccucggcgcccuccgcaccggcugguacaccuccgucaucaccaucgagcucuccaacaucaaggagaacaagugcaacggcaccgacgccaaggucaagcucaucaagcaggagcucgacaaguacaagaacgccgucaccgagcuccagcuccucaugcaguccacccccgccaccggcuccggcuccgccaucugcuccggcgucgccgucugcaagguccuccaccucgagggcgaggucaacaagaucaaguccgcccuccucuccaccaacaaggccgucgucucccucuccaacggcgucuccguccucaccuucaagguccucgaccucaagaacuacaucgacaagcagcuccuccccauccucaacaagcaguccugcuccauccccaacaucgagaccgucaucgaguuccagcagaagaacaaccgccuccucgagaucacccgcgaguucuccgucaacgccggcgucaccacccccgucuccaccuacaugcucaccaacuccgagcuccucucccucaucaacgacaugcccaucaccaacgaccagaagaagcucauguccaacaacguccagaucguccgccagcaguccuacuccaucaugugcaucaucaaggaggagguccucgccuacgucguccagcucccccucuacggcgucaucgacacccccugcuggaagcuccacaccuccccccucugcaccaccaacaccaaggagggcuccaacaucugccucacccgcaccgaccgcggcugguacugcgacaacgccggcuccgucuccuucuucccccaggccgagaccugcaagguccaguccaaccgcgucuucugcgacaccaugaacucccucacccuccccuccgaggucaaccucugcaacgucgacaucuucaaccccaaguacgacugcaagaucaugaccuccaagaccgacgucuccuccuccgucaucaccucccucggcgccaucgucuccugcuacggcaagaccaagugcaccgccuccaacaagaaccgcggcaucaucaagaccuucuccaacggcugcgacuacgucuccaacaagggcgucgacaccgucuccgucggcaacacccucuacugcgucaacaagcaggagggccagucccucuacgucaagggcgagcccaucaucaacuucuacgacccccucgucuuccccuccgacgaguucgacgccuccaucucccaggucaacgagaagaucaaccagucccucgccuucauccgcaaguccgacgagcuccuccacaacgucaacgccggcaaguccaccaccaacaucaugaucaccaccaucaucaucgucaucaucgucauccuccucucccucaucgccgucggccuccuccucuacugcaaggcccgcugaggacuaguggaagcauuuuccuggcugauuaaaagaaauuacucagcuauggucaucuguuccuguuagaaggcuaugcagcauauuauauacuaugcgcauguuaugaaaugcauaauaaaaaauuuuaaaaaaucuaaaagaucuaaaaaaaaaaaaaaaaaaaaaaaaaaaaaaaaaaaaaaaaaaaaaaaaaaaaaaaaaaaaaaaaugcaucccccccccccccccccccccccccccccccaaaggcucuuuucagagccaccagaauu

SEQ ID NO: 2105 - RNA, 1943 nt, Artificial Sequence
  mRNA product Design c-2 comprising derived and/or modified sequence from HRSV(A2)__F-del_DSCav1_mut1 (opt3)
gggagacuccugucgggcggaaguaggaggaguagaguuuaaaaacaguacucuuuuuccgguucgggacguaguugaagcaacgacaagccggauaaccgcucuugagacaggaagcuuaccauggagcugcucauccuuaaggccaacgcuauuaccacaauacugacugcagugacguucugcuuugccagcggccagaauaucaccgaagaguucuaccaauccacauguucugcggucucaaaaggguauuugggagcuuuaagaacugguugguacaccaguguuauuacaaucgaacugagcaacauuaaggagaauaaaugcaacggcaccgacgccaaggugaaacuaaucaagcaggaacucgauaaguauaaaaaugcaguaacugagcugcagcuucugaugcaguccacacccgccaccgggucuggaucggcuauauguucaggcguggcagucugcaagguguugcaccucgagggugaaguuaacaaaaucaagagcgcccugcugaguacgaauaaagcuguggucucccucucuaacggggugagcguauuaacuuuuaagguucuggaccuuaagaauuacauugauaaacaauugcugccuauccuaaacaagcaguccuguucaauuccaaauaucgagaccgugauagaguuccagcagaaaaacaauaggcuccuggaaauuacacgggaguuuagugucaacgccggagugacuaccccggugagcacauauaugcuuaccaauucugaacuguugucccucaucaacgacaugcccauuacgaacgaucaaaagaaacugaugucaaauaacguccagaucguucgccagcagagcuacaguaucaugugcauuauaaaggaggaaguguuagcguauguagugcaacugccucucuacggcgucaucgacacuccauguuggaaacuucauacaucuccccugugcaccacuaauacaaaggagggcuccaacauuuguuugacccgaacggaucgugggugguacugcgacaaugcaggaagcgugucguucuuuccucaggccgaaaccuguaagguucagucuaacagaguguucugcgauacaaugaacucccuaacucugccaucagaggucaaucucugcaauguggacaucuuuaaccccaaauaugauuguaagauaaugaccaguaaaacagacguaagcuccucuguuauuacuagccugggugcuaucgugucaugcuacggcaagaccaaauguacagccaguaauaagaacagggggaucauuaagaccuucuccaauggaugcgauuaugucagcaacaaaggcguggacacugucucuguggguaauacgcuuuacuguguuaacaagcaagaggggcagucacuguaugugaaaggagaaccuaucauuaacuuuuacgacccauugguauucccgagugaugaguuugacgcaagcauaucccaggucaaugaaaagaucaaccagucucucgcuuucauucggaaaucggaugagcuguuacacaaugugaacgccggcaagagcacaaccaauaucaugaucacuaccauuauaaucguuauuaucgugauucugcuaucccucaucgcggucggccugcuuuuguauugcaaggcccgcugaggacuaguggaagcauuuuccuggcugauuaaaagaaauuacucagcuauggucaucuguuccuguuagaaggcuaugcagcauauuauauacuaugcgcauguuaugaaaugcauaauaaaaaauuuuaaaaaaucuaaaagaucuaaaaaaaaaaaaaaaaaaaaaaaaaaaaaaaaaaaaaaaaaaaaaaaaaaaaaaaaaaaaaaaaugcaucccccccccccccccccccccccccccccccaaaggcucuuuucagagccaccagaauu

SEQ ID NO: 2106 - RNA, 1943 nt, Artificial Sequence
  mRNA product Design c-2 comprising derived and/or modified sequence from HRSV(A2)__F-del_DSCav1_mut1 (opt4)
gggagacuccugucgggcggaaguaggaggaguagaguuuaaaaacaguacucuuuuuccgguucgggacguaguugaagcaacgacaagccggauaaccgcucuugagacaggaagcuuaccauggagcugcugauccugaaggccaacgccaucaccaccauccugaccgccgugaccuucugcuucgccagcggccagaacaucaccgaggaguucuaccagagcaccugcagcgccgugagcaagggcuaccugggcgcccugagaaccggcugguacaccagcgugaucaccaucgagcugagcaacaucaaggagaacaagugcaacggcaccgacgccaaggugaagcugaucaagcaggagcuggacaaguacaagaacgccgugaccgagcugcagcugcugaugcagagcacccccgccaccggcagcggcagcgccaucugcagcggcguggccgugugcaaggugcugcaccuggagggcgaggugaacaagaucaagagcgcccugcugagcaccaacaaggccguggugagccugagcaacggcgugagcgugcugaccuucaaggugcuggaccugaagaacuacaucgacaagcagcugcugcccauccugaacaagcagagcugcagcauccccaacaucgagaccgugaucgaguuccagcagaagaacaacagacugcuggagaucaccagagaguucagcgugaacgccggcgugaccacccccgugagcaccuacaugcugaccaacagcgagcugcugagccugaucaacgacaugcccaucaccaacgaccagaagaagcugaugagcaacaacgugcagaucgugagacagcagagcuacagcaucaugugcaucaucaaggaggaggugcuggccuacguggugcagcugccccuguacggcgugaucgacacccccugcuggaagcugcacaccagcccccugugcaccaccaacaccaaggagggcagcaacaucugccugaccagaaccgacagaggcugguacugcgacaacgccggcagcgugagcuucuucccccaggccgagaccugcaaggugcagagcaacagaguguucugcgacaccaugaacagccugacccugcccagcgaggugaaccugugcaacguggacaucuucaaccccaaguacgacugcaagaucaugaccagcaagaccgacgugagcagcagcgugaucaccagccugggcgccaucgugagcugcuacggcaagaccaagugcaccgccagcaacaagaacagaggcaucaucaagaccuucagcaacggcugcgacuacgugagcaacaagggcguggacaccgugagcgugggcaacacccuguacugcgugaacaagcaggagggccagagccuguacgugaagggcgagcccaucaucaacuucuacgacccccugguguuccccagcgacgaguucgacgccagcaucagccaggugaacgagaagaucaaccagagccuggccuucaucagaaagagcgacgagcugcugcacaacgugaacgccggcaagagcaccaccaacaucaugaucaccaccaucaucaucgugaucaucgugauccugcugagccugaucgccgugggccugcugcuguacugcaaggccagaugaggacuaguggaagcauuuuccuggcugauuaaaagaaauuacucagcuauggucaucuguuccuguuagaaggcuaugcagcauauuauauacuaugcgcauguuaugaaaugcauaauaaaaaauuuuaaaaaaucuaaaagaucuaaaaaaaaaaaaaaaaaaaaaaaaaaaaaaaaaaaaaaaaaaaaaaaaaaaaaaaaaaaaaaaaugcaucccccccccccccccccccccccccccccccaaaggcucuuuucagagccaccagaauu

SEQ ID NO: 2107 - RNA, 1943 nt, Artificial Sequence
  mRNA product Design c-2 comprising derived and/or modified sequence from HRSV(A2)__F-del_DSCav1_mut1 (opt5)
gggagacuccugucgggcggaaguaggaggaguagaguuuaaaaacaguacucuuuuuccgguucgggacguaguugaagcaacgacaagccggauaaccgcucuugagacaggaagcuuaccauggagcugcucauccugaaggccaacgcuauuaccacaauccuuacggccgugaccuucugcuuugcgagcggccagaauauuacagaagaguucuaccaauccaccuguucugcugucagcaaaggguaucugggagcccucagaacaggcugguacaccuccguuaucacaauugaacugucuaacaucaaggagaauaaaugcaacgggaccgacgccaaggugaaacuuaucaagcaggaacuggauaaguauaaaaaugcugugacggagcuccagcugcugaugcagagcacccccgccacaggauccggcucugcuauuuguagcggggucgccgugugcaagguucuccaccuggagggagaagugaacaaaaucaaguccgcgcuucugagcaccaauaaagccgucgugucucucuccaacggcguuagcgugcugacauuuaagguccuugaccugaagaauuacauugauaaacaacuccugccuauccugaacaagcagucuuguuccauuccgaauaucgagaccgugauugaguuccagcagaaaaacaaucggcuccuggaaaucacgcgcgaguuuagcgugaacgcuggcgucacaacccccguuucuacauauaugcuuaccaauuccgaacugcucagccugaucaacgacaugccuauuaccaacgaucaaaagaaacuuauguccaauaacgugcagaucgugagacagcagucuuacagcauuaugugcaucauuaaggaggaaguccuggccuaugugguucaacucccccuguacggggugaucgacacaccuuguuggaaacugcauacgagcccccucugcaccacaaauaccaaggagggauccaacaucugucugacacggaccgaucgcggcugguacugcgacaaugcugggucugucuccuucuuuccucaggccgaaacguguaaggugcagagcaacagaguuuucugcgauacaaugaacucucuuacccugccgagcgaggugaaucucugcaaugucgacauuuuuaaccccaaauaugauuguaagaucaugaccuccaaaacagacgugucuagcuccgucauuaccagccugggagcgaucgugucuugcuacggcaagacaaaauguacggccuccaauaagaaccgggggauuaucaagaccuucagcaauggaugcgauuauguuucuaacaaaggcguggacacagucuccgugggcaauacccuuuacuguguuaacaagcaagaggggcagagccuguaugugaaaggagaaccuaucauuaacuuuuacgacccccucgucuucccuuccgaugaguuugacgcuucuaucagccaggugaaugaaaagauuaaccagucccuggccuucauccgcaaaucugaugagcugcuccacaaugugaacgcuggcaagagcacaaccaauauuaugaucacgaccauuaucaucguuauuaucgucauucugcuuucccugaucgccguggggcuccugcuguauugcaaggccagaugaggacuaguggaagcauuuuccuggcugauuaaaagaaauuacucagcuauggucaucuguuccuguuagaaggcuaugcagcauauuauauacuaugcgcauguuaugaaaugcauaauaaaaaauuuuaaaaaaucuaaaagaucuaaaaaaaaaaaaaaaaaaaaaaaaaaaaaaaaaaaaaaaaaaaaaaaaaaaaaaaaaaaaaaaaugcaucccccccccccccccccccccccccccccccaaaggcucuuuucagagccaccagaauu

SEQ ID NO: 2108 - RNA, 1943 nt, Artificial Sequence
  mRNA product Design c-2 comprising derived and/or modified sequence from HRSV(A2)__F-del_DSCav1_mut1 (opt6)
gggagacuccugucgggcggaaguaggaggaguagaguuuaaaaacaguacucuuuuuccgguucgggacguaguugaagcaacgacaagccggauaaccgcucuugagacaggaagcuuaccauggaacuacucaucuuaaaagcaaacgcaauaacaacuauucuaaccgcaguaacauuuuguuucgcaucaggacaaaacauaaccgaagaauuuuaccaaucaacauguuccgcaguuucaaaaggauacuuaggcgcacuaagaacaggcugguacaccuccgugauaacaauagaauuaucaaacauaaaagaaaacaaauguaauggaacugacgccaaaguaaaacuaauaaaacaagaacuagacaaauauaaaaacgcaguaacugaacuacaauuacuaaugcaauccaccccagcaacaggcucaggcucagcaauuugcuccggagucgcugucugcaaaguacuacaucuugaaggcgaagucaauaaaauaaaaucagcacuucuaucaacaaacaaagcaguagucucacuaucaaacggaguaucaguacuaacauuuaaaguauuagaucuaaaaaacuauauagauaaacaacuacuacccauacucaauaaacaauccuguucaauaccaaauauagaaaccguaauagaauuucaacaaaaaaacaaucgacuauuagaaaucacccgagaauuuucagucaaugcaggcguaacaacaccaguaucaaccuacauguuaaccaacuccgaacuacuaucccucauaaacgacaugccaauaacaaacgaucaaaaaaaacuaauguccaacaacguacaaauagucagacaacaaucuuauucaauaaugugcaucauaaaagaagaaguucuagccuacguaguucaacuuccauuauacggcguaauugauacaccaugcuggaaacuacacacauccccacuauguacaacaaacacaaaagaaggaucaaacaucugcuuaacuagaacagacagaggaugguacugcgacaacgcaggaucagucucauucuuuccacaagcagaaacaugcaagguccaaucaaacagaguauucugcgacacaaugaacuccuuaacacuaccaucugaaguaaaccuauguaauguagacauauuuaacccaaaauacgacugcaaaauaaugaccucaaaaacagacguauccucaucaguaauuacaagccucggagccauaguaucaugcuacggaaaaacaaaauguacagcaucaaacaaaaacagaggaauaauaaaaacguucuccaacggaugcgacuauguaucaaacaaaggcguagacacaguaucagucggaaauacccuuuacugcguaaacaaacaagaaggccaaagucuauacguaaaaggagagccaauaauaaacuuuuaugacccccuuguauucccaucugacgaauuugaugcaucaauaucccaagucaacgaaaaaaucaaccaaucauuagccuuuauuagaaaaagugacgaacuauuacacaacguuaaugcagggaaaucaacaacaaauauaaugauuacaaccauaauuauaguuaucauaguuauacuacucucacuaaucgcaguaggauuacuauuauacugcaaagcaagauaaggacuaguggaagcauuuuccuggcugauuaaaagaaauuacucagcuauggucaucuguuccuguuagaaggcuaugcagcauauuauauacuaugcgcauguuaugaaaugcauaauaaaaaauuuuaaaaaaucuaaaagaucuaaaaaaaaaaaaaaaaaaaaaaaaaaaaaaaaaaaaaaaaaaaaaaaaaaaaaaaaaaaaaaaaugcaucccccccccccccccccccccccccccccccaaaggcucuuuucagagccaccagaauu

SEQ ID NO: 2109 - RNA, 1943 nt, Artificial Sequence
  mRNA product Design c-2 comprising derived and/or modified sequence from HRSV(A2)__F-del_DSCav1_mut1 (opt11)
gggagacuccugucgggcggaaguaggaggaguagaguuuaaaaacaguacucuuuuuccgguucgggacguaguugaagcaacgacaagccggauaaccgcucuugagacaggaagcuuaccauggaacuacucauccuaaaagccaacgcaaucacaaccauacuuacagcuguuaccuucugcuucgcauccggccaaaauaucaccgaagaguucuaccaaucaaccugcuccgccgucagcaaaggauaccucggcgcccuccgaaccggaugguacacuucugucaucacaaucgaacucuccaacaucaaagaaaacaaaugcaacgguaccgacgcgaaagucaaacucaucaaacaagaacuagacaaguacaaaaacgccgucaccgaacugcaacuccucaugcaauccacaccagcaacgggaucaggauccgccaucugcucaggcgucgccgucugcaaaguccugcaccuagaaggagaaguaaacaaaauuaaauccgcccuacucuccaccaacaaagcagucgucucacuauccaacggcgucuccguccucaccuuuaagguccucgaccucaaaaauuauauagacaaacaacuccuccccauccuaaacaaacaaucaugcuccauccccaacauagaaaccgucaucgaauuucaacagaaaaacaaccgacucuuagaaauuacccgcgaguucagcgucaacgccggagucaccacacccgucucaaccuacaugcucaccaacucagaacuccucucacuaaucaaugauaugcccaucacaaacgaccaaaagaaacucauguccaacaacguacaaaucguucgccaacaaagcuacuccaucauguguaucauuaaagaagaaguccucgccuacgucguccaacuuccgcucuacggcguaaucgacacccccugcuggaaacuucacaccucgccccucugcaccacaaacaccaaagaaggcuccaacaucugccuaacccgcaccgaccgcggcugguacugcgacaacgccggcuccgucucauuuuucccccaggcggagaccugcaaaguccaauccaaccgcgucuucugcgacaccaugaacucucuuacccucccaucagaaguaaaccucugcaacgucgacaucuuuaaccccaaauacgauugcaagauaaugaccuccaaaacagacgucucaucguccgucaucaccucccuaggagcuaucgucuccugcuacggcaagaccaaaugcaccgcuuccaacaaaaaccgcggcaucaucaaaaccuucuccaacgggugcgacuacgucucuaacaaaggcguggacacaguauccguaggaaacacacuguacugcguaaacaaacaagagggccaaucgcuuuacgucaaaggcgagccaauuaucaacuucuacgacccgcucgucuucccaucagacgaguucgacgcauccaucucccaagucaacgagaaaaucaaucagucccucgccuucauacgcaaauccgacgaacuccuacauaacguaaacgccggcaaaucuaccacaaacaucaugaucacaaccaucaucaucguaaucaucgucauccuucucucgcucaucgccguaggacugcuacuuuacugcaaggcccgcuaaggacuaguggaagcauuuuccuggcugauuaaaagaaauuacucagcuauggucaucuguuccuguuagaaggcuaugcagcauauuauauacuaugcgcauguuaugaaaugcauaauaaaaaauuuuaaaaaaucuaaaagaucuaaaaaaaaaaaaaaaaaaaaaaaaaaaaaaaaaaaaaaaaaaaaaaaaaaaaaaaaaaaaaaaaugcaucccccccccccccccccccccccccccccccaaaggcucuuuucagagccaccagaauu

SEQ ID NO: 2110 - RNA, 1920 nt, Artificial Sequence
  mRNA product Design c-3 comprising derived and/or modified sequence from HRSV(A2)__F-del_DSCav1_mut1 (opt1)
gggagaguccgcucagccagguugcagaagcggcuuagcguguguccuaaucuucucucugcguguagguaggccugugccgcaaacaagcuuaccauggagcugcucauccugaaggccaacgccaucaccaccauccugacggcggugaccuucugcuucgccagcggccagaacaucaccgaggaguucuaccaguccacgugcagcgccgucuccaagggguaccucggcgcccugcggaccggcugguacaccuccgugaucaccaucgagcugagcaacaucaaggagaacaagugcaacgggaccgacgccaaggugaagcucaucaagcaggagcuggacaaguacaagaacgcggucacggagcugcagcuccugaugcaguccaccccggcaaccggcuccggcuccgccaucugcagcggcgucgccgugugcaaggugcugcaccucgagggggaggucaacaagaucaagagcgcccugcuguccaccaacaaggccguggugagccucuccaacggcgucagcgugcugaccuucaaggugcuggaccucaagaacuacaucgacaagcagcugcugcccauccugaacaagcagagcugcuccauccccaacaucgagacggugaucgaguuccagcagaagaacaaccggcuccuggagaucacccgcgaguucagcgugaacgccggggucaccacccccguguccacguacaugcugaccaacagcgagcuccugucccugaucaacgacaugccgaucaccaacgaccagaagaagcucaugagcaacaacgugcagaucguccggcagcaguccuacagcaucaugugcaucaucaaggaggaggugcuggcguacgugguccagcugccccucuacggcgugaucgacacccccugcuggaagcugcacacgagcccccugugcaccaccaacaccaaggagggguccaacaucugccucacgcgcaccgaccggggcugguacugcgacaacgccggcagcgucuccuucuucccgcaggccgagaccugcaaggugcagagcaaccgcguguucugcgacaccaugaacucccugacgcugcccagcgagguaaaccucugcaacgucgacaucuucaaccccaaguacgacugcaagaucaugaccuccaagaccgacgugagcuccagcgugaucaccucccugggggccaucgucagcugcuacggcaagacgaagugcaccgccagcaacaagaaccgggggaucaucaagaccuucuccaacggcugcgacuacgugagcaacaagggcguggacaccguguccgucgggaacacccuguacugcgugaacaagcaggagggccagagccucuacgugaagggggagcccaucaucaacuucuacgacccgcuggucuuccccuccgacgaguucgacgcgagcaucucccaggugaacgagaagaucaaccagagccuggccuucauccgcaaguccgacgagcugcuccacaacgugaacgccggcaagagcacgaccaacaucaugaucaccaccaucaucaucgucaucaucgugauccugcugucccucaucgccguggggcugcugcucuacugcaaggcccggugaggacuaguacuggcugcaucucccuuuccucuguccuccauccuucucccaggauggugaagggggaccugguacccagugauccccaccccaggauccuaaaucaugacuuaccugcuaauaaaaacucauuggaaaagugagaagaucuaaaaaaaaaaaaaaaaaaaaaaaaaaaaaaaaaaaaaaaaaaaaaaaaaaaaaaaaaaaaaaaaugcaucccccccccccccccccccccccccccccccaaaggcucuuuucagagccaccagaauu

SEQ ID NO: 2111 - RNA, 1920 nt, Artificial Sequence
  mRNA product Design c-3 comprising derived and/or modified sequence from HRSV(A2)__F-del_DSCav1_mut1 (opt1)
gggagaguccgcucagccagguugcagaagcggcuuagcguguguccuaaucuucucucugcguguagguaggccugugccgcaaacaagcuuaccauggagcugcucauccugaaggccaacgccaucaccaccauccugacggcggugaccuucugcuucgccagcggccagaacaucaccgaggaguucuaccaguccacgugcagcgccgucuccaagggguaccucggcgcccugcgcaccgggugguacaccagcgugaucaccaucgagcuguccaacaucaaggagaacaagugcaacggcaccgacgccaaggugaagcucaucaagcaggagcuggacaaguacaagaacgcggucacggagcugcagcuccugaugcagagcacccccgccaccggguccggcagcgccaucugcuccggcguggccgugugcaagguccugcaccucgagggggaggugaacaagaucaagagcgcgcugcuguccaccaacaaggccguggucagccucuccaacggcgugagcgugcugacguucaagguccuggaccucaagaacuacaucgacaagcagcugcugccgauccucaacaagcaguccugcagcauccccaacaucgagaccgugaucgaguuccagcagaagaacaaccggcugcuggagaucacccgcgaguucuccgugaacgccggggucaccacgcccgugagcaccuacaugcucaccaacuccgagcugcugagccucaucaacgacaugcccaucaccaacgaccagaagaagcugaugagcaacaacgugcagaucguccggcagcaguccuacagcaucaugugcaucaucaaggaggaggugcuggccuacgugguccagcucccgcuguacggcgugaucgacacgcccugcuggaagcugcacaccagcccccucugcaccaccaacacgaaggagggguccaacaucugccugacccgcaccgaccggggcugguacugcgacaacgccggcuccgugagcuucuucccccaggcggagaccugcaagguccaguccaaccgcguguucugcgacacgaugaacagccugacccucccguccgaggucaaccugugcaacguggacaucuucaaccccaaguacgacugcaagaucaugaccagcaagaccgacguguccagcuccgucaucacgagccugggggccaucguguccugcuacggcaagaccaagugcaccgccagcaacaagaaccgggggaucaucaagaccuucuccaacggcugcgacuacgugagcaacaagggcgucgacacgguguccguggggaacacccucuacugcgucaacaagcaggagggccagagccuguacgugaagggggagcccaucaucaacuucuacgacccccugguguucccgagcgacgaguucgacgccuccaucagccaggucaacgagaagaucaaccagucccucgccuucauccgcaagagcgacgagcugcugcacaacgugaacgcgggcaaguccaccaccaacaucaugaucaccacgaucaucaucgugaucaucgucauccuccugagccugaucgccguggggcuccugcuguacugcaaggcccggugaggacuaguacuggcugcaucucccuuuccucuguccuccauccuucucccaggauggugaagggggaccugguacccagugauccccaccccaggauccuaaaucaugacuuaccugcuaauaaaaacucauuggaaaagugagaagaucuaaaaaaaaaaaaaaaaaaaaaaaaaaaaaaaaaaaaaaaaaaaaaaaaaaaaaaaaaaaaaaaaugcaucccccccccccccccccccccccccccccccaaaggcucuuuucagagccaccagaauu

SEQ ID NO: 2112 - RNA, 1920 nt, Artificial Sequence
  mRNA product Design c-3 comprising derived and/or modified sequence from HRSV(A2)__F-del_DSCav1_mut1 (opt2)
gggagaguccgcucagccagguugcagaagcggcuuagcguguguccuaaucuucucucugcguguagguaggccugugccgcaaacaagcuuaccauggagcuccucauccucaaggccaacgccaucaccaccauccucaccgccgucaccuucugcuucgccuccggccagaacaucaccgaggaguucuaccaguccaccugcuccgccgucuccaagggcuaccucggcgcccuccgcaccggcugguacaccuccgucaucaccaucgagcucuccaacaucaaggagaacaagugcaacggcaccgacgccaaggucaagcucaucaagcaggagcucgacaaguacaagaacgccgucaccgagcuccagcuccucaugcaguccacccccgccaccggcuccggcuccgccaucugcuccggcgucgccgucugcaagguccuccaccucgagggcgaggucaacaagaucaaguccgcccuccucuccaccaacaaggccgucgucucccucuccaacggcgucuccguccucaccuucaagguccucgaccucaagaacuacaucgacaagcagcuccuccccauccucaacaagcaguccugcuccauccccaacaucgagaccgucaucgaguuccagcagaagaacaaccgccuccucgagaucacccgcgaguucuccgucaacgccggcgucaccacccccgucuccaccuacaugcucaccaacuccgagcuccucucccucaucaacgacaugcccaucaccaacgaccagaagaagcucauguccaacaacguccagaucguccgccagcaguccuacuccaucaugugcaucaucaaggaggagguccucgccuacgucguccagcucccccucuacggcgucaucgacacccccugcuggaagcuccacaccuccccccucugcaccaccaacaccaaggagggcuccaacaucugccucacccgcaccgaccgcggcugguacugcgacaacgccggcuccgucuccuucuucccccaggccgagaccugcaagguccaguccaaccgcgucuucugcgacaccaugaacucccucacccuccccuccgaggucaaccucugcaacgucgacaucuucaaccccaaguacgacugcaagaucaugaccuccaagaccgacgucuccuccuccgucaucaccucccucggcgccaucgucuccugcuacggcaagaccaagugcaccgccuccaacaagaaccgcggcaucaucaagaccuucuccaacggcugcgacuacgucuccaacaagggcgucgacaccgucuccgucggcaacacccucuacugcgucaacaagcaggagggccagucccucuacgucaagggcgagcccaucaucaacuucuacgacccccucgucuuccccuccgacgaguucgacgccuccaucucccaggucaacgagaagaucaaccagucccucgccuucauccgcaaguccgacgagcuccuccacaacgucaacgccggcaaguccaccaccaacaucaugaucaccaccaucaucaucgucaucaucgucauccuccucucccucaucgccgucggccuccuccucuacugcaaggcccgcugaggacuaguacuggcugcaucucccuuuccucuguccuccauccuucucccaggauggugaagggggaccugguacccagugauccccaccccaggauccuaaaucaugacuuaccugcuaauaaaaacucauuggaaaagugagaagaucuaaaaaaaaaaaaaaaaaaaaaaaaaaaaaaaaaaaaaaaaaaaaaaaaaaaaaaaaaaaaaaaaugcaucccccccccccccccccccccccccccccccaaaggcucuuuucagagccaccagaauu

SEQ ID NO: 2113 - RNA, 1920 nt, Artificial Sequence
  mRNA product Design c-3 comprising derived and/or modified sequence from HRSV(A2)__F-del_DSCav1_mut1 (opt3)
gggagaguccgcucagccagguugcagaagcggcuuagcguguguccuaaucuucucucugcguguagguaggccugugccgcaaacaagcuuaccauggagcugcucauccuuaaggccaacgcuauuaccacaauacugacugcagugacguucugcuuugccagcggccagaauaucaccgaagaguucuaccaauccacauguucugcggucucaaaaggguauuugggagcuuuaagaacugguugguacaccaguguuauuacaaucgaacugagcaacauuaaggagaauaaaugcaacggcaccgacgccaaggugaaacuaaucaagcaggaacucgauaaguauaaaaaugcaguaacugagcugcagcuucugaugcaguccacacccgccaccgggucuggaucggcuauauguucaggcguggcagucugcaagguguugcaccucgagggugaaguuaacaaaaucaagagcgcccugcugaguacgaauaaagcuguggucucccucucuaacggggugagcguauuaacuuuuaagguucuggaccuuaagaauuacauugauaaacaauugcugccuauccuaaacaagcaguccuguucaauuccaaauaucgagaccgugauagaguuccagcagaaaaacaauaggcuccuggaaauuacacgggaguuuagugucaacgccggagugacuaccccggugagcacauauaugcuuaccaauucugaacuguugucccucaucaacgacaugcccauuacgaacgaucaaaagaaacugaugucaaauaacguccagaucguucgccagcagagcuacaguaucaugugcauuauaaaggaggaaguguuagcguauguagugcaacugccucucuacggcgucaucgacacuccauguuggaaacuucauacaucuccccugugcaccacuaauacaaaggagggcuccaacauuuguuugacccgaacggaucgugggugguacugcgacaaugcaggaagcgugucguucuuuccucaggccgaaaccuguaagguucagucuaacagaguguucugcgauacaaugaacucccuaacucugccaucagaggucaaucucugcaauguggacaucuuuaaccccaaauaugauuguaagauaaugaccaguaaaacagacguaagcuccucuguuauuacuagccugggugcuaucgugucaugcuacggcaagaccaaauguacagccaguaauaagaacagggggaucauuaagaccuucuccaauggaugcgauuaugucagcaacaaaggcguggacacugucucuguggguaauacgcuuuacuguguuaacaagcaagaggggcagucacuguaugugaaaggagaaccuaucauuaacuuuuacgacccauugguauucccgagugaugaguuugacgcaagcauaucccaggucaaugaaaagaucaaccagucucucgcuuucauucggaaaucggaugagcuguuacacaaugugaacgccggcaagagcacaaccaauaucaugaucacuaccauuauaaucguuauuaucgugauucugcuaucccucaucgcggucggccugcuuuuguauugcaaggcccgcugaggacuaguacuggcugcaucucccuuuccucuguccuccauccuucucccaggauggugaagggggaccugguacccagugauccccaccccaggauccuaaaucaugacuuaccugcuaauaaaaacucauuggaaaagugagaagaucuaaaaaaaaaaaaaaaaaaaaaaaaaaaaaaaaaaaaaaaaaaaaaaaaaaaaaaaaaaaaaaaaugcaucccccccccccccccccccccccccccccccaaaggcucuuuucagagccaccagaauu

SEQ ID NO: 2114 - RNA, 1920 nt, Artificial Sequence
  mRNA product Design c-3 comprising derived and/or modified sequence from HRSV(A2)__F-del_DSCav1_mut1 (opt4)
gggagaguccgcucagccagguugcagaagcggcuuagcguguguccuaaucuucucucugcguguagguaggccugugccgcaaacaagcuuaccauggagcugcugauccugaaggccaacgccaucaccaccauccugaccgccgugaccuucugcuucgccagcggccagaacaucaccgaggaguucuaccagagcaccugcagcgccgugagcaagggcuaccugggcgcccugagaaccggcugguacaccagcgugaucaccaucgagcugagcaacaucaaggagaacaagugcaacggcaccgacgccaaggugaagcugaucaagcaggagcuggacaaguacaagaacgccgugaccgagcugcagcugcugaugcagagcacccccgccaccggcagcggcagcgccaucugcagcggcguggccgugugcaaggugcugcaccuggagggcgaggugaacaagaucaagagcgcccugcugagcaccaacaaggccguggugagccugagcaacggcgugagcgugcugaccuucaaggugcuggaccugaagaacuacaucgacaagcagcugcugcccauccugaacaagcagagcugcagcauccccaacaucgagaccgugaucgaguuccagcagaagaacaacagacugcuggagaucaccagagaguucagcgugaacgccggcgugaccacccccgugagcaccuacaugcugaccaacagcgagcugcugagccugaucaacgacaugcccaucaccaacgaccagaagaagcugaugagcaacaacgugcagaucgugagacagcagagcuacagcaucaugugcaucaucaaggaggaggugcuggccuacguggugcagcugccccuguacggcgugaucgacacccccugcuggaagcugcacaccagcccccugugcaccaccaacaccaaggagggcagcaacaucugccugaccagaaccgacagaggcugguacugcgacaacgccggcagcgugagcuucuucccccaggccgagaccugcaaggugcagagcaacagaguguucugcgacaccaugaacagccugacccugcccagcgaggugaaccugugcaacguggacaucuucaaccccaaguacgacugcaagaucaugaccagcaagaccgacgugagcagcagcgugaucaccagccugggcgccaucgugagcugcuacggcaagaccaagugcaccgccagcaacaagaacagaggcaucaucaagaccuucagcaacggcugcgacuacgugagcaacaagggcguggacaccgugagcgugggcaacacccuguacugcgugaacaagcaggagggccagagccuguacgugaagggcgagcccaucaucaacuucuacgacccccugguguuccccagcgacgaguucgacgccagcaucagccaggugaacgagaagaucaaccagagccuggccuucaucagaaagagcgacgagcugcugcacaacgugaacgccggcaagagcaccaccaacaucaugaucaccaccaucaucaucgugaucaucgugauccugcugagccugaucgccgugggccugcugcuguacugcaaggccagaugaggacuaguacuggcugcaucucccuuuccucuguccuccauccuucucccaggauggugaagggggaccugguacccagugauccccaccccaggauccuaaaucaugacuuaccugcuaauaaaaacucauuggaaaagugagaagaucuaaaaaaaaaaaaaaaaaaaaaaaaaaaaaaaaaaaaaaaaaaaaaaaaaaaaaaaaaaaaaaaaugcaucccccccccccccccccccccccccccccccaaaggcucuuuucagagccaccagaauu

SEQ ID NO: 2115 - RNA, 1920 nt, Artificial Sequence
  mRNA product Design c-3 comprising derived and/or modified sequence from HRSV(A2)__F-del_DSCav1_mut1 (opt5)
gggagaguccgcucagccagguugcagaagcggcuuagcguguguccuaaucuucucucugcguguagguaggccugugccgcaaacaagcuuaccauggagcugcucauccugaaggccaacgcuauuaccacaauccuuacggccgugaccuucugcuuugcgagcggccagaauauuacagaagaguucuaccaauccaccuguucugcugucagcaaaggguaucugggagcccucagaacaggcugguacaccuccguuaucacaauugaacugucuaacaucaaggagaauaaaugcaacgggaccgacgccaaggugaaacuuaucaagcaggaacuggauaaguauaaaaaugcugugacggagcuccagcugcugaugcagagcacccccgccacaggauccggcucugcuauuuguagcggggucgccgugugcaagguucuccaccuggagggagaagugaacaaaaucaaguccgcgcuucugagcaccaauaaagccgucgugucucucuccaacggcguuagcgugcugacauuuaagguccuugaccugaagaauuacauugauaaacaacuccugccuauccugaacaagcagucuuguuccauuccgaauaucgagaccgugauugaguuccagcagaaaaacaaucggcuccuggaaaucacgcgcgaguuuagcgugaacgcuggcgucacaacccccguuucuacauauaugcuuaccaauuccgaacugcucagccugaucaacgacaugccuauuaccaacgaucaaaagaaacuuauguccaauaacgugcagaucgugagacagcagucuuacagcauuaugugcaucauuaaggaggaaguccuggccuaugugguucaacucccccuguacggggugaucgacacaccuuguuggaaacugcauacgagcccccucugcaccacaaauaccaaggagggauccaacaucugucugacacggaccgaucgcggcugguacugcgacaaugcugggucugucuccuucuuuccucaggccgaaacguguaaggugcagagcaacagaguuuucugcgauacaaugaacucucuuacccugccgagcgaggugaaucucugcaaugucgacauuuuuaaccccaaauaugauuguaagaucaugaccuccaaaacagacgugucuagcuccgucauuaccagccugggagcgaucgugucuugcuacggcaagacaaaauguacggccuccaauaagaaccgggggauuaucaagaccuucagcaauggaugcgauuauguuucuaacaaaggcguggacacagucuccgugggcaauacccuuuacuguguuaacaagcaagaggggcagagccuguaugugaaaggagaaccuaucauuaacuuuuacgacccccucgucuucccuuccgaugaguuugacgcuucuaucagccaggugaaugaaaagauuaaccagucccuggccuucauccgcaaaucugaugagcugcuccacaaugugaacgcuggcaagagcacaaccaauauuaugaucacgaccauuaucaucguuauuaucgucauucugcuuucccugaucgccguggggcuccugcuguauugcaaggccagaugaggacuaguacuggcugcaucucccuuuccucuguccuccauccuucucccaggauggugaagggggaccugguacccagugauccccaccccaggauccuaaaucaugacuuaccugcuaauaaaaacucauuggaaaagugagaagaucuaaaaaaaaaaaaaaaaaaaaaaaaaaaaaaaaaaaaaaaaaaaaaaaaaaaaaaaaaaaaaaaaugcaucccccccccccccccccccccccccccccccaaaggcucuuuucagagccaccagaauu

SEQ ID NO: 2116 - RNA, 1920 nt, Artificial Sequence
  mRNA product Design c-3 comprising derived and/or modified sequence from HRSV(A2)__F-del_DSCav1_mut1 (opt6)
gggagaguccgcucagccagguugcagaagcggcuuagcguguguccuaaucuucucucugcguguagguaggccugugccgcaaacaagcuuaccauggaacuacucaucuuaaaagcaaacgcaauaacaacuauucuaaccgcaguaacauuuuguuucgcaucaggacaaaacauaaccgaagaauuuuaccaaucaacauguuccgcaguuucaaaaggauacuuaggcgcacuaagaacaggcugguacaccuccgugauaacaauagaauuaucaaacauaaaagaaaacaaauguaauggaacugacgccaaaguaaaacuaauaaaacaagaacuagacaaauauaaaaacgcaguaacugaacuacaauuacuaaugcaauccaccccagcaacaggcucaggcucagcaauuugcuccggagucgcugucugcaaaguacuacaucuugaaggcgaagucaauaaaauaaaaucagcacuucuaucaacaaacaaagcaguagucucacuaucaaacggaguaucaguacuaacauuuaaaguauuagaucuaaaaaacuauauagauaaacaacuacuacccauacucaauaaacaauccuguucaauaccaaauauagaaaccguaauagaauuucaacaaaaaaacaaucgacuauuagaaaucacccgagaauuuucagucaaugcaggcguaacaacaccaguaucaaccuacauguuaaccaacuccgaacuacuaucccucauaaacgacaugccaauaacaaacgaucaaaaaaaacuaauguccaacaacguacaaauagucagacaacaaucuuauucaauaaugugcaucauaaaagaagaaguucuagccuacguaguucaacuuccauuauacggcguaauugauacaccaugcuggaaacuacacacauccccacuauguacaacaaacacaaaagaaggaucaaacaucugcuuaacuagaacagacagaggaugguacugcgacaacgcaggaucagucucauucuuuccacaagcagaaacaugcaagguccaaucaaacagaguauucugcgacacaaugaacuccuuaacacuaccaucugaaguaaaccuauguaauguagacauauuuaacccaaaauacgacugcaaaauaaugaccucaaaaacagacguauccucaucaguaauuacaagccucggagccauaguaucaugcuacggaaaaacaaaauguacagcaucaaacaaaaacagaggaauaauaaaaacguucuccaacggaugcgacuauguaucaaacaaaggcguagacacaguaucagucggaaauacccuuuacugcguaaacaaacaagaaggccaaagucuauacguaaaaggagagccaauaauaaacuuuuaugacccccuuguauucccaucugacgaauuugaugcaucaauaucccaagucaacgaaaaaaucaaccaaucauuagccuuuauuagaaaaagugacgaacuauuacacaacguuaaugcagggaaaucaacaacaaauauaaugauuacaaccauaauuauaguuaucauaguuauacuacucucacuaaucgcaguaggauuacuauuauacugcaaagcaagauaaggacuaguacuggcugcaucucccuuuccucuguccuccauccuucucccaggauggugaagggggaccugguacccagugauccccaccccaggauccuaaaucaugacuuaccugcuaauaaaaacucauuggaaaagugagaagaucuaaaaaaaaaaaaaaaaaaaaaaaaaaaaaaaaaaaaaaaaaaaaaaaaaaaaaaaaaaaaaaaaugcaucccccccccccccccccccccccccccccccaaaggcucuuuucagagccaccagaauu

SEQ ID NO: 2117 - RNA, 1920 nt, Artificial Sequence
  mRNA product Design c-3 comprising derived and/or modified sequence from HRSV(A2)__F-del_DSCav1_mut1 (opt11)
gggagaguccgcucagccagguugcagaagcggcuuagcguguguccuaaucuucucucugcguguagguaggccugugccgcaaacaagcuuaccauggaacuacucauccuaaaagccaacgcaaucacaaccauacuuacagcuguuaccuucugcuucgcauccggccaaaauaucaccgaagaguucuaccaaucaaccugcuccgccgucagcaaaggauaccucggcgcccuccgaaccggaugguacacuucugucaucacaaucgaacucuccaacaucaaagaaaacaaaugcaacgguaccgacgcgaaagucaaacucaucaaacaagaacuagacaaguacaaaaacgccgucaccgaacugcaacuccucaugcaauccacaccagcaacgggaucaggauccgccaucugcucaggcgucgccgucugcaaaguccugcaccuagaaggagaaguaaacaaaauuaaauccgcccuacucuccaccaacaaagcagucgucucacuauccaacggcgucuccguccucaccuuuaagguccucgaccucaaaaauuauauagacaaacaacuccuccccauccuaaacaaacaaucaugcuccauccccaacauagaaaccgucaucgaauuucaacagaaaaacaaccgacucuuagaaauuacccgcgaguucagcgucaacgccggagucaccacacccgucucaaccuacaugcucaccaacucagaacuccucucacuaaucaaugauaugcccaucacaaacgaccaaaagaaacucauguccaacaacguacaaaucguucgccaacaaagcuacuccaucauguguaucauuaaagaagaaguccucgccuacgucguccaacuuccgcucuacggcguaaucgacacccccugcuggaaacuucacaccucgccccucugcaccacaaacaccaaagaaggcuccaacaucugccuaacccgcaccgaccgcggcugguacugcgacaacgccggcuccgucucauuuuucccccaggcggagaccugcaaaguccaauccaaccgcgucuucugcgacaccaugaacucucuuacccucccaucagaaguaaaccucugcaacgucgacaucuuuaaccccaaauacgauugcaagauaaugaccuccaaaacagacgucucaucguccgucaucaccucccuaggagcuaucgucuccugcuacggcaagaccaaaugcaccgcuuccaacaaaaaccgcggcaucaucaaaaccuucuccaacgggugcgacuacgucucuaacaaaggcguggacacaguauccguaggaaacacacuguacugcguaaacaaacaagagggccaaucgcuuuacgucaaaggcgagccaauuaucaacuucuacgacccgcucgucuucccaucagacgaguucgacgcauccaucucccaagucaacgagaaaaucaaucagucccucgccuucauacgcaaauccgacgaacuccuacauaacguaaacgccggcaaaucuaccacaaacaucaugaucacaaccaucaucaucguaaucaucgucauccuucucucgcucaucgccguaggacugcuacuuuacugcaaggcccgcuaaggacuaguacuggcugcaucucccuuuccucuguccuccauccuucucccaggauggugaagggggaccugguacccagugauccccaccccaggauccuaaaucaugacuuaccugcuaauaaaaacucauuggaaaagugagaagaucuaaaaaaaaaaaaaaaaaaaaaaaaaaaaaaaaaaaaaaaaaaaaaaaaaaaaaaaaaaaaaaaaugcaucccccccccccccccccccccccccccccccaaaggcucuuuucagagccaccagaauu

SEQ ID NO: 2118 - RNA, 1916 nt, Artificial Sequence
  mRNA product Design c-4 comprising derived and/or modified sequence from HRSV(A2)__F-del_DSCav1_mut1 (opt1)
gggagaguccgcucagccagguugcagaagcggcuuagcguguguccuaaucuucucucugcguguagguaggccugugccgcaaacaagcuuaccauggagcugcucauccugaaggccaacgccaucaccaccauccugacggcggugaccuucugcuucgccagcggccagaacaucaccgaggaguucuaccaguccacgugcagcgccgucuccaagggguaccucggcgcccugcggaccggcugguacaccuccgugaucaccaucgagcugagcaacaucaaggagaacaagugcaacgggaccgacgccaaggugaagcucaucaagcaggagcuggacaaguacaagaacgcggucacggagcugcagcuccugaugcaguccaccccggcaaccggcuccggcuccgccaucugcagcggcgucgccgugugcaaggugcugcaccucgagggggaggucaacaagaucaagagcgcccugcuguccaccaacaaggccguggugagccucuccaacggcgucagcgugcugaccuucaaggugcuggaccucaagaacuacaucgacaagcagcugcugcccauccugaacaagcagagcugcuccauccccaacaucgagacggugaucgaguuccagcagaagaacaaccggcuccuggagaucacccgcgaguucagcgugaacgccggggucaccacccccguguccacguacaugcugaccaacagcgagcuccugucccugaucaacgacaugccgaucaccaacgaccagaagaagcucaugagcaacaacgugcagaucguccggcagcaguccuacagcaucaugugcaucaucaaggaggaggugcuggcguacgugguccagcugccccucuacggcgugaucgacacccccugcuggaagcugcacacgagcccccugugcaccaccaacaccaaggagggguccaacaucugccucacgcgcaccgaccggggcugguacugcgacaacgccggcagcgucuccuucuucccgcaggccgagaccugcaaggugcagagcaaccgcguguucugcgacaccaugaacucccugacgcugcccagcgagguaaaccucugcaacgucgacaucuucaaccccaaguacgacugcaagaucaugaccuccaagaccgacgugagcuccagcgugaucaccucccugggggccaucgucagcugcuacggcaagacgaagugcaccgccagcaacaagaaccgggggaucaucaagaccuucuccaacggcugcgacuacgugagcaacaagggcguggacaccguguccgucgggaacacccuguacugcgugaacaagcaggagggccagagccucuacgugaagggggagcccaucaucaacuucuacgacccgcuggucuuccccuccgacgaguucgacgcgagcaucucccaggugaacgagaagaucaaccagagccuggccuucauccgcaaguccgacgagcugcuccacaacgugaacgccggcaagagcacgaccaacaucaugaucaccaccaucaucaucgucaucaucgugauccugcugucccucaucgccguggggcugcugcucuacugcaaggcccggugaggacuaguggaagcauuuuccuggcugauuaaaagaaauuacucagcuauggucaucuguuccuguuagaaggcuaugcagcauauuauauacuaugcgcauguuaugaaaugcauaauaaaaaauuuuaaaaaaucuaaaagaucuaaaaaaaaaaaaaaaaaaaaaaaaaaaaaaaaaaaaaaaaaaaaaaaaaaaaaaaaaaaaaaaaugcaucccccccccccccccccccccccccccccccaaaggcucuuuucagagccaccagaauu

SEQ ID NO: 2119 - RNA, 1916 nt, Artificial Sequence
  mRNA product Design c-4 comprising derived and/or modified sequence from HRSV(A2)__F-del_DSCav1_mut1 (opt1)
gggagaguccgcucagccagguugcagaagcggcuuagcguguguccuaaucuucucucugcguguagguaggccugugccgcaaacaagcuuaccauggagcugcucauccugaaggccaacgccaucaccaccauccugacggcggugaccuucugcuucgccagcggccagaacaucaccgaggaguucuaccaguccacgugcagcgccgucuccaagggguaccucggcgcccugcgcaccgggugguacaccagcgugaucaccaucgagcuguccaacaucaaggagaacaagugcaacggcaccgacgccaaggugaagcucaucaagcaggagcuggacaaguacaagaacgcggucacggagcugcagcuccugaugcagagcacccccgccaccggguccggcagcgccaucugcuccggcguggccgugugcaagguccugcaccucgagggggaggugaacaagaucaagagcgcgcugcuguccaccaacaaggccguggucagccucuccaacggcgugagcgugcugacguucaagguccuggaccucaagaacuacaucgacaagcagcugcugccgauccucaacaagcaguccugcagcauccccaacaucgagaccgugaucgaguuccagcagaagaacaaccggcugcuggagaucacccgcgaguucuccgugaacgccggggucaccacgcccgugagcaccuacaugcucaccaacuccgagcugcugagccucaucaacgacaugcccaucaccaacgaccagaagaagcugaugagcaacaacgugcagaucguccggcagcaguccuacagcaucaugugcaucaucaaggaggaggugcuggccuacgugguccagcucccgcuguacggcgugaucgacacgcccugcuggaagcugcacaccagcccccucugcaccaccaacacgaaggagggguccaacaucugccugacccgcaccgaccggggcugguacugcgacaacgccggcuccgugagcuucuucccccaggcggagaccugcaagguccaguccaaccgcguguucugcgacacgaugaacagccugacccucccguccgaggucaaccugugcaacguggacaucuucaaccccaaguacgacugcaagaucaugaccagcaagaccgacguguccagcuccgucaucacgagccugggggccaucguguccugcuacggcaagaccaagugcaccgccagcaacaagaaccgggggaucaucaagaccuucuccaacggcugcgacuacgugagcaacaagggcgucgacacgguguccguggggaacacccucuacugcgucaacaagcaggagggccagagccuguacgugaagggggagcccaucaucaacuucuacgacccccugguguucccgagcgacgaguucgacgccuccaucagccaggucaacgagaagaucaaccagucccucgccuucauccgcaagagcgacgagcugcugcacaacgugaacgcgggcaaguccaccaccaacaucaugaucaccacgaucaucaucgugaucaucgucauccuccugagccugaucgccguggggcuccugcuguacugcaaggcccggugaggacuaguggaagcauuuuccuggcugauuaaaagaaauuacucagcuauggucaucuguuccuguuagaaggcuaugcagcauauuauauacuaugcgcauguuaugaaaugcauaauaaaaaauuuuaaaaaaucuaaaagaucuaaaaaaaaaaaaaaaaaaaaaaaaaaaaaaaaaaaaaaaaaaaaaaaaaaaaaaaaaaaaaaaaugcaucccccccccccccccccccccccccccccccaaaggcucuuuucagagccaccagaauu

SEQ ID NO: 2120 - RNA, 1916 nt, Artificial Sequence
  mRNA product Design c-4 comprising derived and/or modified sequence from HRSV(A2)__F-del_DSCav1_mut1 (opt2)
gggagaguccgcucagccagguugcagaagcggcuuagcguguguccuaaucuucucucugcguguagguaggccugugccgcaaacaagcuuaccauggagcuccucauccucaaggccaacgccaucaccaccauccucaccgccgucaccuucugcuucgccuccggccagaacaucaccgaggaguucuaccaguccaccugcuccgccgucuccaagggcuaccucggcgcccuccgcaccggcugguacaccuccgucaucaccaucgagcucuccaacaucaaggagaacaagugcaacggcaccgacgccaaggucaagcucaucaagcaggagcucgacaaguacaagaacgccgucaccgagcuccagcuccucaugcaguccacccccgccaccggcuccggcuccgccaucugcuccggcgucgccgucugcaagguccuccaccucgagggcgaggucaacaagaucaaguccgcccuccucuccaccaacaaggccgucgucucccucuccaacggcgucuccguccucaccuucaagguccucgaccucaagaacuacaucgacaagcagcuccuccccauccucaacaagcaguccugcuccauccccaacaucgagaccgucaucgaguuccagcagaagaacaaccgccuccucgagaucacccgcgaguucuccgucaacgccggcgucaccacccccgucuccaccuacaugcucaccaacuccgagcuccucucccucaucaacgacaugcccaucaccaacgaccagaagaagcucauguccaacaacguccagaucguccgccagcaguccuacuccaucaugugcaucaucaaggaggagguccucgccuacgucguccagcucccccucuacggcgucaucgacacccccugcuggaagcuccacaccuccccccucugcaccaccaacaccaaggagggcuccaacaucugccucacccgcaccgaccgcggcugguacugcgacaacgccggcuccgucuccuucuucccccaggccgagaccugcaagguccaguccaaccgcgucuucugcgacaccaugaacucccucacccuccccuccgaggucaaccucugcaacgucgacaucuucaaccccaaguacgacugcaagaucaugaccuccaagaccgacgucuccuccuccgucaucaccucccucggcgccaucgucuccugcuacggcaagaccaagugcaccgccuccaacaagaaccgcggcaucaucaagaccuucuccaacggcugcgacuacgucuccaacaagggcgucgacaccgucuccgucggcaacacccucuacugcgucaacaagcaggagggccagucccucuacgucaagggcgagcccaucaucaacuucuacgacccccucgucuuccccuccgacgaguucgacgccuccaucucccaggucaacgagaagaucaaccagucccucgccuucauccgcaaguccgacgagcuccuccacaacgucaacgccggcaaguccaccaccaacaucaugaucaccaccaucaucaucgucaucaucgucauccuccucucccucaucgccgucggccuccuccucuacugcaaggcccgcugaggacuaguggaagcauuuuccuggcugauuaaaagaaauuacucagcuauggucaucuguuccuguuagaaggcuaugcagcauauuauauacuaugcgcauguuaugaaaugcauaauaaaaaauuuuaaaaaaucuaaaagaucuaaaaaaaaaaaaaaaaaaaaaaaaaaaaaaaaaaaaaaaaaaaaaaaaaaaaaaaaaaaaaaaaugcaucccccccccccccccccccccccccccccccaaaggcucuuuucagagccaccagaauu

SEQ ID NO: 2121 - RNA, 1916 nt, Artificial Sequence
  mRNA product Design c-4 comprising derived and/or modified sequence from HRSV(A2)__F-del_DSCav1_mut1 (opt3)
gggagaguccgcucagccagguugcagaagcggcuuagcguguguccuaaucuucucucugcguguagguaggccugugccgcaaacaagcuuaccauggagcugcucauccuuaaggccaacgcuauuaccacaauacugacugcagugacguucugcuuugccagcggccagaauaucaccgaagaguucuaccaauccacauguucugcggucucaaaaggguauuugggagcuuuaagaacugguugguacaccaguguuauuacaaucgaacugagcaacauuaaggagaauaaaugcaacggcaccgacgccaaggugaaacuaaucaagcaggaacucgauaaguauaaaaaugcaguaacugagcugcagcuucugaugcaguccacacccgccaccgggucuggaucggcuauauguucaggcguggcagucugcaagguguugcaccucgagggugaaguuaacaaaaucaagagcgcccugcugaguacgaauaaagcuguggucucccucucuaacggggugagcguauuaacuuuuaagguucuggaccuuaagaauuacauugauaaacaauugcugccuauccuaaacaagcaguccuguucaauuccaaauaucgagaccgugauagaguuccagcagaaaaacaauaggcuccuggaaauuacacgggaguuuagugucaacgccggagugacuaccccggugagcacauauaugcuuaccaauucugaacuguugucccucaucaacgacaugcccauuacgaacgaucaaaagaaacugaugucaaauaacguccagaucguucgccagcagagcuacaguaucaugugcauuauaaaggaggaaguguuagcguauguagugcaacugccucucuacggcgucaucgacacuccauguuggaaacuucauacaucuccccugugcaccacuaauacaaaggagggcuccaacauuuguuugacccgaacggaucgugggugguacugcgacaaugcaggaagcgugucguucuuuccucaggccgaaaccuguaagguucagucuaacagaguguucugcgauacaaugaacucccuaacucugccaucagaggucaaucucugcaauguggacaucuuuaaccccaaauaugauuguaagauaaugaccaguaaaacagacguaagcuccucuguuauuacuagccugggugcuaucgugucaugcuacggcaagaccaaauguacagccaguaauaagaacagggggaucauuaagaccuucuccaauggaugcgauuaugucagcaacaaaggcguggacacugucucuguggguaauacgcuuuacuguguuaacaagcaagaggggcagucacuguaugugaaaggagaaccuaucauuaacuuuuacgacccauugguauucccgagugaugaguuugacgcaagcauaucccaggucaaugaaaagaucaaccagucucucgcuuucauucggaaaucggaugagcuguuacacaaugugaacgccggcaagagcacaaccaauaucaugaucacuaccauuauaaucguuauuaucgugauucugcuaucccucaucgcggucggccugcuuuuguauugcaaggcccgcugaggacuaguggaagcauuuuccuggcugauuaaaagaaauuacucagcuauggucaucuguuccuguuagaaggcuaugcagcauauuauauacuaugcgcauguuaugaaaugcauaauaaaaaauuuuaaaaaaucuaaaagaucuaaaaaaaaaaaaaaaaaaaaaaaaaaaaaaaaaaaaaaaaaaaaaaaaaaaaaaaaaaaaaaaaugcaucccccccccccccccccccccccccccccccaaaggcucuuuucagagccaccagaauu

SEQ ID NO: 2122 - RNA, 1916 nt, Artificial Sequence
  mRNA product Design c-4 comprising derived and/or modified sequence from HRSV(A2)__F-del_DSCav1_mut1 (opt4)
gggagaguccgcucagccagguugcagaagcggcuuagcguguguccuaaucuucucucugcguguagguaggccugugccgcaaacaagcuuaccauggagcugcugauccugaaggccaacgccaucaccaccauccugaccgccgugaccuucugcuucgccagcggccagaacaucaccgaggaguucuaccagagcaccugcagcgccgugagcaagggcuaccugggcgcccugagaaccggcugguacaccagcgugaucaccaucgagcugagcaacaucaaggagaacaagugcaacggcaccgacgccaaggugaagcugaucaagcaggagcuggacaaguacaagaacgccgugaccgagcugcagcugcugaugcagagcacccccgccaccggcagcggcagcgccaucugcagcggcguggccgugugcaaggugcugcaccuggagggcgaggugaacaagaucaagagcgcccugcugagcaccaacaaggccguggugagccugagcaacggcgugagcgugcugaccuucaaggugcuggaccugaagaacuacaucgacaagcagcugcugcccauccugaacaagcagagcugcagcauccccaacaucgagaccgugaucgaguuccagcagaagaacaacagacugcuggagaucaccagagaguucagcgugaacgccggcgugaccacccccgugagcaccuacaugcugaccaacagcgagcugcugagccugaucaacgacaugcccaucaccaacgaccagaagaagcugaugagcaacaacgugcagaucgugagacagcagagcuacagcaucaugugcaucaucaaggaggaggugcuggccuacguggugcagcugccccuguacggcgugaucgacacccccugcuggaagcugcacaccagcccccugugcaccaccaacaccaaggagggcagcaacaucugccugaccagaaccgacagaggcugguacugcgacaacgccggcagcgugagcuucuucccccaggccgagaccugcaaggugcagagcaacagaguguucugcgacaccaugaacagccugacccugcccagcgaggugaaccugugcaacguggacaucuucaaccccaaguacgacugcaagaucaugaccagcaagaccgacgugagcagcagcgugaucaccagccugggcgccaucgugagcugcuacggcaagaccaagugcaccgccagcaacaagaacagaggcaucaucaagaccuucagcaacggcugcgacuacgugagcaacaagggcguggacaccgugagcgugggcaacacccuguacugcgugaacaagcaggagggccagagccuguacgugaagggcgagcccaucaucaacuucuacgacccccugguguuccccagcgacgaguucgacgccagcaucagccaggugaacgagaagaucaaccagagccuggccuucaucagaaagagcgacgagcugcugcacaacgugaacgccggcaagagcaccaccaacaucaugaucaccaccaucaucaucgugaucaucgugauccugcugagccugaucgccgugggccugcugcuguacugcaaggccagaugaggacuaguggaagcauuuuccuggcugauuaaaagaaauuacucagcuauggucaucuguuccuguuagaaggcuaugcagcauauuauauacuaugcgcauguuaugaaaugcauaauaaaaaauuuuaaaaaaucuaaaagaucuaaaaaaaaaaaaaaaaaaaaaaaaaaaaaaaaaaaaaaaaaaaaaaaaaaaaaaaaaaaaaaaaugcaucccccccccccccccccccccccccccccccaaaggcucuuuucagagccaccagaauu

SEQ ID NO: 2123 - RNA, 1916 nt, Artificial Sequence
  mRNA product Design c-4 comprising derived and/or modified sequence from HRSV(A2)__F-del_DSCav1_mut1 (opt5)
gggagaguccgcucagccagguugcagaagcggcuuagcguguguccuaaucuucucucugcguguagguaggccugugccgcaaacaagcuuaccauggagcugcucauccugaaggccaacgcuauuaccacaauccuuacggccgugaccuucugcuuugcgagcggccagaauauuacagaagaguucuaccaauccaccuguucugcugucagcaaaggguaucugggagcccucagaacaggcugguacaccuccguuaucacaauugaacugucuaacaucaaggagaauaaaugcaacgggaccgacgccaaggugaaacuuaucaagcaggaacuggauaaguauaaaaaugcugugacggagcuccagcugcugaugcagagcacccccgccacaggauccggcucugcuauuuguagcggggucgccgugugcaagguucuccaccuggagggagaagugaacaaaaucaaguccgcgcuucugagcaccaauaaagccgucgugucucucuccaacggcguuagcgugcugacauuuaagguccuugaccugaagaauuacauugauaaacaacuccugccuauccugaacaagcagucuuguuccauuccgaauaucgagaccgugauugaguuccagcagaaaaacaaucggcuccuggaaaucacgcgcgaguuuagcgugaacgcuggcgucacaacccccguuucuacauauaugcuuaccaauuccgaacugcucagccugaucaacgacaugccuauuaccaacgaucaaaagaaacuuauguccaauaacgugcagaucgugagacagcagucuuacagcauuaugugcaucauuaaggaggaaguccuggccuaugugguucaacucccccuguacggggugaucgacacaccuuguuggaaacugcauacgagcccccucugcaccacaaauaccaaggagggauccaacaucugucugacacggaccgaucgcggcugguacugcgacaaugcugggucugucuccuucuuuccucaggccgaaacguguaaggugcagagcaacagaguuuucugcgauacaaugaacucucuuacccugccgagcgaggugaaucucugcaaugucgacauuuuuaaccccaaauaugauuguaagaucaugaccuccaaaacagacgugucuagcuccgucauuaccagccugggagcgaucgugucuugcuacggcaagacaaaauguacggccuccaauaagaaccgggggauuaucaagaccuucagcaauggaugcgauuauguuucuaacaaaggcguggacacagucuccgugggcaauacccuuuacuguguuaacaagcaagaggggcagagccuguaugugaaaggagaaccuaucauuaacuuuuacgacccccucgucuucccuuccgaugaguuugacgcuucuaucagccaggugaaugaaaagauuaaccagucccuggccuucauccgcaaaucugaugagcugcuccacaaugugaacgcuggcaagagcacaaccaauauuaugaucacgaccauuaucaucguuauuaucgucauucugcuuucccugaucgccguggggcuccugcuguauugcaaggccagaugaggacuaguggaagcauuuuccuggcugauuaaaagaaauuacucagcuauggucaucuguuccuguuagaaggcuaugcagcauauuauauacuaugcgcauguuaugaaaugcauaauaaaaaauuuuaaaaaaucuaaaagaucuaaaaaaaaaaaaaaaaaaaaaaaaaaaaaaaaaaaaaaaaaaaaaaaaaaaaaaaaaaaaaaaaugcaucccccccccccccccccccccccccccccccaaaggcucuuuucagagccaccagaauu

SEQ ID NO: 2124 - RNA, 1916 nt, Artificial Sequence
  mRNA product Design c-4 comprising derived and/or modified sequence from HRSV(A2)__F-del_DSCav1_mut1 (opt6)
gggagaguccgcucagccagguugcagaagcggcuuagcguguguccuaaucuucucucugcguguagguaggccugugccgcaaacaagcuuaccauggaacuacucaucuuaaaagcaaacgcaauaacaacuauucuaaccgcaguaacauuuuguuucgcaucaggacaaaacauaaccgaagaauuuuaccaaucaacauguuccgcaguuucaaaaggauacuuaggcgcacuaagaacaggcugguacaccuccgugauaacaauagaauuaucaaacauaaaagaaaacaaauguaauggaacugacgccaaaguaaaacuaauaaaacaagaacuagacaaauauaaaaacgcaguaacugaacuacaauuacuaaugcaauccaccccagcaacaggcucaggcucagcaauuugcuccggagucgcugucugcaaaguacuacaucuugaaggcgaagucaauaaaauaaaaucagcacuucuaucaacaaacaaagcaguagucucacuaucaaacggaguaucaguacuaacauuuaaaguauuagaucuaaaaaacuauauagauaaacaacuacuacccauacucaauaaacaauccuguucaauaccaaauauagaaaccguaauagaauuucaacaaaaaaacaaucgacuauuagaaaucacccgagaauuuucagucaaugcaggcguaacaacaccaguaucaaccuacauguuaaccaacuccgaacuacuaucccucauaaacgacaugccaauaacaaacgaucaaaaaaaacuaauguccaacaacguacaaauagucagacaacaaucuuauucaauaaugugcaucauaaaagaagaaguucuagccuacguaguucaacuuccauuauacggcguaauugauacaccaugcuggaaacuacacacauccccacuauguacaacaaacacaaaagaaggaucaaacaucugcuuaacuagaacagacagaggaugguacugcgacaacgcaggaucagucucauucuuuccacaagcagaaacaugcaagguccaaucaaacagaguauucugcgacacaaugaacuccuuaacacuaccaucugaaguaaaccuauguaauguagacauauuuaacccaaaauacgacugcaaaauaaugaccucaaaaacagacguauccucaucaguaauuacaagccucggagccauaguaucaugcuacggaaaaacaaaauguacagcaucaaacaaaaacagaggaauaauaaaaacguucuccaacggaugcgacuauguaucaaacaaaggcguagacacaguaucagucggaaauacccuuuacugcguaaacaaacaagaaggccaaagucuauacguaaaaggagagccaauaauaaacuuuuaugacccccuuguauucccaucugacgaauuugaugcaucaauaucccaagucaacgaaaaaaucaaccaaucauuagccuuuauuagaaaaagugacgaacuauuacacaacguuaaugcagggaaaucaacaacaaauauaaugauuacaaccauaauuauaguuaucauaguuauacuacucucacuaaucgcaguaggauuacuauuauacugcaaagcaagauaaggacuaguggaagcauuuuccuggcugauuaaaagaaauuacucagcuauggucaucuguuccuguuagaaggcuaugcagcauauuauauacuaugcgcauguuaugaaaugcauaauaaaaaauuuuaaaaaaucuaaaagaucuaaaaaaaaaaaaaaaaaaaaaaaaaaaaaaaaaaaaaaaaaaaaaaaaaaaaaaaaaaaaaaaaugcaucccccccccccccccccccccccccccccccaaaggcucuuuucagagccaccagaauu

SEQ ID NO: 2125 - RNA, 1916 nt, Artificial Sequence
  mRNA product Design c-4 comprising derived and/or modified sequence from HRSV(A2)__F-del_DSCav1_mut1 (opt11)
gggagaguccgcucagccagguugcagaagcggcuuagcguguguccuaaucuucucucugcguguagguaggccugugccgcaaacaagcuuaccauggaacuacucauccuaaaagccaacgcaaucacaaccauacuuacagcuguuaccuucugcuucgcauccggccaaaauaucaccgaagaguucuaccaaucaaccugcuccgccgucagcaaaggauaccucggcgcccuccgaaccggaugguacacuucugucaucacaaucgaacucuccaacaucaaagaaaacaaaugcaacgguaccgacgcgaaagucaaacucaucaaacaagaacuagacaaguacaaaaacgccgucaccgaacugcaacuccucaugcaauccacaccagcaacgggaucaggauccgccaucugcucaggcgucgccgucugcaaaguccugcaccuagaaggagaaguaaacaaaauuaaauccgcccuacucuccaccaacaaagcagucgucucacuauccaacggcgucuccguccucaccuuuaagguccucgaccucaaaaauuauauagacaaacaacuccuccccauccuaaacaaacaaucaugcuccauccccaacauagaaaccgucaucgaauuucaacagaaaaacaaccgacucuuagaaauuacccgcgaguucagcgucaacgccggagucaccacacccgucucaaccuacaugcucaccaacucagaacuccucucacuaaucaaugauaugcccaucacaaacgaccaaaagaaacucauguccaacaacguacaaaucguucgccaacaaagcuacuccaucauguguaucauuaaagaagaaguccucgccuacgucguccaacuuccgcucuacggcguaaucgacacccccugcuggaaacuucacaccucgccccucugcaccacaaacaccaaagaaggcuccaacaucugccuaacccgcaccgaccgcggcugguacugcgacaacgccggcuccgucucauuuuucccccaggcggagaccugcaaaguccaauccaaccgcgucuucugcgacaccaugaacucucuuacccucccaucagaaguaaaccucugcaacgucgacaucuuuaaccccaaauacgauugcaagauaaugaccuccaaaacagacgucucaucguccgucaucaccucccuaggagcuaucgucuccugcuacggcaagaccaaaugcaccgcuuccaacaaaaaccgcggcaucaucaaaaccuucuccaacgggugcgacuacgucucuaacaaaggcguggacacaguauccguaggaaacacacuguacugcguaaacaaacaagagggccaaucgcuuuacgucaaaggcgagccaauuaucaacuucuacgacccgcucgucuucccaucagacgaguucgacgcauccaucucccaagucaacgagaaaaucaaucagucccucgccuucauacgcaaauccgacgaacuccuacauaacguaaacgccggcaaaucuaccacaaacaucaugaucacaaccaucaucaucguaaucaucgucauccuucucucgcucaucgccguaggacugcuacuuuacugcaaggcccgcuaaggacuaguggaagcauuuuccuggcugauuaaaagaaauuacucagcuauggucaucuguuccuguuagaaggcuaugcagcauauuauauacuaugcgcauguuaugaaaugcauaauaaaaaauuuuaaaaaaucuaaaagaucuaaaaaaaaaaaaaaaaaaaaaaaaaaaaaaaaaaaaaaaaaaaaaaaaaaaaaaaaaaaaaaaaugcaucccccccccccccccccccccccccccccccaaaggcucuuuucagagccaccagaauu

SEQ ID NO: 2126 - RNA, 1834 nt, Artificial Sequence
  mRNA product Design c-5 comprising derived and/or modified sequence from HRSV(A2)__F-del_DSCav1_mut1 (opt1)
gggagagcggcucggccauuuugucccagucaguccggaggcugcggcugcagaaguaccgccugcggaguaacugcaaagaagcuuaccauggagcugcucauccugaaggccaacgccaucaccaccauccugacggcggugaccuucugcuucgccagcggccagaacaucaccgaggaguucuaccaguccacgugcagcgccgucuccaagggguaccucggcgcccugcggaccggcugguacaccuccgugaucaccaucgagcugagcaacaucaaggagaacaagugcaacgggaccgacgccaaggugaagcucaucaagcaggagcuggacaaguacaagaacgcggucacggagcugcagcuccugaugcaguccaccccggcaaccggcuccggcuccgccaucugcagcggcgucgccgugugcaaggugcugcaccucgagggggaggucaacaagaucaagagcgcccugcuguccaccaacaaggccguggugagccucuccaacggcgucagcgugcugaccuucaaggugcuggaccucaagaacuacaucgacaagcagcugcugcccauccugaacaagcagagcugcuccauccccaacaucgagacggugaucgaguuccagcagaagaacaaccggcuccuggagaucacccgcgaguucagcgugaacgccggggucaccacccccguguccacguacaugcugaccaacagcgagcuccugucccugaucaacgacaugccgaucaccaacgaccagaagaagcucaugagcaacaacgugcagaucguccggcagcaguccuacagcaucaugugcaucaucaaggaggaggugcuggcguacgugguccagcugccccucuacggcgugaucgacacccccugcuggaagcugcacacgagcccccugugcaccaccaacaccaaggagggguccaacaucugccucacgcgcaccgaccggggcugguacugcgacaacgccggcagcgucuccuucuucccgcaggccgagaccugcaaggugcagagcaaccgcguguucugcgacaccaugaacucccugacgcugcccagcgagguaaaccucugcaacgucgacaucuucaaccccaaguacgacugcaagaucaugaccuccaagaccgacgugagcuccagcgugaucaccucccugggggccaucgucagcugcuacggcaagacgaagugcaccgccagcaacaagaaccgggggaucaucaagaccuucuccaacggcugcgacuacgugagcaacaagggcguggacaccguguccgucgggaacacccuguacugcgugaacaagcaggagggccagagccucuacgugaagggggagcccaucaucaacuucuacgacccgcuggucuuccccuccgacgaguucgacgcgagcaucucccaggugaacgagaagaucaaccagagccuggccuucauccgcaaguccgacgagcugcuccacaacgugaacgccggcaagagcacgaccaacaucaugaucaccaccaucaucaucgucaucaucgugauccugcugucccucaucgccguggggcugcugcucuacugcaaggcccggugaggacuagucccuguucccagagcccacuuuuuuuucuuuuuuugaaauaaaauagccugucuuucagaucuaaaaaaaaaaaaaaaaaaaaaaaaaaaaaaaaaaaaaaaaaaaaaaaaaaaaaaaaaaaaaaaaugcaucccccccccccccccccccccccccccccccaaaggcucuuuucagagccaccagaauu

SEQ ID NO: 2127 - RNA, 1834 nt, Artificial Sequence
  mRNA product Design c-5 comprising derived and/or modified sequence from HRSV(A2)__F-del_DSCav1_mut1 (opt1)
gggagagcggcucggccauuuugucccagucaguccggaggcugcggcugcagaaguaccgccugcggaguaacugcaaagaagcuuaccauggagcugcucauccugaaggccaacgccaucaccaccauccugacggcggugaccuucugcuucgccagcggccagaacaucaccgaggaguucuaccaguccacgugcagcgccgucuccaagggguaccucggcgcccugcgcaccgggugguacaccagcgugaucaccaucgagcuguccaacaucaaggagaacaagugcaacggcaccgacgccaaggugaagcucaucaagcaggagcuggacaaguacaagaacgcggucacggagcugcagcuccugaugcagagcacccccgccaccggguccggcagcgccaucugcuccggcguggccgugugcaagguccugcaccucgagggggaggugaacaagaucaagagcgcgcugcuguccaccaacaaggccguggucagccucuccaacggcgugagcgugcugacguucaagguccuggaccucaagaacuacaucgacaagcagcugcugccgauccucaacaagcaguccugcagcauccccaacaucgagaccgugaucgaguuccagcagaagaacaaccggcugcuggagaucacccgcgaguucuccgugaacgccggggucaccacgcccgugagcaccuacaugcucaccaacuccgagcugcugagccucaucaacgacaugcccaucaccaacgaccagaagaagcugaugagcaacaacgugcagaucguccggcagcaguccuacagcaucaugugcaucaucaaggaggaggugcuggccuacgugguccagcucccgcuguacggcgugaucgacacgcccugcuggaagcugcacaccagcccccucugcaccaccaacacgaaggagggguccaacaucugccugacccgcaccgaccggggcugguacugcgacaacgccggcuccgugagcuucuucccccaggcggagaccugcaagguccaguccaaccgcguguucugcgacacgaugaacagccugacccucccguccgaggucaaccugugcaacguggacaucuucaaccccaaguacgacugcaagaucaugaccagcaagaccgacguguccagcuccgucaucacgagccugggggccaucguguccugcuacggcaagaccaagugcaccgccagcaacaagaaccgggggaucaucaagaccuucuccaacggcugcgacuacgugagcaacaagggcgucgacacgguguccguggggaacacccucuacugcgucaacaagcaggagggccagagccuguacgugaagggggagcccaucaucaacuucuacgacccccugguguucccgagcgacgaguucgacgccuccaucagccaggucaacgagaagaucaaccagucccucgccuucauccgcaagagcgacgagcugcugcacaacgugaacgcgggcaaguccaccaccaacaucaugaucaccacgaucaucaucgugaucaucgucauccuccugagccugaucgccguggggcuccugcuguacugcaaggcccggugaggacuagucccuguucccagagcccacuuuuuuuucuuuuuuugaaauaaaauagccugucuuucagaucuaaaaaaaaaaaaaaaaaaaaaaaaaaaaaaaaaaaaaaaaaaaaaaaaaaaaaaaaaaaaaaaaugcaucccccccccccccccccccccccccccccccaaaggcucuuuucagagccaccagaauu

SEQ ID NO: 2128 - RNA, 1834 nt, Artificial Sequence
  mRNA product Design c-5 comprising derived and/or modified sequence from HRSV(A2)__F-del_DSCav1_mut1 (opt2)
gggagagcggcucggccauuuugucccagucaguccggaggcugcggcugcagaaguaccgccugcggaguaacugcaaagaagcuuaccauggagcuccucauccucaaggccaacgccaucaccaccauccucaccgccgucaccuucugcuucgccuccggccagaacaucaccgaggaguucuaccaguccaccugcuccgccgucuccaagggcuaccucggcgcccuccgcaccggcugguacaccuccgucaucaccaucgagcucuccaacaucaaggagaacaagugcaacggcaccgacgccaaggucaagcucaucaagcaggagcucgacaaguacaagaacgccgucaccgagcuccagcuccucaugcaguccacccccgccaccggcuccggcuccgccaucugcuccggcgucgccgucugcaagguccuccaccucgagggcgaggucaacaagaucaaguccgcccuccucuccaccaacaaggccgucgucucccucuccaacggcgucuccguccucaccuucaagguccucgaccucaagaacuacaucgacaagcagcuccuccccauccucaacaagcaguccugcuccauccccaacaucgagaccgucaucgaguuccagcagaagaacaaccgccuccucgagaucacccgcgaguucuccgucaacgccggcgucaccacccccgucuccaccuacaugcucaccaacuccgagcuccucucccucaucaacgacaugcccaucaccaacgaccagaagaagcucauguccaacaacguccagaucguccgccagcaguccuacuccaucaugugcaucaucaaggaggagguccucgccuacgucguccagcucccccucuacggcgucaucgacacccccugcuggaagcuccacaccuccccccucugcaccaccaacaccaaggagggcuccaacaucugccucacccgcaccgaccgcggcugguacugcgacaacgccggcuccgucuccuucuucccccaggccgagaccugcaagguccaguccaaccgcgucuucugcgacaccaugaacucccucacccuccccuccgaggucaaccucugcaacgucgacaucuucaaccccaaguacgacugcaagaucaugaccuccaagaccgacgucuccuccuccgucaucaccucccucggcgccaucgucuccugcuacggcaagaccaagugcaccgccuccaacaagaaccgcggcaucaucaagaccuucuccaacggcugcgacuacgucuccaacaagggcgucgacaccgucuccgucggcaacacccucuacugcgucaacaagcaggagggccagucccucuacgucaagggcgagcccaucaucaacuucuacgacccccucgucuuccccuccgacgaguucgacgccuccaucucccaggucaacgagaagaucaaccagucccucgccuucauccgcaaguccgacgagcuccuccacaacgucaacgccggcaaguccaccaccaacaucaugaucaccaccaucaucaucgucaucaucgucauccuccucucccucaucgccgucggccuccuccucuacugcaaggcccgcugaggacuagucccuguucccagagcccacuuuuuuuucuuuuuuugaaauaaaauagccugucuuucagaucuaaaaaaaaaaaaaaaaaaaaaaaaaaaaaaaaaaaaaaaaaaaaaaaaaaaaaaaaaaaaaaaaugcaucccccccccccccccccccccccccccccccaaaggcucuuuucagagccaccagaauu

SEQ ID NO: 2129 - RNA, 1834 nt, Artificial Sequence
  mRNA product Design c-5 comprising derived and/or modified sequence from HRSV(A2)__F-del_DSCav1_mut1 (opt3)
gggagagcggcucggccauuuugucccagucaguccggaggcugcggcugcagaaguaccgccugcggaguaacugcaaagaagcuuaccauggagcugcucauccuuaaggccaacgcuauuaccacaauacugacugcagugacguucugcuuugccagcggccagaauaucaccgaagaguucuaccaauccacauguucugcggucucaaaaggguauuugggagcuuuaagaacugguugguacaccaguguuauuacaaucgaacugagcaacauuaaggagaauaaaugcaacggcaccgacgccaaggugaaacuaaucaagcaggaacucgauaaguauaaaaaugcaguaacugagcugcagcuucugaugcaguccacacccgccaccgggucuggaucggcuauauguucaggcguggcagucugcaagguguugcaccucgagggugaaguuaacaaaaucaagagcgcccugcugaguacgaauaaagcuguggucucccucucuaacggggugagcguauuaacuuuuaagguucuggaccuuaagaauuacauugauaaacaauugcugccuauccuaaacaagcaguccuguucaauuccaaauaucgagaccgugauagaguuccagcagaaaaacaauaggcuccuggaaauuacacgggaguuuagugucaacgccggagugacuaccccggugagcacauauaugcuuaccaauucugaacuguugucccucaucaacgacaugcccauuacgaacgaucaaaagaaacugaugucaaauaacguccagaucguucgccagcagagcuacaguaucaugugcauuauaaaggaggaaguguuagcguauguagugcaacugccucucuacggcgucaucgacacuccauguuggaaacuucauacaucuccccugugcaccacuaauacaaaggagggcuccaacauuuguuugacccgaacggaucgugggugguacugcgacaaugcaggaagcgugucguucuuuccucaggccgaaaccuguaagguucagucuaacagaguguucugcgauacaaugaacucccuaacucugccaucagaggucaaucucugcaauguggacaucuuuaaccccaaauaugauuguaagauaaugaccaguaaaacagacguaagcuccucuguuauuacuagccugggugcuaucgugucaugcuacggcaagaccaaauguacagccaguaauaagaacagggggaucauuaagaccuucuccaauggaugcgauuaugucagcaacaaaggcguggacacugucucuguggguaauacgcuuuacuguguuaacaagcaagaggggcagucacuguaugugaaaggagaaccuaucauuaacuuuuacgacccauugguauucccgagugaugaguuugacgcaagcauaucccaggucaaugaaaagaucaaccagucucucgcuuucauucggaaaucggaugagcuguuacacaaugugaacgccggcaagagcacaaccaauaucaugaucacuaccauuauaaucguuauuaucgugauucugcuaucccucaucgcggucggccugcuuuuguauugcaaggcccgcugaggacuagucccuguucccagagcccacuuuuuuuucuuuuuuugaaauaaaauagccugucuuucagaucuaaaaaaaaaaaaaaaaaaaaaaaaaaaaaaaaaaaaaaaaaaaaaaaaaaaaaaaaaaaaaaaaugcaucccccccccccccccccccccccccccccccaaaggcucuuuucagagccaccagaauu

SEQ ID NO: 2130 - RNA, 1834 nt, Artificial Sequence
  mRNA product Design c-5 comprising derived and/or modified sequence from HRSV(A2)__F-del_DSCav1_mut1 (opt4)
gggagagcggcucggccauuuugucccagucaguccggaggcugcggcugcagaaguaccgccugcggaguaacugcaaagaagcuuaccauggagcugcugauccugaaggccaacgccaucaccaccauccugaccgccgugaccuucugcuucgccagcggccagaacaucaccgaggaguucuaccagagcaccugcagcgccgugagcaagggcuaccugggcgcccugagaaccggcugguacaccagcgugaucaccaucgagcugagcaacaucaaggagaacaagugcaacggcaccgacgccaaggugaagcugaucaagcaggagcuggacaaguacaagaacgccgugaccgagcugcagcugcugaugcagagcacccccgccaccggcagcggcagcgccaucugcagcggcguggccgugugcaaggugcugcaccuggagggcgaggugaacaagaucaagagcgcccugcugagcaccaacaaggccguggugagccugagcaacggcgugagcgugcugaccuucaaggugcuggaccugaagaacuacaucgacaagcagcugcugcccauccugaacaagcagagcugcagcauccccaacaucgagaccgugaucgaguuccagcagaagaacaacagacugcuggagaucaccagagaguucagcgugaacgccggcgugaccacccccgugagcaccuacaugcugaccaacagcgagcugcugagccugaucaacgacaugcccaucaccaacgaccagaagaagcugaugagcaacaacgugcagaucgugagacagcagagcuacagcaucaugugcaucaucaaggaggaggugcuggccuacguggugcagcugccccuguacggcgugaucgacacccccugcuggaagcugcacaccagcccccugugcaccaccaacaccaaggagggcagcaacaucugccugaccagaaccgacagaggcugguacugcgacaacgccggcagcgugagcuucuucccccaggccgagaccugcaaggugcagagcaacagaguguucugcgacaccaugaacagccugacccugcccagcgaggugaaccugugcaacguggacaucuucaaccccaaguacgacugcaagaucaugaccagcaagaccgacgugagcagcagcgugaucaccagccugggcgccaucgugagcugcuacggcaagaccaagugcaccgccagcaacaagaacagaggcaucaucaagaccuucagcaacggcugcgacuacgugagcaacaagggcguggacaccgugagcgugggcaacacccuguacugcgugaacaagcaggagggccagagccuguacgugaagggcgagcccaucaucaacuucuacgacccccugguguuccccagcgacgaguucgacgccagcaucagccaggugaacgagaagaucaaccagagccuggccuucaucagaaagagcgacgagcugcugcacaacgugaacgccggcaagagcaccaccaacaucaugaucaccaccaucaucaucgugaucaucgugauccugcugagccugaucgccgugggccugcugcuguacugcaaggccagaugaggacuagucccuguucccagagcccacuuuuuuuucuuuuuuugaaauaaaauagccugucuuucagaucuaaaaaaaaaaaaaaaaaaaaaaaaaaaaaaaaaaaaaaaaaaaaaaaaaaaaaaaaaaaaaaaaugcaucccccccccccccccccccccccccccccccaaaggcucuuuucagagccaccagaauu

SEQ ID NO: 2131 - RNA, 1834 nt, Artificial Sequence
  mRNA product Design c-5 comprising derived and/or modified sequence from HRSV(A2)__F-del_DSCav1_mut1 (opt5)
gggagagcggcucggccauuuugucccagucaguccggaggcugcggcugcagaaguaccgccugcggaguaacugcaaagaagcuuaccauggagcugcucauccugaaggccaacgcuauuaccacaauccuuacggccgugaccuucugcuuugcgagcggccagaauauuacagaagaguucuaccaauccaccuguucugcugucagcaaaggguaucugggagcccucagaacaggcugguacaccuccguuaucacaauugaacugucuaacaucaaggagaauaaaugcaacgggaccgacgccaaggugaaacuuaucaagcaggaacuggauaaguauaaaaaugcugugacggagcuccagcugcugaugcagagcacccccgccacaggauccggcucugcuauuuguagcggggucgccgugugcaagguucuccaccuggagggagaagugaacaaaaucaaguccgcgcuucugagcaccaauaaagccgucgugucucucuccaacggcguuagcgugcugacauuuaagguccuugaccugaagaauuacauugauaaacaacuccugccuauccugaacaagcagucuuguuccauuccgaauaucgagaccgugauugaguuccagcagaaaaacaaucggcuccuggaaaucacgcgcgaguuuagcgugaacgcuggcgucacaacccccguuucuacauauaugcuuaccaauuccgaacugcucagccugaucaacgacaugccuauuaccaacgaucaaaagaaacuuauguccaauaacgugcagaucgugagacagcagucuuacagcauuaugugcaucauuaaggaggaaguccuggccuaugugguucaacucccccuguacggggugaucgacacaccuuguuggaaacugcauacgagcccccucugcaccacaaauaccaaggagggauccaacaucugucugacacggaccgaucgcggcugguacugcgacaaugcugggucugucuccuucuuuccucaggccgaaacguguaaggugcagagcaacagaguuuucugcgauacaaugaacucucuuacccugccgagcgaggugaaucucugcaaugucgacauuuuuaaccccaaauaugauuguaagaucaugaccuccaaaacagacgugucuagcuccgucauuaccagccugggagcgaucgugucuugcuacggcaagacaaaauguacggccuccaauaagaaccgggggauuaucaagaccuucagcaauggaugcgauuauguuucuaacaaaggcguggacacagucuccgugggcaauacccuuuacuguguuaacaagcaagaggggcagagccuguaugugaaaggagaaccuaucauuaacuuuuacgacccccucgucuucccuuccgaugaguuugacgcuucuaucagccaggugaaugaaaagauuaaccagucccuggccuucauccgcaaaucugaugagcugcuccacaaugugaacgcuggcaagagcacaaccaauauuaugaucacgaccauuaucaucguuauuaucgucauucugcuuucccugaucgccguggggcuccugcuguauugcaaggccagaugaggacuagucccuguucccagagcccacuuuuuuuucuuuuuuugaaauaaaauagccugucuuucagaucuaaaaaaaaaaaaaaaaaaaaaaaaaaaaaaaaaaaaaaaaaaaaaaaaaaaaaaaaaaaaaaaaugcaucccccccccccccccccccccccccccccccaaaggcucuuuucagagccaccagaauu

SEQ ID NO: 2132 - RNA, 1834 nt, Artificial Sequence
  mRNA product Design c-5 comprising derived and/or modified sequence from HRSV(A2)__F-del_DSCav1_mut1 (opt6)
gggagagcggcucggccauuuugucccagucaguccggaggcugcggcugcagaaguaccgccugcggaguaacugcaaagaagcuuaccauggaacuacucaucuuaaaagcaaacgcaauaacaacuauucuaaccgcaguaacauuuuguuucgcaucaggacaaaacauaaccgaagaauuuuaccaaucaacauguuccgcaguuucaaaaggauacuuaggcgcacuaagaacaggcugguacaccuccgugauaacaauagaauuaucaaacauaaaagaaaacaaauguaauggaacugacgccaaaguaaaacuaauaaaacaagaacuagacaaauauaaaaacgcaguaacugaacuacaauuacuaaugcaauccaccccagcaacaggcucaggcucagcaauuugcuccggagucgcugucugcaaaguacuacaucuugaaggcgaagucaauaaaauaaaaucagcacuucuaucaacaaacaaagcaguagucucacuaucaaacggaguaucaguacuaacauuuaaaguauuagaucuaaaaaacuauauagauaaacaacuacuacccauacucaauaaacaauccuguucaauaccaaauauagaaaccguaauagaauuucaacaaaaaaacaaucgacuauuagaaaucacccgagaauuuucagucaaugcaggcguaacaacaccaguaucaaccuacauguuaaccaacuccgaacuacuaucccucauaaacgacaugccaauaacaaacgaucaaaaaaaacuaauguccaacaacguacaaauagucagacaacaaucuuauucaauaaugugcaucauaaaagaagaaguucuagccuacguaguucaacuuccauuauacggcguaauugauacaccaugcuggaaacuacacacauccccacuauguacaacaaacacaaaagaaggaucaaacaucugcuuaacuagaacagacagaggaugguacugcgacaacgcaggaucagucucauucuuuccacaagcagaaacaugcaagguccaaucaaacagaguauucugcgacacaaugaacuccuuaacacuaccaucugaaguaaaccuauguaauguagacauauuuaacccaaaauacgacugcaaaauaaugaccucaaaaacagacguauccucaucaguaauuacaagccucggagccauaguaucaugcuacggaaaaacaaaauguacagcaucaaacaaaaacagaggaauaauaaaaacguucuccaacggaugcgacuauguaucaaacaaaggcguagacacaguaucagucggaaauacccuuuacugcguaaacaaacaagaaggccaaagucuauacguaaaaggagagccaauaauaaacuuuuaugacccccuuguauucccaucugacgaauuugaugcaucaauaucccaagucaacgaaaaaaucaaccaaucauuagccuuuauuagaaaaagugacgaacuauuacacaacguuaaugcagggaaaucaacaacaaauauaaugauuacaaccauaauuauaguuaucauaguuauacuacucucacuaaucgcaguaggauuacuauuauacugcaaagcaagauaaggacuagucccuguucccagagcccacuuuuuuuucuuuuuuugaaauaaaauagccugucuuucagaucuaaaaaaaaaaaaaaaaaaaaaaaaaaaaaaaaaaaaaaaaaaaaaaaaaaaaaaaaaaaaaaaaugcaucccccccccccccccccccccccccccccccaaaggcucuuuucagagccaccagaauu

SEQ ID NO: 2133 - RNA, 1834 nt, Artificial Sequence
  mRNA product Design c-5 comprising derived and/or modified sequence from HRSV(A2)__F-del_DSCav1_mut1 (opt11)
gggagagcggcucggccauuuugucccagucaguccggaggcugcggcugcagaaguaccgccugcggaguaacugcaaagaagcuuaccauggaacuacucauccuaaaagccaacgcaaucacaaccauacuuacagcuguuaccuucugcuucgcauccggccaaaauaucaccgaagaguucuaccaaucaaccugcuccgccgucagcaaaggauaccucggcgcccuccgaaccggaugguacacuucugucaucacaaucgaacucuccaacaucaaagaaaacaaaugcaacgguaccgacgcgaaagucaaacucaucaaacaagaacuagacaaguacaaaaacgccgucaccgaacugcaacuccucaugcaauccacaccagcaacgggaucaggauccgccaucugcucaggcgucgccgucugcaaaguccugcaccuagaaggagaaguaaacaaaauuaaauccgcccuacucuccaccaacaaagcagucgucucacuauccaacggcgucuccguccucaccuuuaagguccucgaccucaaaaauuauauagacaaacaacuccuccccauccuaaacaaacaaucaugcuccauccccaacauagaaaccgucaucgaauuucaacagaaaaacaaccgacucuuagaaauuacccgcgaguucagcgucaacgccggagucaccacacccgucucaaccuacaugcucaccaacucagaacuccucucacuaaucaaugauaugcccaucacaaacgaccaaaagaaacucauguccaacaacguacaaaucguucgccaacaaagcuacuccaucauguguaucauuaaagaagaaguccucgccuacgucguccaacuuccgcucuacggcguaaucgacacccccugcuggaaacuucacaccucgccccucugcaccacaaacaccaaagaaggcuccaacaucugccuaacccgcaccgaccgcggcugguacugcgacaacgccggcuccgucucauuuuucccccaggcggagaccugcaaaguccaauccaaccgcgucuucugcgacaccaugaacucucuuacccucccaucagaaguaaaccucugcaacgucgacaucuuuaaccccaaauacgauugcaagauaaugaccuccaaaacagacgucucaucguccgucaucaccucccuaggagcuaucgucuccugcuacggcaagaccaaaugcaccgcuuccaacaaaaaccgcggcaucaucaaaaccuucuccaacgggugcgacuacgucucuaacaaaggcguggacacaguauccguaggaaacacacuguacugcguaaacaaacaagagggccaaucgcuuuacgucaaaggcgagccaauuaucaacuucuacgacccgcucgucuucccaucagacgaguucgacgcauccaucucccaagucaacgagaaaaucaaucagucccucgccuucauacgcaaauccgacgaacuccuacauaacguaaacgccggcaaaucuaccacaaacaucaugaucacaaccaucaucaucguaaucaucgucauccuucucucgcucaucgccguaggacugcuacuuuacugcaaggcccgcuaaggacuagucccuguucccagagcccacuuuuuuuucuuuuuuugaaauaaaauagccugucuuucagaucuaaaaaaaaaaaaaaaaaaaaaaaaaaaaaaaaaaaaaaaaaaaaaaaaaaaaaaaaaaaaaaaaugcaucccccccccccccccccccccccccccccccaaaggcucuuuucagagccaccagaauu

SEQ ID NO: 2134 - RNA, 1843 nt, Artificial Sequence
  mRNA product Design d-1 comprising derived and/or modified sequence from HRSV(A2)__F-del_DSCav1_mut1 (opt1)
gggagacccgugacccggaaguuguacggcuacgcgacuuucccucccacaaacccucgcgcccuuccuuuccuacuugggcccggcagaaagcuuaccauggagcugcucauccugaaggccaacgccaucaccaccauccugacggcggugaccuucugcuucgccagcggccagaacaucaccgaggaguucuaccaguccacgugcagcgccgucuccaagggguaccucggcgcccugcggaccggcugguacaccuccgugaucaccaucgagcugagcaacaucaaggagaacaagugcaacgggaccgacgccaaggugaagcucaucaagcaggagcuggacaaguacaagaacgcggucacggagcugcagcuccugaugcaguccaccccggcaaccggcuccggcuccgccaucugcagcggcgucgccgugugcaaggugcugcaccucgagggggaggucaacaagaucaagagcgcccugcuguccaccaacaaggccguggugagccucuccaacggcgucagcgugcugaccuucaaggugcuggaccucaagaacuacaucgacaagcagcugcugcccauccugaacaagcagagcugcuccauccccaacaucgagacggugaucgaguuccagcagaagaacaaccggcuccuggagaucacccgcgaguucagcgugaacgccggggucaccacccccguguccacguacaugcugaccaacagcgagcuccugucccugaucaacgacaugccgaucaccaacgaccagaagaagcucaugagcaacaacgugcagaucguccggcagcaguccuacagcaucaugugcaucaucaaggaggaggugcuggcguacgugguccagcugccccucuacggcgugaucgacacccccugcuggaagcugcacacgagcccccugugcaccaccaacaccaaggagggguccaacaucugccucacgcgcaccgaccggggcugguacugcgacaacgccggcagcgucuccuucuucccgcaggccgagaccugcaaggugcagagcaaccgcguguucugcgacaccaugaacucccugacgcugcccagcgagguaaaccucugcaacgucgacaucuucaaccccaaguacgacugcaagaucaugaccuccaagaccgacgugagcuccagcgugaucaccucccugggggccaucgucagcugcuacggcaagacgaagugcaccgccagcaacaagaaccgggggaucaucaagaccuucuccaacggcugcgacuacgugagcaacaagggcguggacaccguguccgucgggaacacccuguacugcgugaacaagcaggagggccagagccucuacgugaagggggagcccaucaucaacuucuacgacccgcuggucuuccccuccgacgaguucgacgcgagcaucucccaggugaacgagaagaucaaccagagccuggccuucauccgcaaguccgacgagcugcuccacaacgugaacgccggcaagagcacgaccaacaucaugaucaccaccaucaucaucgucaucaucgugauccugcugucccucaucgccguggggcugcugcucuacugcaaggcccggugaggacuagucccuguucccagagcccacuuuuuuuucuuuuuuugaaauaaaauagccugucuuucagaucuaaaaaaaaaaaaaaaaaaaaaaaaaaaaaaaaaaaaaaaaaaaaaaaaaaaaaaaaaaaaaaaaugcaucccccccccccccccccccccccccccccccaaaggcucuuuucagagccaccagaauu

SEQ ID NO: 2135 - RNA, 1843 nt, Artificial Sequence
  mRNA product Design d-1 comprising derived and/or modified sequence from HRSV(A2)__F-del_DSCav1_mut1 (opt1)
gggagacccgugacccggaaguuguacggcuacgcgacuuucccucccacaaacccucgcgcccuuccuuuccuacuugggcccggcagaaagcuuaccauggagcugcucauccugaaggccaacgccaucaccaccauccugacggcggugaccuucugcuucgccagcggccagaacaucaccgaggaguucuaccaguccacgugcagcgccgucuccaagggguaccucggcgcccugcgcaccgggugguacaccagcgugaucaccaucgagcuguccaacaucaaggagaacaagugcaacggcaccgacgccaaggugaagcucaucaagcaggagcuggacaaguacaagaacgcggucacggagcugcagcuccugaugcagagcacccccgccaccggguccggcagcgccaucugcuccggcguggccgugugcaagguccugcaccucgagggggaggugaacaagaucaagagcgcgcugcuguccaccaacaaggccguggucagccucuccaacggcgugagcgugcugacguucaagguccuggaccucaagaacuacaucgacaagcagcugcugccgauccucaacaagcaguccugcagcauccccaacaucgagaccgugaucgaguuccagcagaagaacaaccggcugcuggagaucacccgcgaguucuccgugaacgccggggucaccacgcccgugagcaccuacaugcucaccaacuccgagcugcugagccucaucaacgacaugcccaucaccaacgaccagaagaagcugaugagcaacaacgugcagaucguccggcagcaguccuacagcaucaugugcaucaucaaggaggaggugcuggccuacgugguccagcucccgcuguacggcgugaucgacacgcccugcuggaagcugcacaccagcccccucugcaccaccaacacgaaggagggguccaacaucugccugacccgcaccgaccggggcugguacugcgacaacgccggcuccgugagcuucuucccccaggcggagaccugcaagguccaguccaaccgcguguucugcgacacgaugaacagccugacccucccguccgaggucaaccugugcaacguggacaucuucaaccccaaguacgacugcaagaucaugaccagcaagaccgacguguccagcuccgucaucacgagccugggggccaucguguccugcuacggcaagaccaagugcaccgccagcaacaagaaccgggggaucaucaagaccuucuccaacggcugcgacuacgugagcaacaagggcgucgacacgguguccguggggaacacccucuacugcgucaacaagcaggagggccagagccuguacgugaagggggagcccaucaucaacuucuacgacccccugguguucccgagcgacgaguucgacgccuccaucagccaggucaacgagaagaucaaccagucccucgccuucauccgcaagagcgacgagcugcugcacaacgugaacgcgggcaaguccaccaccaacaucaugaucaccacgaucaucaucgugaucaucgucauccuccugagccugaucgccguggggcuccugcuguacugcaaggcccggugaggacuagucccuguucccagagcccacuuuuuuuucuuuuuuugaaauaaaauagccugucuuucagaucuaaaaaaaaaaaaaaaaaaaaaaaaaaaaaaaaaaaaaaaaaaaaaaaaaaaaaaaaaaaaaaaaugcaucccccccccccccccccccccccccccccccaaaggcucuuuucagagccaccagaauu

SEQ ID NO: 2136 - RNA, 1843 nt, Artificial Sequence
  mRNA product Design d-1 comprising derived and/or modified sequence from HRSV(A2)__F-del_DSCav1_mut1 (opt2)
gggagacccgugacccggaaguuguacggcuacgcgacuuucccucccacaaacccucgcgcccuuccuuuccuacuugggcccggcagaaagcuuaccauggagcuccucauccucaaggccaacgccaucaccaccauccucaccgccgucaccuucugcuucgccuccggccagaacaucaccgaggaguucuaccaguccaccugcuccgccgucuccaagggcuaccucggcgcccuccgcaccggcugguacaccuccgucaucaccaucgagcucuccaacaucaaggagaacaagugcaacggcaccgacgccaaggucaagcucaucaagcaggagcucgacaaguacaagaacgccgucaccgagcuccagcuccucaugcaguccacccccgccaccggcuccggcuccgccaucugcuccggcgucgccgucugcaagguccuccaccucgagggcgaggucaacaagaucaaguccgcccuccucuccaccaacaaggccgucgucucccucuccaacggcgucuccguccucaccuucaagguccucgaccucaagaacuacaucgacaagcagcuccuccccauccucaacaagcaguccugcuccauccccaacaucgagaccgucaucgaguuccagcagaagaacaaccgccuccucgagaucacccgcgaguucuccgucaacgccggcgucaccacccccgucuccaccuacaugcucaccaacuccgagcuccucucccucaucaacgacaugcccaucaccaacgaccagaagaagcucauguccaacaacguccagaucguccgccagcaguccuacuccaucaugugcaucaucaaggaggagguccucgccuacgucguccagcucccccucuacggcgucaucgacacccccugcuggaagcuccacaccuccccccucugcaccaccaacaccaaggagggcuccaacaucugccucacccgcaccgaccgcggcugguacugcgacaacgccggcuccgucuccuucuucccccaggccgagaccugcaagguccaguccaaccgcgucuucugcgacaccaugaacucccucacccuccccuccgaggucaaccucugcaacgucgacaucuucaaccccaaguacgacugcaagaucaugaccuccaagaccgacgucuccuccuccgucaucaccucccucggcgccaucgucuccugcuacggcaagaccaagugcaccgccuccaacaagaaccgcggcaucaucaagaccuucuccaacggcugcgacuacgucuccaacaagggcgucgacaccgucuccgucggcaacacccucuacugcgucaacaagcaggagggccagucccucuacgucaagggcgagcccaucaucaacuucuacgacccccucgucuuccccuccgacgaguucgacgccuccaucucccaggucaacgagaagaucaaccagucccucgccuucauccgcaaguccgacgagcuccuccacaacgucaacgccggcaaguccaccaccaacaucaugaucaccaccaucaucaucgucaucaucgucauccuccucucccucaucgccgucggccuccuccucuacugcaaggcccgcugaggacuagucccuguucccagagcccacuuuuuuuucuuuuuuugaaauaaaauagccugucuuucagaucuaaaaaaaaaaaaaaaaaaaaaaaaaaaaaaaaaaaaaaaaaaaaaaaaaaaaaaaaaaaaaaaaugcaucccccccccccccccccccccccccccccccaaaggcucuuuucagagccaccagaauu

SEQ ID NO: 2137 - RNA, 1843 nt, Artificial Sequence
  mRNA product Design d-1 comprising derived and/or modified sequence from HRSV(A2)__F-del_DSCav1_mut1 (opt3)
gggagacccgugacccggaaguuguacggcuacgcgacuuucccucccacaaacccucgcgcccuuccuuuccuacuugggcccggcagaaagcuuaccauggagcugcucauccuuaaggccaacgcuauuaccacaauacugacugcagugacguucugcuuugccagcggccagaauaucaccgaagaguucuaccaauccacauguucugcggucucaaaaggguauuugggagcuuuaagaacugguugguacaccaguguuauuacaaucgaacugagcaacauuaaggagaauaaaugcaacggcaccgacgccaaggugaaacuaaucaagcaggaacucgauaaguauaaaaaugcaguaacugagcugcagcuucugaugcaguccacacccgccaccgggucuggaucggcuauauguucaggcguggcagucugcaagguguugcaccucgagggugaaguuaacaaaaucaagagcgcccugcugaguacgaauaaagcuguggucucccucucuaacggggugagcguauuaacuuuuaagguucuggaccuuaagaauuacauugauaaacaauugcugccuauccuaaacaagcaguccuguucaauuccaaauaucgagaccgugauagaguuccagcagaaaaacaauaggcuccuggaaauuacacgggaguuuagugucaacgccggagugacuaccccggugagcacauauaugcuuaccaauucugaacuguugucccucaucaacgacaugcccauuacgaacgaucaaaagaaacugaugucaaauaacguccagaucguucgccagcagagcuacaguaucaugugcauuauaaaggaggaaguguuagcguauguagugcaacugccucucuacggcgucaucgacacuccauguuggaaacuucauacaucuccccugugcaccacuaauacaaaggagggcuccaacauuuguuugacccgaacggaucgugggugguacugcgacaaugcaggaagcgugucguucuuuccucaggccgaaaccuguaagguucagucuaacagaguguucugcgauacaaugaacucccuaacucugccaucagaggucaaucucugcaauguggacaucuuuaaccccaaauaugauuguaagauaaugaccaguaaaacagacguaagcuccucuguuauuacuagccugggugcuaucgugucaugcuacggcaagaccaaauguacagccaguaauaagaacagggggaucauuaagaccuucuccaauggaugcgauuaugucagcaacaaaggcguggacacugucucuguggguaauacgcuuuacuguguuaacaagcaagaggggcagucacuguaugugaaaggagaaccuaucauuaacuuuuacgacccauugguauucccgagugaugaguuugacgcaagcauaucccaggucaaugaaaagaucaaccagucucucgcuuucauucggaaaucggaugagcuguuacacaaugugaacgccggcaagagcacaaccaauaucaugaucacuaccauuauaaucguuauuaucgugauucugcuaucccucaucgcggucggccugcuuuuguauugcaaggcccgcugaggacuagucccuguucccagagcccacuuuuuuuucuuuuuuugaaauaaaauagccugucuuucagaucuaaaaaaaaaaaaaaaaaaaaaaaaaaaaaaaaaaaaaaaaaaaaaaaaaaaaaaaaaaaaaaaaugcaucccccccccccccccccccccccccccccccaaaggcucuuuucagagccaccagaauu

SEQ ID NO: 2138 - RNA, 1843 nt, Artificial Sequence
  mRNA product Design d-1 comprising derived and/or modified sequence from HRSV(A2)__F-del_DSCav1_mut1 (opt4)
gggagacccgugacccggaaguuguacggcuacgcgacuuucccucccacaaacccucgcgcccuuccuuuccuacuugggcccggcagaaagcuuaccauggagcugcugauccugaaggccaacgccaucaccaccauccugaccgccgugaccuucugcuucgccagcggccagaacaucaccgaggaguucuaccagagcaccugcagcgccgugagcaagggcuaccugggcgcccugagaaccggcugguacaccagcgugaucaccaucgagcugagcaacaucaaggagaacaagugcaacggcaccgacgccaaggugaagcugaucaagcaggagcuggacaaguacaagaacgccgugaccgagcugcagcugcugaugcagagcacccccgccaccggcagcggcagcgccaucugcagcggcguggccgugugcaaggugcugcaccuggagggcgaggugaacaagaucaagagcgcccugcugagcaccaacaaggccguggugagccugagcaacggcgugagcgugcugaccuucaaggugcuggaccugaagaacuacaucgacaagcagcugcugcccauccugaacaagcagagcugcagcauccccaacaucgagaccgugaucgaguuccagcagaagaacaacagacugcuggagaucaccagagaguucagcgugaacgccggcgugaccacccccgugagcaccuacaugcugaccaacagcgagcugcugagccugaucaacgacaugcccaucaccaacgaccagaagaagcugaugagcaacaacgugcagaucgugagacagcagagcuacagcaucaugugcaucaucaaggaggaggugcuggccuacguggugcagcugccccuguacggcgugaucgacacccccugcuggaagcugcacaccagcccccugugcaccaccaacaccaaggagggcagcaacaucugccugaccagaaccgacagaggcugguacugcgacaacgccggcagcgugagcuucuucccccaggccgagaccugcaaggugcagagcaacagaguguucugcgacaccaugaacagccugacccugcccagcgaggugaaccugugcaacguggacaucuucaaccccaaguacgacugcaagaucaugaccagcaagaccgacgugagcagcagcgugaucaccagccugggcgccaucgugagcugcuacggcaagaccaagugcaccgccagcaacaagaacagaggcaucaucaagaccuucagcaacggcugcgacuacgugagcaacaagggcguggacaccgugagcgugggcaacacccuguacugcgugaacaagcaggagggccagagccuguacgugaagggcgagcccaucaucaacuucuacgacccccugguguuccccagcgacgaguucgacgccagcaucagccaggugaacgagaagaucaaccagagccuggccuucaucagaaagagcgacgagcugcugcacaacgugaacgccggcaagagcaccaccaacaucaugaucaccaccaucaucaucgugaucaucgugauccugcugagccugaucgccgugggccugcugcuguacugcaaggccagaugaggacuagucccuguucccagagcccacuuuuuuuucuuuuuuugaaauaaaauagccugucuuucagaucuaaaaaaaaaaaaaaaaaaaaaaaaaaaaaaaaaaaaaaaaaaaaaaaaaaaaaaaaaaaaaaaaugcaucccccccccccccccccccccccccccccccaaaggcucuuuucagagccaccagaauu

SEQ ID NO: 2139 - RNA, 1843 nt, Artificial Sequence
  mRNA product Design d-1 comprising derived and/or modified sequence from HRSV(A2)__F-del_DSCav1_mut1 (opt5)
gggagacccgugacccggaaguuguacggcuacgcgacuuucccucccacaaacccucgcgcccuuccuuuccuacuugggcccggcagaaagcuuaccauggagcugcucauccugaaggccaacgcuauuaccacaauccuuacggccgugaccuucugcuuugcgagcggccagaauauuacagaagaguucuaccaauccaccuguucugcugucagcaaaggguaucugggagcccucagaacaggcugguacaccuccguuaucacaauugaacugucuaacaucaaggagaauaaaugcaacgggaccgacgccaaggugaaacuuaucaagcaggaacuggauaaguauaaaaaugcugugacggagcuccagcugcugaugcagagcacccccgccacaggauccggcucugcuauuuguagcggggucgccgugugcaagguucuccaccuggagggagaagugaacaaaaucaaguccgcgcuucugagcaccaauaaagccgucgugucucucuccaacggcguuagcgugcugacauuuaagguccuugaccugaagaauuacauugauaaacaacuccugccuauccugaacaagcagucuuguuccauuccgaauaucgagaccgugauugaguuccagcagaaaaacaaucggcuccuggaaaucacgcgcgaguuuagcgugaacgcuggcgucacaacccccguuucuacauauaugcuuaccaauuccgaacugcucagccugaucaacgacaugccuauuaccaacgaucaaaagaaacuuauguccaauaacgugcagaucgugagacagcagucuuacagcauuaugugcaucauuaaggaggaaguccuggccuaugugguucaacucccccuguacggggugaucgacacaccuuguuggaaacugcauacgagcccccucugcaccacaaauaccaaggagggauccaacaucugucugacacggaccgaucgcggcugguacugcgacaaugcugggucugucuccuucuuuccucaggccgaaacguguaaggugcagagcaacagaguuuucugcgauacaaugaacucucuuacccugccgagcgaggugaaucucugcaaugucgacauuuuuaaccccaaauaugauuguaagaucaugaccuccaaaacagacgugucuagcuccgucauuaccagccugggagcgaucgugucuugcuacggcaagacaaaauguacggccuccaauaagaaccgggggauuaucaagaccuucagcaauggaugcgauuauguuucuaacaaaggcguggacacagucuccgugggcaauacccuuuacuguguuaacaagcaagaggggcagagccuguaugugaaaggagaaccuaucauuaacuuuuacgacccccucgucuucccuuccgaugaguuugacgcuucuaucagccaggugaaugaaaagauuaaccagucccuggccuucauccgcaaaucugaugagcugcuccacaaugugaacgcuggcaagagcacaaccaauauuaugaucacgaccauuaucaucguuauuaucgucauucugcuuucccugaucgccguggggcuccugcuguauugcaaggccagaugaggacuagucccuguucccagagcccacuuuuuuuucuuuuuuugaaauaaaauagccugucuuucagaucuaaaaaaaaaaaaaaaaaaaaaaaaaaaaaaaaaaaaaaaaaaaaaaaaaaaaaaaaaaaaaaaaugcaucccccccccccccccccccccccccccccccaaaggcucuuuucagagccaccagaauu

SEQ ID NO: 2140 - RNA, 1843 nt, Artificial Sequence
  mRNA product Design d-1 comprising derived and/or modified sequence from HRSV(A2)__F-del_DSCav1_mut1 (opt6)
gggagacccgugacccggaaguuguacggcuacgcgacuuucccucccacaaacccucgcgcccuuccuuuccuacuugggcccggcagaaagcuuaccauggaacuacucaucuuaaaagcaaacgcaauaacaacuauucuaaccgcaguaacauuuuguuucgcaucaggacaaaacauaaccgaagaauuuuaccaaucaacauguuccgcaguuucaaaaggauacuuaggcgcacuaagaacaggcugguacaccuccgugauaacaauagaauuaucaaacauaaaagaaaacaaauguaauggaacugacgccaaaguaaaacuaauaaaacaagaacuagacaaauauaaaaacgcaguaacugaacuacaauuacuaaugcaauccaccccagcaacaggcucaggcucagcaauuugcuccggagucgcugucugcaaaguacuacaucuugaaggcgaagucaauaaaauaaaaucagcacuucuaucaacaaacaaagcaguagucucacuaucaaacggaguaucaguacuaacauuuaaaguauuagaucuaaaaaacuauauagauaaacaacuacuacccauacucaauaaacaauccuguucaauaccaaauauagaaaccguaauagaauuucaacaaaaaaacaaucgacuauuagaaaucacccgagaauuuucagucaaugcaggcguaacaacaccaguaucaaccuacauguuaaccaacuccgaacuacuaucccucauaaacgacaugccaauaacaaacgaucaaaaaaaacuaauguccaacaacguacaaauagucagacaacaaucuuauucaauaaugugcaucauaaaagaagaaguucuagccuacguaguucaacuuccauuauacggcguaauugauacaccaugcuggaaacuacacacauccccacuauguacaacaaacacaaaagaaggaucaaacaucugcuuaacuagaacagacagaggaugguacugcgacaacgcaggaucagucucauucuuuccacaagcagaaacaugcaagguccaaucaaacagaguauucugcgacacaaugaacuccuuaacacuaccaucugaaguaaaccuauguaauguagacauauuuaacccaaaauacgacugcaaaauaaugaccucaaaaacagacguauccucaucaguaauuacaagccucggagccauaguaucaugcuacggaaaaacaaaauguacagcaucaaacaaaaacagaggaauaauaaaaacguucuccaacggaugcgacuauguaucaaacaaaggcguagacacaguaucagucggaaauacccuuuacugcguaaacaaacaagaaggccaaagucuauacguaaaaggagagccaauaauaaacuuuuaugacccccuuguauucccaucugacgaauuugaugcaucaauaucccaagucaacgaaaaaaucaaccaaucauuagccuuuauuagaaaaagugacgaacuauuacacaacguuaaugcagggaaaucaacaacaaauauaaugauuacaaccauaauuauaguuaucauaguuauacuacucucacuaaucgcaguaggauuacuauuauacugcaaagcaagauaaggacuagucccuguucccagagcccacuuuuuuuucuuuuuuugaaauaaaauagccugucuuucagaucuaaaaaaaaaaaaaaaaaaaaaaaaaaaaaaaaaaaaaaaaaaaaaaaaaaaaaaaaaaaaaaaaugcaucccccccccccccccccccccccccccccccaaaggcucuuuucagagccaccagaauu

SEQ ID NO: 2141 - RNA, 1843 nt, Artificial Sequence
  mRNA product Design d-1 comprising derived and/or modified sequence from HRSV(A2)__F-del_DSCav1_mut1 (opt11)
gggagacccgugacccggaaguuguacggcuacgcgacuuucccucccacaaacccucgcgcccuuccuuuccuacuugggcccggcagaaagcuuaccauggaacuacucauccuaaaagccaacgcaaucacaaccauacuuacagcuguuaccuucugcuucgcauccggccaaaauaucaccgaagaguucuaccaaucaaccugcuccgccgucagcaaaggauaccucggcgcccuccgaaccggaugguacacuucugucaucacaaucgaacucuccaacaucaaagaaaacaaaugcaacgguaccgacgcgaaagucaaacucaucaaacaagaacuagacaaguacaaaaacgccgucaccgaacugcaacuccucaugcaauccacaccagcaacgggaucaggauccgccaucugcucaggcgucgccgucugcaaaguccugcaccuagaaggagaaguaaacaaaauuaaauccgcccuacucuccaccaacaaagcagucgucucacuauccaacggcgucuccguccucaccuuuaagguccucgaccucaaaaauuauauagacaaacaacuccuccccauccuaaacaaacaaucaugcuccauccccaacauagaaaccgucaucgaauuucaacagaaaaacaaccgacucuuagaaauuacccgcgaguucagcgucaacgccggagucaccacacccgucucaaccuacaugcucaccaacucagaacuccucucacuaaucaaugauaugcccaucacaaacgaccaaaagaaacucauguccaacaacguacaaaucguucgccaacaaagcuacuccaucauguguaucauuaaagaagaaguccucgccuacgucguccaacuuccgcucuacggcguaaucgacacccccugcuggaaacuucacaccucgccccucugcaccacaaacaccaaagaaggcuccaacaucugccuaacccgcaccgaccgcggcugguacugcgacaacgccggcuccgucucauuuuucccccaggcggagaccugcaaaguccaauccaaccgcgucuucugcgacaccaugaacucucuuacccucccaucagaaguaaaccucugcaacgucgacaucuuuaaccccaaauacgauugcaagauaaugaccuccaaaacagacgucucaucguccgucaucaccucccuaggagcuaucgucuccugcuacggcaagaccaaaugcaccgcuuccaacaaaaaccgcggcaucaucaaaaccuucuccaacgggugcgacuacgucucuaacaaaggcguggacacaguauccguaggaaacacacuguacugcguaaacaaacaagagggccaaucgcuuuacgucaaaggcgagccaauuaucaacuucuacgacccgcucgucuucccaucagacgaguucgacgcauccaucucccaagucaacgagaaaaucaaucagucccucgccuucauacgcaaauccgacgaacuccuacauaacguaaacgccggcaaaucuaccacaaacaucaugaucacaaccaucaucaucguaaucaucgucauccuucucucgcucaucgccguaggacugcuacuuuacugcaaggcccgcuaaggacuagucccuguucccagagcccacuuuuuuuucuuuuuuugaaauaaaauagccugucuuucagaucuaaaaaaaaaaaaaaaaaaaaaaaaaaaaaaaaaaaaaaaaaaaaaaaaaaaaaaaaaaaaaaaaugcaucccccccccccccccccccccccccccccccaaaggcucuuuucagagccaccagaauu

SEQ ID NO: 2142 - RNA, 1898 nt, Artificial Sequence
  mRNA product Design d-2 comprising derived and/or modified sequence from HRSV(A2)__F-del_DSCav1_mut1 (opt1)
gggagagcggcucggccauuuugucccagucaguccggaggcugcggcugcagaaguaccgccugcggaguaacugcaaagaagcuuaccauggagcugcucauccugaaggccaacgccaucaccaccauccugacggcggugaccuucugcuucgccagcggccagaacaucaccgaggaguucuaccaguccacgugcagcgccgucuccaagggguaccucggcgcccugcggaccggcugguacaccuccgugaucaccaucgagcugagcaacaucaaggagaacaagugcaacgggaccgacgccaaggugaagcucaucaagcaggagcuggacaaguacaagaacgcggucacggagcugcagcuccugaugcaguccaccccggcaaccggcuccggcuccgccaucugcagcggcgucgccgugugcaaggugcugcaccucgagggggaggucaacaagaucaagagcgcccugcuguccaccaacaaggccguggugagccucuccaacggcgucagcgugcugaccuucaaggugcuggaccucaagaacuacaucgacaagcagcugcugcccauccugaacaagcagagcugcuccauccccaacaucgagacggugaucgaguuccagcagaagaacaaccggcuccuggagaucacccgcgaguucagcgugaacgccggggucaccacccccguguccacguacaugcugaccaacagcgagcuccugucccugaucaacgacaugccgaucaccaacgaccagaagaagcucaugagcaacaacgugcagaucguccggcagcaguccuacagcaucaugugcaucaucaaggaggaggugcuggcguacgugguccagcugccccucuacggcgugaucgacacccccugcuggaagcugcacacgagcccccugugcaccaccaacaccaaggagggguccaacaucugccucacgcgcaccgaccggggcugguacugcgacaacgccggcagcgucuccuucuucccgcaggccgagaccugcaaggugcagagcaaccgcguguucugcgacaccaugaacucccugacgcugcccagcgagguaaaccucugcaacgucgacaucuucaaccccaaguacgacugcaagaucaugaccuccaagaccgacgugagcuccagcgugaucaccucccugggggccaucgucagcugcuacggcaagacgaagugcaccgccagcaacaagaaccgggggaucaucaagaccuucuccaacggcugcgacuacgugagcaacaagggcguggacaccguguccgucgggaacacccuguacugcgugaacaagcaggagggccagagccucuacgugaagggggagcccaucaucaacuucuacgacccgcuggucuuccccuccgacgaguucgacgcgagcaucucccaggugaacgagaagaucaaccagagccuggccuucauccgcaaguccgacgagcugcuccacaacgugaacgccggcaagagcacgaccaacaucaugaucaccaccaucaucaucgucaucaucgugauccugcugucccucaucgccguggggcugcugcucuacugcaaggcccggugaggacuaguaauaaggaaacuguaugaaugucugugggcaggaagugaagagauccuucuguaaagguuuuuggaauuaugucugcugaauaauaaacuuuuuugaaauaauaaaucugguagaaaaaugagaucuaaaaaaaaaaaaaaaaaaaaaaaaaaaaaaaaaaaaaaaaaaaaaaaaaaaaaaaaaaaaaaaaugcaucccccccccccccccccccccccccccccccaaaggcucuuuucagagccaccagaauu

SEQ ID NO: 2143 - RNA, 1898 nt, Artificial Sequence
  mRNA product Design d-2 comprising derived and/or modified sequence from HRSV(A2)__F-del_DSCav1_mut1 (opt1)
gggagagcggcucggccauuuugucccagucaguccggaggcugcggcugcagaaguaccgccugcggaguaacugcaaagaagcuuaccauggagcugcucauccugaaggccaacgccaucaccaccauccugacggcggugaccuucugcuucgccagcggccagaacaucaccgaggaguucuaccaguccacgugcagcgccgucuccaagggguaccucggcgcccugcgcaccgggugguacaccagcgugaucaccaucgagcuguccaacaucaaggagaacaagugcaacggcaccgacgccaaggugaagcucaucaagcaggagcuggacaaguacaagaacgcggucacggagcugcagcuccugaugcagagcacccccgccaccggguccggcagcgccaucugcuccggcguggccgugugcaagguccugcaccucgagggggaggugaacaagaucaagagcgcgcugcuguccaccaacaaggccguggucagccucuccaacggcgugagcgugcugacguucaagguccuggaccucaagaacuacaucgacaagcagcugcugccgauccucaacaagcaguccugcagcauccccaacaucgagaccgugaucgaguuccagcagaagaacaaccggcugcuggagaucacccgcgaguucuccgugaacgccggggucaccacgcccgugagcaccuacaugcucaccaacuccgagcugcugagccucaucaacgacaugcccaucaccaacgaccagaagaagcugaugagcaacaacgugcagaucguccggcagcaguccuacagcaucaugugcaucaucaaggaggaggugcuggccuacgugguccagcucccgcuguacggcgugaucgacacgcccugcuggaagcugcacaccagcccccucugcaccaccaacacgaaggagggguccaacaucugccugacccgcaccgaccggggcugguacugcgacaacgccggcuccgugagcuucuucccccaggcggagaccugcaagguccaguccaaccgcguguucugcgacacgaugaacagccugacccucccguccgaggucaaccugugcaacguggacaucuucaaccccaaguacgacugcaagaucaugaccagcaagaccgacguguccagcuccgucaucacgagccugggggccaucguguccugcuacggcaagaccaagugcaccgccagcaacaagaaccgggggaucaucaagaccuucuccaacggcugcgacuacgugagcaacaagggcgucgacacgguguccguggggaacacccucuacugcgucaacaagcaggagggccagagccuguacgugaagggggagcccaucaucaacuucuacgacccccugguguucccgagcgacgaguucgacgccuccaucagccaggucaacgagaagaucaaccagucccucgccuucauccgcaagagcgacgagcugcugcacaacgugaacgcgggcaaguccaccaccaacaucaugaucaccacgaucaucaucgugaucaucgucauccuccugagccugaucgccguggggcuccugcuguacugcaaggcccggugaggacuaguaauaaggaaacuguaugaaugucugugggcaggaagugaagagauccuucuguaaagguuuuuggaauuaugucugcugaauaauaaacuuuuuugaaauaauaaaucugguagaaaaaugagaucuaaaaaaaaaaaaaaaaaaaaaaaaaaaaaaaaaaaaaaaaaaaaaaaaaaaaaaaaaaaaaaaaugcaucccccccccccccccccccccccccccccccaaaggcucuuuucagagccaccagaauu

SEQ ID NO: 2144 - RNA, 1898 nt, Artificial Sequence
  mRNA product Design d-2 comprising derived and/or modified sequence from HRSV(A2)__F-del_DSCav1_mut1 (opt2)
gggagagcggcucggccauuuugucccagucaguccggaggcugcggcugcagaaguaccgccugcggaguaacugcaaagaagcuuaccauggagcuccucauccucaaggccaacgccaucaccaccauccucaccgccgucaccuucugcuucgccuccggccagaacaucaccgaggaguucuaccaguccaccugcuccgccgucuccaagggcuaccucggcgcccuccgcaccggcugguacaccuccgucaucaccaucgagcucuccaacaucaaggagaacaagugcaacggcaccgacgccaaggucaagcucaucaagcaggagcucgacaaguacaagaacgccgucaccgagcuccagcuccucaugcaguccacccccgccaccggcuccggcuccgccaucugcuccggcgucgccgucugcaagguccuccaccucgagggcgaggucaacaagaucaaguccgcccuccucuccaccaacaaggccgucgucucccucuccaacggcgucuccguccucaccuucaagguccucgaccucaagaacuacaucgacaagcagcuccuccccauccucaacaagcaguccugcuccauccccaacaucgagaccgucaucgaguuccagcagaagaacaaccgccuccucgagaucacccgcgaguucuccgucaacgccggcgucaccacccccgucuccaccuacaugcucaccaacuccgagcuccucucccucaucaacgacaugcccaucaccaacgaccagaagaagcucauguccaacaacguccagaucguccgccagcaguccuacuccaucaugugcaucaucaaggaggagguccucgccuacgucguccagcucccccucuacggcgucaucgacacccccugcuggaagcuccacaccuccccccucugcaccaccaacaccaaggagggcuccaacaucugccucacccgcaccgaccgcggcugguacugcgacaacgccggcuccgucuccuucuucccccaggccgagaccugcaagguccaguccaaccgcgucuucugcgacaccaugaacucccucacccuccccuccgaggucaaccucugcaacgucgacaucuucaaccccaaguacgacugcaagaucaugaccuccaagaccgacgucuccuccuccgucaucaccucccucggcgccaucgucuccugcuacggcaagaccaagugcaccgccuccaacaagaaccgcggcaucaucaagaccuucuccaacggcugcgacuacgucuccaacaagggcgucgacaccgucuccgucggcaacacccucuacugcgucaacaagcaggagggccagucccucuacgucaagggcgagcccaucaucaacuucuacgacccccucgucuuccccuccgacgaguucgacgccuccaucucccaggucaacgagaagaucaaccagucccucgccuucauccgcaaguccgacgagcuccuccacaacgucaacgccggcaaguccaccaccaacaucaugaucaccaccaucaucaucgucaucaucgucauccuccucucccucaucgccgucggccuccuccucuacugcaaggcccgcugaggacuaguaauaaggaaacuguaugaaugucugugggcaggaagugaagagauccuucuguaaagguuuuuggaauuaugucugcugaauaauaaacuuuuuugaaauaauaaaucugguagaaaaaugagaucuaaaaaaaaaaaaaaaaaaaaaaaaaaaaaaaaaaaaaaaaaaaaaaaaaaaaaaaaaaaaaaaaugcaucccccccccccccccccccccccccccccccaaaggcucuuuucagagccaccagaauu

SEQ ID NO: 2145 - RNA, 1898 nt, Artificial Sequence
  mRNA product Design d-2 comprising derived and/or modified sequence from HRSV(A2)__F-del_DSCav1_mut1 (opt3)
gggagagcggcucggccauuuugucccagucaguccggaggcugcggcugcagaaguaccgccugcggaguaacugcaaagaagcuuaccauggagcugcucauccuuaaggccaacgcuauuaccacaauacugacugcagugacguucugcuuugccagcggccagaauaucaccgaagaguucuaccaauccacauguucugcggucucaaaaggguauuugggagcuuuaagaacugguugguacaccaguguuauuacaaucgaacugagcaacauuaaggagaauaaaugcaacggcaccgacgccaaggugaaacuaaucaagcaggaacucgauaaguauaaaaaugcaguaacugagcugcagcuucugaugcaguccacacccgccaccgggucuggaucggcuauauguucaggcguggcagucugcaagguguugcaccucgagggugaaguuaacaaaaucaagagcgcccugcugaguacgaauaaagcuguggucucccucucuaacggggugagcguauuaacuuuuaagguucuggaccuuaagaauuacauugauaaacaauugcugccuauccuaaacaagcaguccuguucaauuccaaauaucgagaccgugauagaguuccagcagaaaaacaauaggcuccuggaaauuacacgggaguuuagugucaacgccggagugacuaccccggugagcacauauaugcuuaccaauucugaacuguugucccucaucaacgacaugcccauuacgaacgaucaaaagaaacugaugucaaauaacguccagaucguucgccagcagagcuacaguaucaugugcauuauaaaggaggaaguguuagcguauguagugcaacugccucucuacggcgucaucgacacuccauguuggaaacuucauacaucuccccugugcaccacuaauacaaaggagggcuccaacauuuguuugacccgaacggaucgugggugguacugcgacaaugcaggaagcgugucguucuuuccucaggccgaaaccuguaagguucagucuaacagaguguucugcgauacaaugaacucccuaacucugccaucagaggucaaucucugcaauguggacaucuuuaaccccaaauaugauuguaagauaaugaccaguaaaacagacguaagcuccucuguuauuacuagccugggugcuaucgugucaugcuacggcaagaccaaauguacagccaguaauaagaacagggggaucauuaagaccuucuccaauggaugcgauuaugucagcaacaaaggcguggacacugucucuguggguaauacgcuuuacuguguuaacaagcaagaggggcagucacuguaugugaaaggagaaccuaucauuaacuuuuacgacccauugguauucccgagugaugaguuugacgcaagcauaucccaggucaaugaaaagaucaaccagucucucgcuuucauucggaaaucggaugagcuguuacacaaugugaacgccggcaagagcacaaccaauaucaugaucacuaccauuauaaucguuauuaucgugauucugcuaucccucaucgcggucggccugcuuuuguauugcaaggcccgcugaggacuaguaauaaggaaacuguaugaaugucugugggcaggaagugaagagauccuucuguaaagguuuuuggaauuaugucugcugaauaauaaacuuuuuugaaauaauaaaucugguagaaaaaugagaucuaaaaaaaaaaaaaaaaaaaaaaaaaaaaaaaaaaaaaaaaaaaaaaaaaaaaaaaaaaaaaaaaugcaucccccccccccccccccccccccccccccccaaaggcucuuuucagagccaccagaauu

SEQ ID NO: 2146 - RNA, 1898 nt, Artificial Sequence
  mRNA product Design d-2 comprising derived and/or modified sequence from HRSV(A2)__F-del_DSCav1_mut1 (opt4)
gggagagcggcucggccauuuugucccagucaguccggaggcugcggcugcagaaguaccgccugcggaguaacugcaaagaagcuuaccauggagcugcugauccugaaggccaacgccaucaccaccauccugaccgccgugaccuucugcuucgccagcggccagaacaucaccgaggaguucuaccagagcaccugcagcgccgugagcaagggcuaccugggcgcccugagaaccggcugguacaccagcgugaucaccaucgagcugagcaacaucaaggagaacaagugcaacggcaccgacgccaaggugaagcugaucaagcaggagcuggacaaguacaagaacgccgugaccgagcugcagcugcugaugcagagcacccccgccaccggcagcggcagcgccaucugcagcggcguggccgugugcaaggugcugcaccuggagggcgaggugaacaagaucaagagcgcccugcugagcaccaacaaggccguggugagccugagcaacggcgugagcgugcugaccuucaaggugcuggaccugaagaacuacaucgacaagcagcugcugcccauccugaacaagcagagcugcagcauccccaacaucgagaccgugaucgaguuccagcagaagaacaacagacugcuggagaucaccagagaguucagcgugaacgccggcgugaccacccccgugagcaccuacaugcugaccaacagcgagcugcugagccugaucaacgacaugcccaucaccaacgaccagaagaagcugaugagcaacaacgugcagaucgugagacagcagagcuacagcaucaugugcaucaucaaggaggaggugcuggccuacguggugcagcugccccuguacggcgugaucgacacccccugcuggaagcugcacaccagcccccugugcaccaccaacaccaaggagggcagcaacaucugccugaccagaaccgacagaggcugguacugcgacaacgccggcagcgugagcuucuucccccaggccgagaccugcaaggugcagagcaacagaguguucugcgacaccaugaacagccugacccugcccagcgaggugaaccugugcaacguggacaucuucaaccccaaguacgacugcaagaucaugaccagcaagaccgacgugagcagcagcgugaucaccagccugggcgccaucgugagcugcuacggcaagaccaagugcaccgccagcaacaagaacagaggcaucaucaagaccuucagcaacggcugcgacuacgugagcaacaagggcguggacaccgugagcgugggcaacacccuguacugcgugaacaagcaggagggccagagccuguacgugaagggcgagcccaucaucaacuucuacgacccccugguguuccccagcgacgaguucgacgccagcaucagccaggugaacgagaagaucaaccagagccuggccuucaucagaaagagcgacgagcugcugcacaacgugaacgccggcaagagcaccaccaacaucaugaucaccaccaucaucaucgugaucaucgugauccugcugagccugaucgccgugggccugcugcuguacugcaaggccagaugaggacuaguaauaaggaaacuguaugaaugucugugggcaggaagugaagagauccuucuguaaagguuuuuggaauuaugucugcugaauaauaaacuuuuuugaaauaauaaaucugguagaaaaaugagaucuaaaaaaaaaaaaaaaaaaaaaaaaaaaaaaaaaaaaaaaaaaaaaaaaaaaaaaaaaaaaaaaaugcaucccccccccccccccccccccccccccccccaaaggcucuuuucagagccaccagaauu

SEQ ID NO: 2147 - RNA, 1898 nt, Artificial Sequence
  mRNA product Design d-2 comprising derived and/or modified sequence from HRSV(A2)__F-del_DSCav1_mut1 (opt5)
gggagagcggcucggccauuuugucccagucaguccggaggcugcggcugcagaaguaccgccugcggaguaacugcaaagaagcuuaccauggagcugcucauccugaaggccaacgcuauuaccacaauccuuacggccgugaccuucugcuuugcgagcggccagaauauuacagaagaguucuaccaauccaccuguucugcugucagcaaaggguaucugggagcccucagaacaggcugguacaccuccguuaucacaauugaacugucuaacaucaaggagaauaaaugcaacgggaccgacgccaaggugaaacuuaucaagcaggaacuggauaaguauaaaaaugcugugacggagcuccagcugcugaugcagagcacccccgccacaggauccggcucugcuauuuguagcggggucgccgugugcaagguucuccaccuggagggagaagugaacaaaaucaaguccgcgcuucugagcaccaauaaagccgucgugucucucuccaacggcguuagcgugcugacauuuaagguccuugaccugaagaauuacauugauaaacaacuccugccuauccugaacaagcagucuuguuccauuccgaauaucgagaccgugauugaguuccagcagaaaaacaaucggcuccuggaaaucacgcgcgaguuuagcgugaacgcuggcgucacaacccccguuucuacauauaugcuuaccaauuccgaacugcucagccugaucaacgacaugccuauuaccaacgaucaaaagaaacuuauguccaauaacgugcagaucgugagacagcagucuuacagcauuaugugcaucauuaaggaggaaguccuggccuaugugguucaacucccccuguacggggugaucgacacaccuuguuggaaacugcauacgagcccccucugcaccacaaauaccaaggagggauccaacaucugucugacacggaccgaucgcggcugguacugcgacaaugcugggucugucuccuucuuuccucaggccgaaacguguaaggugcagagcaacagaguuuucugcgauacaaugaacucucuuacccugccgagcgaggugaaucucugcaaugucgacauuuuuaaccccaaauaugauuguaagaucaugaccuccaaaacagacgugucuagcuccgucauuaccagccugggagcgaucgugucuugcuacggcaagacaaaauguacggccuccaauaagaaccgggggauuaucaagaccuucagcaauggaugcgauuauguuucuaacaaaggcguggacacagucuccgugggcaauacccuuuacuguguuaacaagcaagaggggcagagccuguaugugaaaggagaaccuaucauuaacuuuuacgacccccucgucuucccuuccgaugaguuugacgcuucuaucagccaggugaaugaaaagauuaaccagucccuggccuucauccgcaaaucugaugagcugcuccacaaugugaacgcuggcaagagcacaaccaauauuaugaucacgaccauuaucaucguuauuaucgucauucugcuuucccugaucgccguggggcuccugcuguauugcaaggccagaugaggacuaguaauaaggaaacuguaugaaugucugugggcaggaagugaagagauccuucuguaaagguuuuuggaauuaugucugcugaauaauaaacuuuuuugaaauaauaaaucugguagaaaaaugagaucuaaaaaaaaaaaaaaaaaaaaaaaaaaaaaaaaaaaaaaaaaaaaaaaaaaaaaaaaaaaaaaaaugcaucccccccccccccccccccccccccccccccaaaggcucuuuucagagccaccagaauu

SEQ ID NO: 2148 - RNA, 1898 nt, Artificial Sequence
  mRNA product Design d-2 comprising derived and/or modified sequence from HRSV(A2)__F-del_DSCav1_mut1 (opt6)
gggagagcggcucggccauuuugucccagucaguccggaggcugcggcugcagaaguaccgccugcggaguaacugcaaagaagcuuaccauggaacuacucaucuuaaaagcaaacgcaauaacaacuauucuaaccgcaguaacauuuuguuucgcaucaggacaaaacauaaccgaagaauuuuaccaaucaacauguuccgcaguuucaaaaggauacuuaggcgcacuaagaacaggcugguacaccuccgugauaacaauagaauuaucaaacauaaaagaaaacaaauguaauggaacugacgccaaaguaaaacuaauaaaacaagaacuagacaaauauaaaaacgcaguaacugaacuacaauuacuaaugcaauccaccccagcaacaggcucaggcucagcaauuugcuccggagucgcugucugcaaaguacuacaucuugaaggcgaagucaauaaaauaaaaucagcacuucuaucaacaaacaaagcaguagucucacuaucaaacggaguaucaguacuaacauuuaaaguauuagaucuaaaaaacuauauagauaaacaacuacuacccauacucaauaaacaauccuguucaauaccaaauauagaaaccguaauagaauuucaacaaaaaaacaaucgacuauuagaaaucacccgagaauuuucagucaaugcaggcguaacaacaccaguaucaaccuacauguuaaccaacuccgaacuacuaucccucauaaacgacaugccaauaacaaacgaucaaaaaaaacuaauguccaacaacguacaaauagucagacaacaaucuuauucaauaaugugcaucauaaaagaagaaguucuagccuacguaguucaacuuccauuauacggcguaauugauacaccaugcuggaaacuacacacauccccacuauguacaacaaacacaaaagaaggaucaaacaucugcuuaacuagaacagacagaggaugguacugcgacaacgcaggaucagucucauucuuuccacaagcagaaacaugcaagguccaaucaaacagaguauucugcgacacaaugaacuccuuaacacuaccaucugaaguaaaccuauguaauguagacauauuuaacccaaaauacgacugcaaaauaaugaccucaaaaacagacguauccucaucaguaauuacaagccucggagccauaguaucaugcuacggaaaaacaaaauguacagcaucaaacaaaaacagaggaauaauaaaaacguucuccaacggaugcgacuauguaucaaacaaaggcguagacacaguaucagucggaaauacccuuuacugcguaaacaaacaagaaggccaaagucuauacguaaaaggagagccaauaauaaacuuuuaugacccccuuguauucccaucugacgaauuugaugcaucaauaucccaagucaacgaaaaaaucaaccaaucauuagccuuuauuagaaaaagugacgaacuauuacacaacguuaaugcagggaaaucaacaacaaauauaaugauuacaaccauaauuauaguuaucauaguuauacuacucucacuaaucgcaguaggauuacuauuauacugcaaagcaagauaaggacuaguaauaaggaaacuguaugaaugucugugggcaggaagugaagagauccuucuguaaagguuuuuggaauuaugucugcugaauaauaaacuuuuuugaaauaauaaaucugguagaaaaaugagaucuaaaaaaaaaaaaaaaaaaaaaaaaaaaaaaaaaaaaaaaaaaaaaaaaaaaaaaaaaaaaaaaaugcaucccccccccccccccccccccccccccccccaaaggcucuuuucagagccaccagaauu

SEQ ID NO: 2149 - RNA, 1898 nt, Artificial Sequence
  mRNA product Design d-2 comprising derived and/or modified sequence from HRSV(A2)__F-del_DSCav1_mut1 (opt11)
gggagagcggcucggccauuuugucccagucaguccggaggcugcggcugcagaaguaccgccugcggaguaacugcaaagaagcuuaccauggaacuacucauccuaaaagccaacgcaaucacaaccauacuuacagcuguuaccuucugcuucgcauccggccaaaauaucaccgaagaguucuaccaaucaaccugcuccgccgucagcaaaggauaccucggcgcccuccgaaccggaugguacacuucugucaucacaaucgaacucuccaacaucaaagaaaacaaaugcaacgguaccgacgcgaaagucaaacucaucaaacaagaacuagacaaguacaaaaacgccgucaccgaacugcaacuccucaugcaauccacaccagcaacgggaucaggauccgccaucugcucaggcgucgccgucugcaaaguccugcaccuagaaggagaaguaaacaaaauuaaauccgcccuacucuccaccaacaaagcagucgucucacuauccaacggcgucuccguccucaccuuuaagguccucgaccucaaaaauuauauagacaaacaacuccuccccauccuaaacaaacaaucaugcuccauccccaacauagaaaccgucaucgaauuucaacagaaaaacaaccgacucuuagaaauuacccgcgaguucagcgucaacgccggagucaccacacccgucucaaccuacaugcucaccaacucagaacuccucucacuaaucaaugauaugcccaucacaaacgaccaaaagaaacucauguccaacaacguacaaaucguucgccaacaaagcuacuccaucauguguaucauuaaagaagaaguccucgccuacgucguccaacuuccgcucuacggcguaaucgacacccccugcuggaaacuucacaccucgccccucugcaccacaaacaccaaagaaggcuccaacaucugccuaacccgcaccgaccgcggcugguacugcgacaacgccggcuccgucucauuuuucccccaggcggagaccugcaaaguccaauccaaccgcgucuucugcgacaccaugaacucucuuacccucccaucagaaguaaaccucugcaacgucgacaucuuuaaccccaaauacgauugcaagauaaugaccuccaaaacagacgucucaucguccgucaucaccucccuaggagcuaucgucuccugcuacggcaagaccaaaugcaccgcuuccaacaaaaaccgcggcaucaucaaaaccuucuccaacgggugcgacuacgucucuaacaaaggcguggacacaguauccguaggaaacacacuguacugcguaaacaaacaagagggccaaucgcuuuacgucaaaggcgagccaauuaucaacuucuacgacccgcucgucuucccaucagacgaguucgacgcauccaucucccaagucaacgagaaaaucaaucagucccucgccuucauacgcaaauccgacgaacuccuacauaacguaaacgccggcaaaucuaccacaaacaucaugaucacaaccaucaucaucguaaucaucgucauccuucucucgcucaucgccguaggacugcuacuuuacugcaaggcccgcuaaggacuaguaauaaggaaacuguaugaaugucugugggcaggaagugaagagauccuucuguaaagguuuuuggaauuaugucugcugaauaauaaacuuuuuugaaauaauaaaucugguagaaaaaugagaucuaaaaaaaaaaaaaaaaaaaaaaaaaaaaaaaaaaaaaaaaaaaaaaaaaaaaaaaaaaaaaaaaugcaucccccccccccccccccccccccccccccccaaaggcucuuuucagagccaccagaauu

SEQ ID NO: 2150 - RNA, 2214 nt, Artificial Sequence
  mRNA product Design d-3 comprising derived and/or modified sequence from HRSV(A2)__F-del_DSCav1_mut1 (opt1)
gggagagggcgcuuggcuugcaaggacccugagcugcggcauugaagcacacccaacccaacucgacugaagucagccucacugaaccggaucugagaaucuucucucucugggcuugccagggcucuccgaaccuagcuagcauccucuucaauuccaacuagaaagcuuaccauggagcugcucauccugaaggccaacgccaucaccaccauccugacggcggugaccuucugcuucgccagcggccagaacaucaccgaggaguucuaccaguccacgugcagcgccgucuccaagggguaccucggcgcccugcggaccggcugguacaccuccgugaucaccaucgagcugagcaacaucaaggagaacaagugcaacgggaccgacgccaaggugaagcucaucaagcaggagcuggacaaguacaagaacgcggucacggagcugcagcuccugaugcaguccaccccggcaaccggcuccggcuccgccaucugcagcggcgucgccgugugcaaggugcugcaccucgagggggaggucaacaagaucaagagcgcccugcuguccaccaacaaggccguggugagccucuccaacggcgucagcgugcugaccuucaaggugcuggaccucaagaacuacaucgacaagcagcugcugcccauccugaacaagcagagcugcuccauccccaacaucgagacggugaucgaguuccagcagaagaacaaccggcuccuggagaucacccgcgaguucagcgugaacgccggggucaccacccccguguccacguacaugcugaccaacagcgagcuccugucccugaucaacgacaugccgaucaccaacgaccagaagaagcucaugagcaacaacgugcagaucguccggcagcaguccuacagcaucaugugcaucaucaaggaggaggugcuggcguacgugguccagcugccccucuacggcgugaucgacacccccugcuggaagcugcacacgagcccccugugcaccaccaacaccaaggagggguccaacaucugccucacgcgcaccgaccggggcugguacugcgacaacgccggcagcgucuccuucuucccgcaggccgagaccugcaaggugcagagcaaccgcguguucugcgacaccaugaacucccugacgcugcccagcgagguaaaccucugcaacgucgacaucuucaaccccaaguacgacugcaagaucaugaccuccaagaccgacgugagcuccagcgugaucaccucccugggggccaucgucagcugcuacggcaagacgaagugcaccgccagcaacaagaaccgggggaucaucaagaccuucuccaacggcugcgacuacgugagcaacaagggcguggacaccguguccgucgggaacacccuguacugcgugaacaagcaggagggccagagccucuacgugaagggggagcccaucaucaacuucuacgacccgcuggucuuccccuccgacgaguucgacgcgagcaucucccaggugaacgagaagaucaaccagagccuggccuucauccgcaaguccgacgagcugcuccacaacgugaacgccggcaagagcacgaccaacaucaugaucaccaccaucaucaucgucaucaucgugauccugcugucccucaucgccguggggcugcugcucuacugcaaggcccggugaggacuagugaagggaacacccaaauuuaauucagccuuaagcacaauuaauuaagagugaaacguaauuguacaagcaguuggucacccaccauagggcaugaucaacaccgcaaccuuuccuuuuucccccagugauucugaaaaaccccucuucccuucagcuugcuuagauguuccaaauuuaguaagcuuaaggcggccuacagaagaaaaagaaaaaaaaggccacaaaaguucccucucacuuucaguaaauaaaauaaaagcagcaacagaaauaaagaaauaaaugaaauucaaaaugaaauaaauauuguguugugcagcauuaaaaaaucaauaaaaauuaaaaaugagcaagaucuaaaaaaaaaaaaaaaaaaaaaaaaaaaaaaaaaaaaaaaaaaaaaaaaaaaaaaaaaaaaaaaaugcaucccccccccccccccccccccccccccccccaaaggcucuuuucagagccaccagaauu

SEQ ID NO: 2151 - RNA, 2214 nt, Artificial Sequence
  mRNA product Design d-3 comprising derived and/or modified sequence from HRSV(A2)__F-del_DSCav1_mut1 (opt1)
gggagagggcgcuuggcuugcaaggacccugagcugcggcauugaagcacacccaacccaacucgacugaagucagccucacugaaccggaucugagaaucuucucucucugggcuugccagggcucuccgaaccuagcuagcauccucuucaauuccaacuagaaagcuuaccauggagcugcucauccugaaggccaacgccaucaccaccauccugacggcggugaccuucugcuucgccagcggccagaacaucaccgaggaguucuaccaguccacgugcagcgccgucuccaagggguaccucggcgcccugcgcaccgggugguacaccagcgugaucaccaucgagcuguccaacaucaaggagaacaagugcaacggcaccgacgccaaggugaagcucaucaagcaggagcuggacaaguacaagaacgcggucacggagcugcagcuccugaugcagagcacccccgccaccggguccggcagcgccaucugcuccggcguggccgugugcaagguccugcaccucgagggggaggugaacaagaucaagagcgcgcugcuguccaccaacaaggccguggucagccucuccaacggcgugagcgugcugacguucaagguccuggaccucaagaacuacaucgacaagcagcugcugccgauccucaacaagcaguccugcagcauccccaacaucgagaccgugaucgaguuccagcagaagaacaaccggcugcuggagaucacccgcgaguucuccgugaacgccggggucaccacgcccgugagcaccuacaugcucaccaacuccgagcugcugagccucaucaacgacaugcccaucaccaacgaccagaagaagcugaugagcaacaacgugcagaucguccggcagcaguccuacagcaucaugugcaucaucaaggaggaggugcuggccuacgugguccagcucccgcuguacggcgugaucgacacgcccugcuggaagcugcacaccagcccccucugcaccaccaacacgaaggagggguccaacaucugccugacccgcaccgaccggggcugguacugcgacaacgccggcuccgugagcuucuucccccaggcggagaccugcaagguccaguccaaccgcguguucugcgacacgaugaacagccugacccucccguccgaggucaaccugugcaacguggacaucuucaaccccaaguacgacugcaagaucaugaccagcaagaccgacguguccagcuccgucaucacgagccugggggccaucguguccugcuacggcaagaccaagugcaccgccagcaacaagaaccgggggaucaucaagaccuucuccaacggcugcgacuacgugagcaacaagggcgucgacacgguguccguggggaacacccucuacugcgucaacaagcaggagggccagagccuguacgugaagggggagcccaucaucaacuucuacgacccccugguguucccgagcgacgaguucgacgccuccaucagccaggucaacgagaagaucaaccagucccucgccuucauccgcaagagcgacgagcugcugcacaacgugaacgcgggcaaguccaccaccaacaucaugaucaccacgaucaucaucgugaucaucgucauccuccugagccugaucgccguggggcuccugcuguacugcaaggcccggugaggacuagugaagggaacacccaaauuuaauucagccuuaagcacaauuaauuaagagugaaacguaauuguacaagcaguuggucacccaccauagggcaugaucaacaccgcaaccuuuccuuuuucccccagugauucugaaaaaccccucuucccuucagcuugcuuagauguuccaaauuuaguaagcuuaaggcggccuacagaagaaaaagaaaaaaaaggccacaaaaguucccucucacuuucaguaaauaaaauaaaagcagcaacagaaauaaagaaauaaaugaaauucaaaaugaaauaaauauuguguugugcagcauuaaaaaaucaauaaaaauuaaaaaugagcaagaucuaaaaaaaaaaaaaaaaaaaaaaaaaaaaaaaaaaaaaaaaaaaaaaaaaaaaaaaaaaaaaaaaugcaucccccccccccccccccccccccccccccccaaaggcucuuuucagagccaccagaauu

SEQ ID NO: 2152 - RNA, 2214 nt, Artificial Sequence
  mRNA product Design d-3 comprising derived and/or modified sequence from HRSV(A2)__F-del_DSCav1_mut1 (opt2)
gggagagggcgcuuggcuugcaaggacccugagcugcggcauugaagcacacccaacccaacucgacugaagucagccucacugaaccggaucugagaaucuucucucucugggcuugccagggcucuccgaaccuagcuagcauccucuucaauuccaacuagaaagcuuaccauggagcuccucauccucaaggccaacgccaucaccaccauccucaccgccgucaccuucugcuucgccuccggccagaacaucaccgaggaguucuaccaguccaccugcuccgccgucuccaagggcuaccucggcgcccuccgcaccggcugguacaccuccgucaucaccaucgagcucuccaacaucaaggagaacaagugcaacggcaccgacgccaaggucaagcucaucaagcaggagcucgacaaguacaagaacgccgucaccgagcuccagcuccucaugcaguccacccccgccaccggcuccggcuccgccaucugcuccggcgucgccgucugcaagguccuccaccucgagggcgaggucaacaagaucaaguccgcccuccucuccaccaacaaggccgucgucucccucuccaacggcgucuccguccucaccuucaagguccucgaccucaagaacuacaucgacaagcagcuccuccccauccucaacaagcaguccugcuccauccccaacaucgagaccgucaucgaguuccagcagaagaacaaccgccuccucgagaucacccgcgaguucuccgucaacgccggcgucaccacccccgucuccaccuacaugcucaccaacuccgagcuccucucccucaucaacgacaugcccaucaccaacgaccagaagaagcucauguccaacaacguccagaucguccgccagcaguccuacuccaucaugugcaucaucaaggaggagguccucgccuacgucguccagcucccccucuacggcgucaucgacacccccugcuggaagcuccacaccuccccccucugcaccaccaacaccaaggagggcuccaacaucugccucacccgcaccgaccgcggcugguacugcgacaacgccggcuccgucuccuucuucccccaggccgagaccugcaagguccaguccaaccgcgucuucugcgacaccaugaacucccucacccuccccuccgaggucaaccucugcaacgucgacaucuucaaccccaaguacgacugcaagaucaugaccuccaagaccgacgucuccuccuccgucaucaccucccucggcgccaucgucuccugcuacggcaagaccaagugcaccgccuccaacaagaaccgcggcaucaucaagaccuucuccaacggcugcgacuacgucuccaacaagggcgucgacaccgucuccgucggcaacacccucuacugcgucaacaagcaggagggccagucccucuacgucaagggcgagcccaucaucaacuucuacgacccccucgucuuccccuccgacgaguucgacgccuccaucucccaggucaacgagaagaucaaccagucccucgccuucauccgcaaguccgacgagcuccuccacaacgucaacgccggcaaguccaccaccaacaucaugaucaccaccaucaucaucgucaucaucgucauccuccucucccucaucgccgucggccuccuccucuacugcaaggcccgcugaggacuagugaagggaacacccaaauuuaauucagccuuaagcacaauuaauuaagagugaaacguaauuguacaagcaguuggucacccaccauagggcaugaucaacaccgcaaccuuuccuuuuucccccagugauucugaaaaaccccucuucccuucagcuugcuuagauguuccaaauuuaguaagcuuaaggcggccuacagaagaaaaagaaaaaaaaggccacaaaaguucccucucacuuucaguaaauaaaauaaaagcagcaacagaaauaaagaaauaaaugaaauucaaaaugaaauaaauauuguguugugcagcauuaaaaaaucaauaaaaauuaaaaaugagcaagaucuaaaaaaaaaaaaaaaaaaaaaaaaaaaaaaaaaaaaaaaaaaaaaaaaaaaaaaaaaaaaaaaaugcaucccccccccccccccccccccccccccccccaaaggcucuuuucagagccaccagaauu

SEQ ID NO: 2153 - RNA, 2214 nt, Artificial Sequence
  mRNA product Design d-3 comprising derived and/or modified sequence from HRSV(A2)__F-del_DSCav1_mut1 (opt3)
gggagagggcgcuuggcuugcaaggacccugagcugcggcauugaagcacacccaacccaacucgacugaagucagccucacugaaccggaucugagaaucuucucucucugggcuugccagggcucuccgaaccuagcuagcauccucuucaauuccaacuagaaagcuuaccauggagcugcucauccuuaaggccaacgcuauuaccacaauacugacugcagugacguucugcuuugccagcggccagaauaucaccgaagaguucuaccaauccacauguucugcggucucaaaaggguauuugggagcuuuaagaacugguugguacaccaguguuauuacaaucgaacugagcaacauuaaggagaauaaaugcaacggcaccgacgccaaggugaaacuaaucaagcaggaacucgauaaguauaaaaaugcaguaacugagcugcagcuucugaugcaguccacacccgccaccgggucuggaucggcuauauguucaggcguggcagucugcaagguguugcaccucgagggugaaguuaacaaaaucaagagcgcccugcugaguacgaauaaagcuguggucucccucucuaacggggugagcguauuaacuuuuaagguucuggaccuuaagaauuacauugauaaacaauugcugccuauccuaaacaagcaguccuguucaauuccaaauaucgagaccgugauagaguuccagcagaaaaacaauaggcuccuggaaauuacacgggaguuuagugucaacgccggagugacuaccccggugagcacauauaugcuuaccaauucugaacuguugucccucaucaacgacaugcccauuacgaacgaucaaaagaaacugaugucaaauaacguccagaucguucgccagcagagcuacaguaucaugugcauuauaaaggaggaaguguuagcguauguagugcaacugccucucuacggcgucaucgacacuccauguuggaaacuucauacaucuccccugugcaccacuaauacaaaggagggcuccaacauuuguuugacccgaacggaucgugggugguacugcgacaaugcaggaagcgugucguucuuuccucaggccgaaaccuguaagguucagucuaacagaguguucugcgauacaaugaacucccuaacucugccaucagaggucaaucucugcaauguggacaucuuuaaccccaaauaugauuguaagauaaugaccaguaaaacagacguaagcuccucuguuauuacuagccugggugcuaucgugucaugcuacggcaagaccaaauguacagccaguaauaagaacagggggaucauuaagaccuucuccaauggaugcgauuaugucagcaacaaaggcguggacacugucucuguggguaauacgcuuuacuguguuaacaagcaagaggggcagucacuguaugugaaaggagaaccuaucauuaacuuuuacgacccauugguauucccgagugaugaguuugacgcaagcauaucccaggucaaugaaaagaucaaccagucucucgcuuucauucggaaaucggaugagcuguuacacaaugugaacgccggcaagagcacaaccaauaucaugaucacuaccauuauaaucguuauuaucgugauucugcuaucccucaucgcggucggccugcuuuuguauugcaaggcccgcugaggacuagugaagggaacacccaaauuuaauucagccuuaagcacaauuaauuaagagugaaacguaauuguacaagcaguuggucacccaccauagggcaugaucaacaccgcaaccuuuccuuuuucccccagugauucugaaaaaccccucuucccuucagcuugcuuagauguuccaaauuuaguaagcuuaaggcggccuacagaagaaaaagaaaaaaaaggccacaaaaguucccucucacuuucaguaaauaaaauaaaagcagcaacagaaauaaagaaauaaaugaaauucaaaaugaaauaaauauuguguugugcagcauuaaaaaaucaauaaaaauuaaaaaugagcaagaucuaaaaaaaaaaaaaaaaaaaaaaaaaaaaaaaaaaaaaaaaaaaaaaaaaaaaaaaaaaaaaaaaugcaucccccccccccccccccccccccccccccccaaaggcucuuuucagagccaccagaauu

SEQ ID NO: 2154 - RNA, 2214 nt, Artificial Sequence
  mRNA product Design d-3 comprising derived and/or modified sequence from HRSV(A2)__F-del_DSCav1_mut1 (opt4)
gggagagggcgcuuggcuugcaaggacccugagcugcggcauugaagcacacccaacccaacucgacugaagucagccucacugaaccggaucugagaaucuucucucucugggcuugccagggcucuccgaaccuagcuagcauccucuucaauuccaacuagaaagcuuaccauggagcugcugauccugaaggccaacgccaucaccaccauccugaccgccgugaccuucugcuucgccagcggccagaacaucaccgaggaguucuaccagagcaccugcagcgccgugagcaagggcuaccugggcgcccugagaaccggcugguacaccagcgugaucaccaucgagcugagcaacaucaaggagaacaagugcaacggcaccgacgccaaggugaagcugaucaagcaggagcuggacaaguacaagaacgccgugaccgagcugcagcugcugaugcagagcacccccgccaccggcagcggcagcgccaucugcagcggcguggccgugugcaaggugcugcaccuggagggcgaggugaacaagaucaagagcgcccugcugagcaccaacaaggccguggugagccugagcaacggcgugagcgugcugaccuucaaggugcuggaccugaagaacuacaucgacaagcagcugcugcccauccugaacaagcagagcugcagcauccccaacaucgagaccgugaucgaguuccagcagaagaacaacagacugcuggagaucaccagagaguucagcgugaacgccggcgugaccacccccgugagcaccuacaugcugaccaacagcgagcugcugagccugaucaacgacaugcccaucaccaacgaccagaagaagcugaugagcaacaacgugcagaucgugagacagcagagcuacagcaucaugugcaucaucaaggaggaggugcuggccuacguggugcagcugccccuguacggcgugaucgacacccccugcuggaagcugcacaccagcccccugugcaccaccaacaccaaggagggcagcaacaucugccugaccagaaccgacagaggcugguacugcgacaacgccggcagcgugagcuucuucccccaggccgagaccugcaaggugcagagcaacagaguguucugcgacaccaugaacagccugacccugcccagcgaggugaaccugugcaacguggacaucuucaaccccaaguacgacugcaagaucaugaccagcaagaccgacgugagcagcagcgugaucaccagccugggcgccaucgugagcugcuacggcaagaccaagugcaccgccagcaacaagaacagaggcaucaucaagaccuucagcaacggcugcgacuacgugagcaacaagggcguggacaccgugagcgugggcaacacccuguacugcgugaacaagcaggagggccagagccuguacgugaagggcgagcccaucaucaacuucuacgacccccugguguuccccagcgacgaguucgacgccagcaucagccaggugaacgagaagaucaaccagagccuggccuucaucagaaagagcgacgagcugcugcacaacgugaacgccggcaagagcaccaccaacaucaugaucaccaccaucaucaucgugaucaucgugauccugcugagccugaucgccgugggccugcugcuguacugcaaggccagaugaggacuagugaagggaacacccaaauuuaauucagccuuaagcacaauuaauuaagagugaaacguaauuguacaagcaguuggucacccaccauagggcaugaucaacaccgcaaccuuuccuuuuucccccagugauucugaaaaaccccucuucccuucagcuugcuuagauguuccaaauuuaguaagcuuaaggcggccuacagaagaaaaagaaaaaaaaggccacaaaaguucccucucacuuucaguaaauaaaauaaaagcagcaacagaaauaaagaaauaaaugaaauucaaaaugaaauaaauauuguguugugcagcauuaaaaaaucaauaaaaauuaaaaaugagcaagaucuaaaaaaaaaaaaaaaaaaaaaaaaaaaaaaaaaaaaaaaaaaaaaaaaaaaaaaaaaaaaaaaaugcaucccccccccccccccccccccccccccccccaaaggcucuuuucagagccaccagaauu

SEQ ID NO: 2155 - RNA, 2214 nt, Artificial Sequence
  mRNA product Design d-3 comprising derived and/or modified sequence from HRSV(A2)__F-del_DSCav1_mut1 (opt5)
gggagagggcgcuuggcuugcaaggacccugagcugcggcauugaagcacacccaacccaacucgacugaagucagccucacugaaccggaucugagaaucuucucucucugggcuugccagggcucuccgaaccuagcuagcauccucuucaauuccaacuagaaagcuuaccauggagcugcucauccugaaggccaacgcuauuaccacaauccuuacggccgugaccuucugcuuugcgagcggccagaauauuacagaagaguucuaccaauccaccuguucugcugucagcaaaggguaucugggagcccucagaacaggcugguacaccuccguuaucacaauugaacugucuaacaucaaggagaauaaaugcaacgggaccgacgccaaggugaaacuuaucaagcaggaacuggauaaguauaaaaaugcugugacggagcuccagcugcugaugcagagcacccccgccacaggauccggcucugcuauuuguagcggggucgccgugugcaagguucuccaccuggagggagaagugaacaaaaucaaguccgcgcuucugagcaccaauaaagccgucgugucucucuccaacggcguuagcgugcugacauuuaagguccuugaccugaagaauuacauugauaaacaacuccugccuauccugaacaagcagucuuguuccauuccgaauaucgagaccgugauugaguuccagcagaaaaacaaucggcuccuggaaaucacgcgcgaguuuagcgugaacgcuggcgucacaacccccguuucuacauauaugcuuaccaauuccgaacugcucagccugaucaacgacaugccuauuaccaacgaucaaaagaaacuuauguccaauaacgugcagaucgugagacagcagucuuacagcauuaugugcaucauuaaggaggaaguccuggccuaugugguucaacucccccuguacggggugaucgacacaccuuguuggaaacugcauacgagcccccucugcaccacaaauaccaaggagggauccaacaucugucugacacggaccgaucgcggcugguacugcgacaaugcugggucugucuccuucuuuccucaggccgaaacguguaaggugcagagcaacagaguuuucugcgauacaaugaacucucuuacccugccgagcgaggugaaucucugcaaugucgacauuuuuaaccccaaauaugauuguaagaucaugaccuccaaaacagacgugucuagcuccgucauuaccagccugggagcgaucgugucuugcuacggcaagacaaaauguacggccuccaauaagaaccgggggauuaucaagaccuucagcaauggaugcgauuauguuucuaacaaaggcguggacacagucuccgugggcaauacccuuuacuguguuaacaagcaagaggggcagagccuguaugugaaaggagaaccuaucauuaacuuuuacgacccccucgucuucccuuccgaugaguuugacgcuucuaucagccaggugaaugaaaagauuaaccagucccuggccuucauccgcaaaucugaugagcugcuccacaaugugaacgcuggcaagagcacaaccaauauuaugaucacgaccauuaucaucguuauuaucgucauucugcuuucccugaucgccguggggcuccugcuguauugcaaggccagaugaggacuagugaagggaacacccaaauuuaauucagccuuaagcacaauuaauuaagagugaaacguaauuguacaagcaguuggucacccaccauagggcaugaucaacaccgcaaccuuuccuuuuucccccagugauucugaaaaaccccucuucccuucagcuugcuuagauguuccaaauuuaguaagcuuaaggcggccuacagaagaaaaagaaaaaaaaggccacaaaaguucccucucacuuucaguaaauaaaauaaaagcagcaacagaaauaaagaaauaaaugaaauucaaaaugaaauaaauauuguguugugcagcauuaaaaaaucaauaaaaauuaaaaaugagcaagaucuaaaaaaaaaaaaaaaaaaaaaaaaaaaaaaaaaaaaaaaaaaaaaaaaaaaaaaaaaaaaaaaaugcaucccccccccccccccccccccccccccccccaaaggcucuuuucagagccaccagaauu

SEQ ID NO: 2156 - RNA, 2214 nt, Artificial Sequence
  mRNA product Design d-3 comprising derived and/or modified sequence from HRSV(A2)__F-del_DSCav1_mut1 (opt6)
gggagagggcgcuuggcuugcaaggacccugagcugcggcauugaagcacacccaacccaacucgacugaagucagccucacugaaccggaucugagaaucuucucucucugggcuugccagggcucuccgaaccuagcuagcauccucuucaauuccaacuagaaagcuuaccauggaacuacucaucuuaaaagcaaacgcaauaacaacuauucuaaccgcaguaacauuuuguuucgcaucaggacaaaacauaaccgaagaauuuuaccaaucaacauguuccgcaguuucaaaaggauacuuaggcgcacuaagaacaggcugguacaccuccgugauaacaauagaauuaucaaacauaaaagaaaacaaauguaauggaacugacgccaaaguaaaacuaauaaaacaagaacuagacaaauauaaaaacgcaguaacugaacuacaauuacuaaugcaauccaccccagcaacaggcucaggcucagcaauuugcuccggagucgcugucugcaaaguacuacaucuugaaggcgaagucaauaaaauaaaaucagcacuucuaucaacaaacaaagcaguagucucacuaucaaacggaguaucaguacuaacauuuaaaguauuagaucuaaaaaacuauauagauaaacaacuacuacccauacucaauaaacaauccuguucaauaccaaauauagaaaccguaauagaauuucaacaaaaaaacaaucgacuauuagaaaucacccgagaauuuucagucaaugcaggcguaacaacaccaguaucaaccuacauguuaaccaacuccgaacuacuaucccucauaaacgacaugccaauaacaaacgaucaaaaaaaacuaauguccaacaacguacaaauagucagacaacaaucuuauucaauaaugugcaucauaaaagaagaaguucuagccuacguaguucaacuuccauuauacggcguaauugauacaccaugcuggaaacuacacacauccccacuauguacaacaaacacaaaagaaggaucaaacaucugcuuaacuagaacagacagaggaugguacugcgacaacgcaggaucagucucauucuuuccacaagcagaaacaugcaagguccaaucaaacagaguauucugcgacacaaugaacuccuuaacacuaccaucugaaguaaaccuauguaauguagacauauuuaacccaaaauacgacugcaaaauaaugaccucaaaaacagacguauccucaucaguaauuacaagccucggagccauaguaucaugcuacggaaaaacaaaauguacagcaucaaacaaaaacagaggaauaauaaaaacguucuccaacggaugcgacuauguaucaaacaaaggcguagacacaguaucagucggaaauacccuuuacugcguaaacaaacaagaaggccaaagucuauacguaaaaggagagccaauaauaaacuuuuaugacccccuuguauucccaucugacgaauuugaugcaucaauaucccaagucaacgaaaaaaucaaccaaucauuagccuuuauuagaaaaagugacgaacuauuacacaacguuaaugcagggaaaucaacaacaaauauaaugauuacaaccauaauuauaguuaucauaguuauacuacucucacuaaucgcaguaggauuacuauuauacugcaaagcaagauaaggacuagugaagggaacacccaaauuuaauucagccuuaagcacaauuaauuaagagugaaacguaauuguacaagcaguuggucacccaccauagggcaugaucaacaccgcaaccuuuccuuuuucccccagugauucugaaaaaccccucuucccuucagcuugcuuagauguuccaaauuuaguaagcuuaaggcggccuacagaagaaaaagaaaaaaaaggccacaaaaguucccucucacuuucaguaaauaaaauaaaagcagcaacagaaauaaagaaauaaaugaaauucaaaaugaaauaaauauuguguugugcagcauuaaaaaaucaauaaaaauuaaaaaugagcaagaucuaaaaaaaaaaaaaaaaaaaaaaaaaaaaaaaaaaaaaaaaaaaaaaaaaaaaaaaaaaaaaaaaugcaucccccccccccccccccccccccccccccccaaaggcucuuuucagagccaccagaauu

SEQ ID NO: 2157 - RNA, 2214 nt, Artificial Sequence
  mRNA product Design d-3 comprising derived and/or modified sequence from HRSV(A2)__F-del_DSCav1_mut1 (opt11)
gggagagggcgcuuggcuugcaaggacccugagcugcggcauugaagcacacccaacccaacucgacugaagucagccucacugaaccggaucugagaaucuucucucucugggcuugccagggcucuccgaaccuagcuagcauccucuucaauuccaacuagaaagcuuaccauggaacuacucauccuaaaagccaacgcaaucacaaccauacuuacagcuguuaccuucugcuucgcauccggccaaaauaucaccgaagaguucuaccaaucaaccugcuccgccgucagcaaaggauaccucggcgcccuccgaaccggaugguacacuucugucaucacaaucgaacucuccaacaucaaagaaaacaaaugcaacgguaccgacgcgaaagucaaacucaucaaacaagaacuagacaaguacaaaaacgccgucaccgaacugcaacuccucaugcaauccacaccagcaacgggaucaggauccgccaucugcucaggcgucgccgucugcaaaguccugcaccuagaaggagaaguaaacaaaauuaaauccgcccuacucuccaccaacaaagcagucgucucacuauccaacggcgucuccguccucaccuuuaagguccucgaccucaaaaauuauauagacaaacaacuccuccccauccuaaacaaacaaucaugcuccauccccaacauagaaaccgucaucgaauuucaacagaaaaacaaccgacucuuagaaauuacccgcgaguucagcgucaacgccggagucaccacacccgucucaaccuacaugcucaccaacucagaacuccucucacuaaucaaugauaugcccaucacaaacgaccaaaagaaacucauguccaacaacguacaaaucguucgccaacaaagcuacuccaucauguguaucauuaaagaagaaguccucgccuacgucguccaacuuccgcucuacggcguaaucgacacccccugcuggaaacuucacaccucgccccucugcaccacaaacaccaaagaaggcuccaacaucugccuaacccgcaccgaccgcggcugguacugcgacaacgccggcuccgucucauuuuucccccaggcggagaccugcaaaguccaauccaaccgcgucuucugcgacaccaugaacucucuuacccucccaucagaaguaaaccucugcaacgucgacaucuuuaaccccaaauacgauugcaagauaaugaccuccaaaacagacgucucaucguccgucaucaccucccuaggagcuaucgucuccugcuacggcaagaccaaaugcaccgcuuccaacaaaaaccgcggcaucaucaaaaccuucuccaacgggugcgacuacgucucuaacaaaggcguggacacaguauccguaggaaacacacuguacugcguaaacaaacaagagggccaaucgcuuuacgucaaaggcgagccaauuaucaacuucuacgacccgcucgucuucccaucagacgaguucgacgcauccaucucccaagucaacgagaaaaucaaucagucccucgccuucauacgcaaauccgacgaacuccuacauaacguaaacgccggcaaaucuaccacaaacaucaugaucacaaccaucaucaucguaaucaucgucauccuucucucgcucaucgccguaggacugcuacuuuacugcaaggcccgcuaaggacuagugaagggaacacccaaauuuaauucagccuuaagcacaauuaauuaagagugaaacguaauuguacaagcaguuggucacccaccauagggcaugaucaacaccgcaaccuuuccuuuuucccccagugauucugaaaaaccccucuucccuucagcuugcuuagauguuccaaauuuaguaagcuuaaggcggccuacagaagaaaaagaaaaaaaaggccacaaaaguucccucucacuuucaguaaauaaaauaaaagcagcaacagaaauaaagaaauaaaugaaauucaaaaugaaauaaauauuguguugugcagcauuaaaaaaucaauaaaaauuaaaaaugagcaagaucuaaaaaaaaaaaaaaaaaaaaaaaaaaaaaaaaaaaaaaaaaaaaaaaaaaaaaaaaaaaaaaaaugcaucccccccccccccccccccccccccccccccaaaggcucuuuucagagccaccagaauu

SEQ ID NO: 2158 - RNA, 1897 nt, Artificial Sequence
  mRNA product Design d-4 comprising derived and/or modified sequence from HRSV(A2)__F-del_DSCav1_mut1 (opt1)
gggagagucccgcagucggcguccagcggcucugcuuguucgugugugugucguugcaggccuuauucaagcuuaccauggagcugcucauccugaaggccaacgccaucaccaccauccugacggcggugaccuucugcuucgccagcggccagaacaucaccgaggaguucuaccaguccacgugcagcgccgucuccaagggguaccucggcgcccugcggaccggcugguacaccuccgugaucaccaucgagcugagcaacaucaaggagaacaagugcaacgggaccgacgccaaggugaagcucaucaagcaggagcuggacaaguacaagaacgcggucacggagcugcagcuccugaugcaguccaccccggcaaccggcuccggcuccgccaucugcagcggcgucgccgugugcaaggugcugcaccucgagggggaggucaacaagaucaagagcgcccugcuguccaccaacaaggccguggugagccucuccaacggcgucagcgugcugaccuucaaggugcuggaccucaagaacuacaucgacaagcagcugcugcccauccugaacaagcagagcugcuccauccccaacaucgagacggugaucgaguuccagcagaagaacaaccggcuccuggagaucacccgcgaguucagcgugaacgccggggucaccacccccguguccacguacaugcugaccaacagcgagcuccugucccugaucaacgacaugccgaucaccaacgaccagaagaagcucaugagcaacaacgugcagaucguccggcagcaguccuacagcaucaugugcaucaucaaggaggaggugcuggcguacgugguccagcugccccucuacggcgugaucgacacccccugcuggaagcugcacacgagcccccugugcaccaccaacaccaaggagggguccaacaucugccucacgcgcaccgaccggggcugguacugcgacaacgccggcagcgucuccuucuucccgcaggccgagaccugcaaggugcagagcaaccgcguguucugcgacaccaugaacucccugacgcugcccagcgagguaaaccucugcaacgucgacaucuucaaccccaaguacgacugcaagaucaugaccuccaagaccgacgugagcuccagcgugaucaccucccugggggccaucgucagcugcuacggcaagacgaagugcaccgccagcaacaagaaccgggggaucaucaagaccuucuccaacggcugcgacuacgugagcaacaagggcguggacaccguguccgucgggaacacccuguacugcgugaacaagcaggagggccagagccucuacgugaagggggagcccaucaucaacuucuacgacccgcuggucuuccccuccgacgaguucgacgcgagcaucucccaggugaacgagaagaucaaccagagccuggccuucauccgcaaguccgacgagcugcuccacaacgugaacgccggcaagagcacgaccaacaucaugaucaccaccaucaucaucgucaucaucgugauccugcugucccucaucgccguggggcugcugcucuacugcaaggcccggugaggacuaguggaagcauuuuccuggcugauuaaaagaaauuacucagcuauggucaucuguuccuguuagaaggcuaugcagcauauuauauacuaugcgcauguuaugaaaugcauaauaaaaaauuuuaaaaaaucuaaaagaucuaaaaaaaaaaaaaaaaaaaaaaaaaaaaaaaaaaaaaaaaaaaaaaaaaaaaaaaaaaaaaaaaugcaucccccccccccccccccccccccccccccccaaaggcucuuuucagagccaccagaauu

SEQ ID NO: 2159 - RNA, 1897 nt, Artificial Sequence
  mRNA product Design d-4 comprising derived and/or modified sequence from HRSV(A2)__F-del_DSCav1_mut1 (opt1)
gggagagucccgcagucggcguccagcggcucugcuuguucgugugugugucguugcaggccuuauucaagcuuaccauggagcugcucauccugaaggccaacgccaucaccaccauccugacggcggugaccuucugcuucgccagcggccagaacaucaccgaggaguucuaccaguccacgugcagcgccgucuccaagggguaccucggcgcccugcgcaccgggugguacaccagcgugaucaccaucgagcuguccaacaucaaggagaacaagugcaacggcaccgacgccaaggugaagcucaucaagcaggagcuggacaaguacaagaacgcggucacggagcugcagcuccugaugcagagcacccccgccaccggguccggcagcgccaucugcuccggcguggccgugugcaagguccugcaccucgagggggaggugaacaagaucaagagcgcgcugcuguccaccaacaaggccguggucagccucuccaacggcgugagcgugcugacguucaagguccuggaccucaagaacuacaucgacaagcagcugcugccgauccucaacaagcaguccugcagcauccccaacaucgagaccgugaucgaguuccagcagaagaacaaccggcugcuggagaucacccgcgaguucuccgugaacgccggggucaccacgcccgugagcaccuacaugcucaccaacuccgagcugcugagccucaucaacgacaugcccaucaccaacgaccagaagaagcugaugagcaacaacgugcagaucguccggcagcaguccuacagcaucaugugcaucaucaaggaggaggugcuggccuacgugguccagcucccgcuguacggcgugaucgacacgcccugcuggaagcugcacaccagcccccucugcaccaccaacacgaaggagggguccaacaucugccugacccgcaccgaccggggcugguacugcgacaacgccggcuccgugagcuucuucccccaggcggagaccugcaagguccaguccaaccgcguguucugcgacacgaugaacagccugacccucccguccgaggucaaccugugcaacguggacaucuucaaccccaaguacgacugcaagaucaugaccagcaagaccgacguguccagcuccgucaucacgagccugggggccaucguguccugcuacggcaagaccaagugcaccgccagcaacaagaaccgggggaucaucaagaccuucuccaacggcugcgacuacgugagcaacaagggcgucgacacgguguccguggggaacacccucuacugcgucaacaagcaggagggccagagccuguacgugaagggggagcccaucaucaacuucuacgacccccugguguucccgagcgacgaguucgacgccuccaucagccaggucaacgagaagaucaaccagucccucgccuucauccgcaagagcgacgagcugcugcacaacgugaacgcgggcaaguccaccaccaacaucaugaucaccacgaucaucaucgugaucaucgucauccuccugagccugaucgccguggggcuccugcuguacugcaaggcccggugaggacuaguggaagcauuuuccuggcugauuaaaagaaauuacucagcuauggucaucuguuccuguuagaaggcuaugcagcauauuauauacuaugcgcauguuaugaaaugcauaauaaaaaauuuuaaaaaaucuaaaagaucuaaaaaaaaaaaaaaaaaaaaaaaaaaaaaaaaaaaaaaaaaaaaaaaaaaaaaaaaaaaaaaaaugcaucccccccccccccccccccccccccccccccaaaggcucuuuucagagccaccagaauu

SEQ ID NO: 2160 - RNA, 1897 nt, Artificial Sequence
  mRNA product Design d-4 comprising derived and/or modified sequence from HRSV(A2)__F-del_DSCav1_mut1 (opt2)
gggagagucccgcagucggcguccagcggcucugcuuguucgugugugugucguugcaggccuuauucaagcuuaccauggagcuccucauccucaaggccaacgccaucaccaccauccucaccgccgucaccuucugcuucgccuccggccagaacaucaccgaggaguucuaccaguccaccugcuccgccgucuccaagggcuaccucggcgcccuccgcaccggcugguacaccuccgucaucaccaucgagcucuccaacaucaaggagaacaagugcaacggcaccgacgccaaggucaagcucaucaagcaggagcucgacaaguacaagaacgccgucaccgagcuccagcuccucaugcaguccacccccgccaccggcuccggcuccgccaucugcuccggcgucgccgucugcaagguccuccaccucgagggcgaggucaacaagaucaaguccgcccuccucuccaccaacaaggccgucgucucccucuccaacggcgucuccguccucaccuucaagguccucgaccucaagaacuacaucgacaagcagcuccuccccauccucaacaagcaguccugcuccauccccaacaucgagaccgucaucgaguuccagcagaagaacaaccgccuccucgagaucacccgcgaguucuccgucaacgccggcgucaccacccccgucuccaccuacaugcucaccaacuccgagcuccucucccucaucaacgacaugcccaucaccaacgaccagaagaagcucauguccaacaacguccagaucguccgccagcaguccuacuccaucaugugcaucaucaaggaggagguccucgccuacgucguccagcucccccucuacggcgucaucgacacccccugcuggaagcuccacaccuccccccucugcaccaccaacaccaaggagggcuccaacaucugccucacccgcaccgaccgcggcugguacugcgacaacgccggcuccgucuccuucuucccccaggccgagaccugcaagguccaguccaaccgcgucuucugcgacaccaugaacucccucacccuccccuccgaggucaaccucugcaacgucgacaucuucaaccccaaguacgacugcaagaucaugaccuccaagaccgacgucuccuccuccgucaucaccucccucggcgccaucgucuccugcuacggcaagaccaagugcaccgccuccaacaagaaccgcggcaucaucaagaccuucuccaacggcugcgacuacgucuccaacaagggcgucgacaccgucuccgucggcaacacccucuacugcgucaacaagcaggagggccagucccucuacgucaagggcgagcccaucaucaacuucuacgacccccucgucuuccccuccgacgaguucgacgccuccaucucccaggucaacgagaagaucaaccagucccucgccuucauccgcaaguccgacgagcuccuccacaacgucaacgccggcaaguccaccaccaacaucaugaucaccaccaucaucaucgucaucaucgucauccuccucucccucaucgccgucggccuccuccucuacugcaaggcccgcugaggacuaguggaagcauuuuccuggcugauuaaaagaaauuacucagcuauggucaucuguuccuguuagaaggcuaugcagcauauuauauacuaugcgcauguuaugaaaugcauaauaaaaaauuuuaaaaaaucuaaaagaucuaaaaaaaaaaaaaaaaaaaaaaaaaaaaaaaaaaaaaaaaaaaaaaaaaaaaaaaaaaaaaaaaugcaucccccccccccccccccccccccccccccccaaaggcucuuuucagagccaccagaauu

SEQ ID NO: 2161 - RNA, 1897 nt, Artificial Sequence
  mRNA product Design d-4 comprising derived and/or modified sequence from HRSV(A2)__F-del_DSCav1_mut1 (opt3)
gggagagucccgcagucggcguccagcggcucugcuuguucgugugugugucguugcaggccuuauucaagcuuaccauggagcugcucauccuuaaggccaacgcuauuaccacaauacugacugcagugacguucugcuuugccagcggccagaauaucaccgaagaguucuaccaauccacauguucugcggucucaaaaggguauuugggagcuuuaagaacugguugguacaccaguguuauuacaaucgaacugagcaacauuaaggagaauaaaugcaacggcaccgacgccaaggugaaacuaaucaagcaggaacucgauaaguauaaaaaugcaguaacugagcugcagcuucugaugcaguccacacccgccaccgggucuggaucggcuauauguucaggcguggcagucugcaagguguugcaccucgagggugaaguuaacaaaaucaagagcgcccugcugaguacgaauaaagcuguggucucccucucuaacggggugagcguauuaacuuuuaagguucuggaccuuaagaauuacauugauaaacaauugcugccuauccuaaacaagcaguccuguucaauuccaaauaucgagaccgugauagaguuccagcagaaaaacaauaggcuccuggaaauuacacgggaguuuagugucaacgccggagugacuaccccggugagcacauauaugcuuaccaauucugaacuguugucccucaucaacgacaugcccauuacgaacgaucaaaagaaacugaugucaaauaacguccagaucguucgccagcagagcuacaguaucaugugcauuauaaaggaggaaguguuagcguauguagugcaacugccucucuacggcgucaucgacacuccauguuggaaacuucauacaucuccccugugcaccacuaauacaaaggagggcuccaacauuuguuugacccgaacggaucgugggugguacugcgacaaugcaggaagcgugucguucuuuccucaggccgaaaccuguaagguucagucuaacagaguguucugcgauacaaugaacucccuaacucugccaucagaggucaaucucugcaauguggacaucuuuaaccccaaauaugauuguaagauaaugaccaguaaaacagacguaagcuccucuguuauuacuagccugggugcuaucgugucaugcuacggcaagaccaaauguacagccaguaauaagaacagggggaucauuaagaccuucuccaauggaugcgauuaugucagcaacaaaggcguggacacugucucuguggguaauacgcuuuacuguguuaacaagcaagaggggcagucacuguaugugaaaggagaaccuaucauuaacuuuuacgacccauugguauucccgagugaugaguuugacgcaagcauaucccaggucaaugaaaagaucaaccagucucucgcuuucauucggaaaucggaugagcuguuacacaaugugaacgccggcaagagcacaaccaauaucaugaucacuaccauuauaaucguuauuaucgugauucugcuaucccucaucgcggucggccugcuuuuguauugcaaggcccgcugaggacuaguggaagcauuuuccuggcugauuaaaagaaauuacucagcuauggucaucuguuccuguuagaaggcuaugcagcauauuauauacuaugcgcauguuaugaaaugcauaauaaaaaauuuuaaaaaaucuaaaagaucuaaaaaaaaaaaaaaaaaaaaaaaaaaaaaaaaaaaaaaaaaaaaaaaaaaaaaaaaaaaaaaaaugcaucccccccccccccccccccccccccccccccaaaggcucuuuucagagccaccagaauu

SEQ ID NO: 2162 - RNA, 1897 nt, Artificial Sequence
  mRNA product Design d-4 comprising derived and/or modified sequence from HRSV(A2)__F-del_DSCav1_mut1 (opt4)
gggagagucccgcagucggcguccagcggcucugcuuguucgugugugugucguugcaggccuuauucaagcuuaccauggagcugcugauccugaaggccaacgccaucaccaccauccugaccgccgugaccuucugcuucgccagcggccagaacaucaccgaggaguucuaccagagcaccugcagcgccgugagcaagggcuaccugggcgcccugagaaccggcugguacaccagcgugaucaccaucgagcugagcaacaucaaggagaacaagugcaacggcaccgacgccaaggugaagcugaucaagcaggagcuggacaaguacaagaacgccgugaccgagcugcagcugcugaugcagagcacccccgccaccggcagcggcagcgccaucugcagcggcguggccgugugcaaggugcugcaccuggagggcgaggugaacaagaucaagagcgcccugcugagcaccaacaaggccguggugagccugagcaacggcgugagcgugcugaccuucaaggugcuggaccugaagaacuacaucgacaagcagcugcugcccauccugaacaagcagagcugcagcauccccaacaucgagaccgugaucgaguuccagcagaagaacaacagacugcuggagaucaccagagaguucagcgugaacgccggcgugaccacccccgugagcaccuacaugcugaccaacagcgagcugcugagccugaucaacgacaugcccaucaccaacgaccagaagaagcugaugagcaacaacgugcagaucgugagacagcagagcuacagcaucaugugcaucaucaaggaggaggugcuggccuacguggugcagcugccccuguacggcgugaucgacacccccugcuggaagcugcacaccagcccccugugcaccaccaacaccaaggagggcagcaacaucugccugaccagaaccgacagaggcugguacugcgacaacgccggcagcgugagcuucuucccccaggccgagaccugcaaggugcagagcaacagaguguucugcgacaccaugaacagccugacccugcccagcgaggugaaccugugcaacguggacaucuucaaccccaaguacgacugcaagaucaugaccagcaagaccgacgugagcagcagcgugaucaccagccugggcgccaucgugagcugcuacggcaagaccaagugcaccgccagcaacaagaacagaggcaucaucaagaccuucagcaacggcugcgacuacgugagcaacaagggcguggacaccgugagcgugggcaacacccuguacugcgugaacaagcaggagggccagagccuguacgugaagggcgagcccaucaucaacuucuacgacccccugguguuccccagcgacgaguucgacgccagcaucagccaggugaacgagaagaucaaccagagccuggccuucaucagaaagagcgacgagcugcugcacaacgugaacgccggcaagagcaccaccaacaucaugaucaccaccaucaucaucgugaucaucgugauccugcugagccugaucgccgugggccugcugcuguacugcaaggccagaugaggacuaguggaagcauuuuccuggcugauuaaaagaaauuacucagcuauggucaucuguuccuguuagaaggcuaugcagcauauuauauacuaugcgcauguuaugaaaugcauaauaaaaaauuuuaaaaaaucuaaaagaucuaaaaaaaaaaaaaaaaaaaaaaaaaaaaaaaaaaaaaaaaaaaaaaaaaaaaaaaaaaaaaaaaugcaucccccccccccccccccccccccccccccccaaaggcucuuuucagagccaccagaauu

SEQ ID NO: 2163 - RNA, 1897 nt, Artificial Sequence
  mRNA product Design d-4 comprising derived and/or modified sequence from HRSV(A2)__F-del_DSCav1_mut1 (opt5)
gggagagucccgcagucggcguccagcggcucugcuuguucgugugugugucguugcaggccuuauucaagcuuaccauggagcugcucauccugaaggccaacgcuauuaccacaauccuuacggccgugaccuucugcuuugcgagcggccagaauauuacagaagaguucuaccaauccaccuguucugcugucagcaaaggguaucugggagcccucagaacaggcugguacaccuccguuaucacaauugaacugucuaacaucaaggagaauaaaugcaacgggaccgacgccaaggugaaacuuaucaagcaggaacuggauaaguauaaaaaugcugugacggagcuccagcugcugaugcagagcacccccgccacaggauccggcucugcuauuuguagcggggucgccgugugcaagguucuccaccuggagggagaagugaacaaaaucaaguccgcgcuucugagcaccaauaaagccgucgugucucucuccaacggcguuagcgugcugacauuuaagguccuugaccugaagaauuacauugauaaacaacuccugccuauccugaacaagcagucuuguuccauuccgaauaucgagaccgugauugaguuccagcagaaaaacaaucggcuccuggaaaucacgcgcgaguuuagcgugaacgcuggcgucacaacccccguuucuacauauaugcuuaccaauuccgaacugcucagccugaucaacgacaugccuauuaccaacgaucaaaagaaacuuauguccaauaacgugcagaucgugagacagcagucuuacagcauuaugugcaucauuaaggaggaaguccuggccuaugugguucaacucccccuguacggggugaucgacacaccuuguuggaaacugcauacgagcccccucugcaccacaaauaccaaggagggauccaacaucugucugacacggaccgaucgcggcugguacugcgacaaugcugggucugucuccuucuuuccucaggccgaaacguguaaggugcagagcaacagaguuuucugcgauacaaugaacucucuuacccugccgagcgaggugaaucucugcaaugucgacauuuuuaaccccaaauaugauuguaagaucaugaccuccaaaacagacgugucuagcuccgucauuaccagccugggagcgaucgugucuugcuacggcaagacaaaauguacggccuccaauaagaaccgggggauuaucaagaccuucagcaauggaugcgauuauguuucuaacaaaggcguggacacagucuccgugggcaauacccuuuacuguguuaacaagcaagaggggcagagccuguaugugaaaggagaaccuaucauuaacuuuuacgacccccucgucuucccuuccgaugaguuugacgcuucuaucagccaggugaaugaaaagauuaaccagucccuggccuucauccgcaaaucugaugagcugcuccacaaugugaacgcuggcaagagcacaaccaauauuaugaucacgaccauuaucaucguuauuaucgucauucugcuuucccugaucgccguggggcuccugcuguauugcaaggccagaugaggacuaguggaagcauuuuccuggcugauuaaaagaaauuacucagcuauggucaucuguuccuguuagaaggcuaugcagcauauuauauacuaugcgcauguuaugaaaugcauaauaaaaaauuuuaaaaaaucuaaaagaucuaaaaaaaaaaaaaaaaaaaaaaaaaaaaaaaaaaaaaaaaaaaaaaaaaaaaaaaaaaaaaaaaugcaucccccccccccccccccccccccccccccccaaaggcucuuuucagagccaccagaauu

SEQ ID NO: 2164 - RNA, 1897 nt, Artificial Sequence
  mRNA product Design d-4 comprising derived and/or modified sequence from HRSV(A2)__F-del_DSCav1_mut1 (opt6)
gggagagucccgcagucggcguccagcggcucugcuuguucgugugugugucguugcaggccuuauucaagcuuaccauggaacuacucaucuuaaaagcaaacgcaauaacaacuauucuaaccgcaguaacauuuuguuucgcaucaggacaaaacauaaccgaagaauuuuaccaaucaacauguuccgcaguuucaaaaggauacuuaggcgcacuaagaacaggcugguacaccuccgugauaacaauagaauuaucaaacauaaaagaaaacaaauguaauggaacugacgccaaaguaaaacuaauaaaacaagaacuagacaaauauaaaaacgcaguaacugaacuacaauuacuaaugcaauccaccccagcaacaggcucaggcucagcaauuugcuccggagucgcugucugcaaaguacuacaucuugaaggcgaagucaauaaaauaaaaucagcacuucuaucaacaaacaaagcaguagucucacuaucaaacggaguaucaguacuaacauuuaaaguauuagaucuaaaaaacuauauagauaaacaacuacuacccauacucaauaaacaauccuguucaauaccaaauauagaaaccguaauagaauuucaacaaaaaaacaaucgacuauuagaaaucacccgagaauuuucagucaaugcaggcguaacaacaccaguaucaaccuacauguuaaccaacuccgaacuacuaucccucauaaacgacaugccaauaacaaacgaucaaaaaaaacuaauguccaacaacguacaaauagucagacaacaaucuuauucaauaaugugcaucauaaaagaagaaguucuagccuacguaguucaacuuccauuauacggcguaauugauacaccaugcuggaaacuacacacauccccacuauguacaacaaacacaaaagaaggaucaaacaucugcuuaacuagaacagacagaggaugguacugcgacaacgcaggaucagucucauucuuuccacaagcagaaacaugcaagguccaaucaaacagaguauucugcgacacaaugaacuccuuaacacuaccaucugaaguaaaccuauguaauguagacauauuuaacccaaaauacgacugcaaaauaaugaccucaaaaacagacguauccucaucaguaauuacaagccucggagccauaguaucaugcuacggaaaaacaaaauguacagcaucaaacaaaaacagaggaauaauaaaaacguucuccaacggaugcgacuauguaucaaacaaaggcguagacacaguaucagucggaaauacccuuuacugcguaaacaaacaagaaggccaaagucuauacguaaaaggagagccaauaauaaacuuuuaugacccccuuguauucccaucugacgaauuugaugcaucaauaucccaagucaacgaaaaaaucaaccaaucauuagccuuuauuagaaaaagugacgaacuauuacacaacguuaaugcagggaaaucaacaacaaauauaaugauuacaaccauaauuauaguuaucauaguuauacuacucucacuaaucgcaguaggauuacuauuauacugcaaagcaagauaaggacuaguggaagcauuuuccuggcugauuaaaagaaauuacucagcuauggucaucuguuccuguuagaaggcuaugcagcauauuauauacuaugcgcauguuaugaaaugcauaauaaaaaauuuuaaaaaaucuaaaagaucuaaaaaaaaaaaaaaaaaaaaaaaaaaaaaaaaaaaaaaaaaaaaaaaaaaaaaaaaaaaaaaaaugcaucccccccccccccccccccccccccccccccaaaggcucuuuucagagccaccagaauu

SEQ ID NO: 2165 - RNA, 1897 nt, Artificial Sequence
  mRNA product Design d-4 comprising derived and/or modified sequence from HRSV(A2)__F-del_DSCav1_mut1 (opt11)
gggagagucccgcagucggcguccagcggcucugcuuguucgugugugugucguugcaggccuuauucaagcuuaccauggaacuacucauccuaaaagccaacgcaaucacaaccauacuuacagcuguuaccuucugcuucgcauccggccaaaauaucaccgaagaguucuaccaaucaaccugcuccgccgucagcaaaggauaccucggcgcccuccgaaccggaugguacacuucugucaucacaaucgaacucuccaacaucaaagaaaacaaaugcaacgguaccgacgcgaaagucaaacucaucaaacaagaacuagacaaguacaaaaacgccgucaccgaacugcaacuccucaugcaauccacaccagcaacgggaucaggauccgccaucugcucaggcgucgccgucugcaaaguccugcaccuagaaggagaaguaaacaaaauuaaauccgcccuacucuccaccaacaaagcagucgucucacuauccaacggcgucuccguccucaccuuuaagguccucgaccucaaaaauuauauagacaaacaacuccuccccauccuaaacaaacaaucaugcuccauccccaacauagaaaccgucaucgaauuucaacagaaaaacaaccgacucuuagaaauuacccgcgaguucagcgucaacgccggagucaccacacccgucucaaccuacaugcucaccaacucagaacuccucucacuaaucaaugauaugcccaucacaaacgaccaaaagaaacucauguccaacaacguacaaaucguucgccaacaaagcuacuccaucauguguaucauuaaagaagaaguccucgccuacgucguccaacuuccgcucuacggcguaaucgacacccccugcuggaaacuucacaccucgccccucugcaccacaaacaccaaagaaggcuccaacaucugccuaacccgcaccgaccgcggcugguacugcgacaacgccggcuccgucucauuuuucccccaggcggagaccugcaaaguccaauccaaccgcgucuucugcgacaccaugaacucucuuacccucccaucagaaguaaaccucugcaacgucgacaucuuuaaccccaaauacgauugcaagauaaugaccuccaaaacagacgucucaucguccgucaucaccucccuaggagcuaucgucuccugcuacggcaagaccaaaugcaccgcuuccaacaaaaaccgcggcaucaucaaaaccuucuccaacgggugcgacuacgucucuaacaaaggcguggacacaguauccguaggaaacacacuguacugcguaaacaaacaagagggccaaucgcuuuacgucaaaggcgagccaauuaucaacuucuacgacccgcucgucuucccaucagacgaguucgacgcauccaucucccaagucaacgagaaaaucaaucagucccucgccuucauacgcaaauccgacgaacuccuacauaacguaaacgccggcaaaucuaccacaaacaucaugaucacaaccaucaucaucguaaucaucgucauccuucucucgcucaucgccguaggacugcuacuuuacugcaaggcccgcuaaggacuaguggaagcauuuuccuggcugauuaaaagaaauuacucagcuauggucaucuguuccuguuagaaggcuaugcagcauauuauauacuaugcgcauguuaugaaaugcauaauaaaaaauuuuaaaaaaucuaaaagaucuaaaaaaaaaaaaaaaaaaaaaaaaaaaaaaaaaaaaaaaaaaaaaaaaaaaaaaaaaaaaaaaaugcaucccccccccccccccccccccccccccccccaaaggcucuuuucagagccaccagaauu

SEQ ID NO: 2166 - RNA, 1994 nt, Artificial Sequence
  mRNA product Design d-5 comprising derived and/or modified sequence from HRSV(A2)__F-del_DSCav1_mut1 (opt1)
gggagagggcgcuuggcuugcaaggacccugagcugcggcauugaagcacacccaacccaacucgacugaagucagccucacugaaccggaucugagaaucuucucucucugggcuugccagggcucuccgaaccuagcuagcauccucuucaauuccaacuagaaagcuuaccauggagcugcucauccugaaggccaacgccaucaccaccauccugacggcggugaccuucugcuucgccagcggccagaacaucaccgaggaguucuaccaguccacgugcagcgccgucuccaagggguaccucggcgcccugcggaccggcugguacaccuccgugaucaccaucgagcugagcaacaucaaggagaacaagugcaacgggaccgacgccaaggugaagcucaucaagcaggagcuggacaaguacaagaacgcggucacggagcugcagcuccugaugcaguccaccccggcaaccggcuccggcuccgccaucugcagcggcgucgccgugugcaaggugcugcaccucgagggggaggucaacaagaucaagagcgcccugcuguccaccaacaaggccguggugagccucuccaacggcgucagcgugcugaccuucaaggugcuggaccucaagaacuacaucgacaagcagcugcugcccauccugaacaagcagagcugcuccauccccaacaucgagacggugaucgaguuccagcagaagaacaaccggcuccuggagaucacccgcgaguucagcgugaacgccggggucaccacccccguguccacguacaugcugaccaacagcgagcuccugucccugaucaacgacaugccgaucaccaacgaccagaagaagcucaugagcaacaacgugcagaucguccggcagcaguccuacagcaucaugugcaucaucaaggaggaggugcuggcguacgugguccagcugccccucuacggcgugaucgacacccccugcuggaagcugcacacgagcccccugugcaccaccaacaccaaggagggguccaacaucugccucacgcgcaccgaccggggcugguacugcgacaacgccggcagcgucuccuucuucccgcaggccgagaccugcaaggugcagagcaaccgcguguucugcgacaccaugaacucccugacgcugcccagcgagguaaaccucugcaacgucgacaucuucaaccccaaguacgacugcaagaucaugaccuccaagaccgacgugagcuccagcgugaucaccucccugggggccaucgucagcugcuacggcaagacgaagugcaccgccagcaacaagaaccgggggaucaucaagaccuucuccaacggcugcgacuacgugagcaacaagggcguggacaccguguccgucgggaacacccuguacugcgugaacaagcaggagggccagagccucuacgugaagggggagcccaucaucaacuucuacgacccgcuggucuuccccuccgacgaguucgacgcgagcaucucccaggugaacgagaagaucaaccagagccuggccuucauccgcaaguccgacgagcugcuccacaacgugaacgccggcaagagcacgaccaacaucaugaucaccaccaucaucaucgucaucaucgugauccugcugucccucaucgccguggggcugcugcucuacugcaaggcccggugaggacuaguggaagcauuuuccuggcugauuaaaagaaauuacucagcuauggucaucuguuccuguuagaaggcuaugcagcauauuauauacuaugcgcauguuaugaaaugcauaauaaaaaauuuuaaaaaaucuaaaagaucuaaaaaaaaaaaaaaaaaaaaaaaaaaaaaaaaaaaaaaaaaaaaaaaaaaaaaaaaaaaaaaaaugcaucccccccccccccccccccccccccccccccaaaggcucuuuucagagccaccagaauu

SEQ ID NO: 2167 - RNA, 1994 nt, Artificial Sequence
  mRNA product Design d-5 comprising derived and/or modified sequence from HRSV(A2)__F-del_DSCav1_mut1 (opt1)
gggagagggcgcuuggcuugcaaggacccugagcugcggcauugaagcacacccaacccaacucgacugaagucagccucacugaaccggaucugagaaucuucucucucugggcuugccagggcucuccgaaccuagcuagcauccucuucaauuccaacuagaaagcuuaccauggagcugcucauccugaaggccaacgccaucaccaccauccugacggcggugaccuucugcuucgccagcggccagaacaucaccgaggaguucuaccaguccacgugcagcgccgucuccaagggguaccucggcgcccugcgcaccgggugguacaccagcgugaucaccaucgagcuguccaacaucaaggagaacaagugcaacggcaccgacgccaaggugaagcucaucaagcaggagcuggacaaguacaagaacgcggucacggagcugcagcuccugaugcagagcacccccgccaccggguccggcagcgccaucugcuccggcguggccgugugcaagguccugcaccucgagggggaggugaacaagaucaagagcgcgcugcuguccaccaacaaggccguggucagccucuccaacggcgugagcgugcugacguucaagguccuggaccucaagaacuacaucgacaagcagcugcugccgauccucaacaagcaguccugcagcauccccaacaucgagaccgugaucgaguuccagcagaagaacaaccggcugcuggagaucacccgcgaguucuccgugaacgccggggucaccacgcccgugagcaccuacaugcucaccaacuccgagcugcugagccucaucaacgacaugcccaucaccaacgaccagaagaagcugaugagcaacaacgugcagaucguccggcagcaguccuacagcaucaugugcaucaucaaggaggaggugcuggccuacgugguccagcucccgcuguacggcgugaucgacacgcccugcuggaagcugcacaccagcccccucugcaccaccaacacgaaggagggguccaacaucugccugacccgcaccgaccggggcugguacugcgacaacgccggcuccgugagcuucuucccccaggcggagaccugcaagguccaguccaaccgcguguucugcgacacgaugaacagccugacccucccguccgaggucaaccugugcaacguggacaucuucaaccccaaguacgacugcaagaucaugaccagcaagaccgacguguccagcuccgucaucacgagccugggggccaucguguccugcuacggcaagaccaagugcaccgccagcaacaagaaccgggggaucaucaagaccuucuccaacggcugcgacuacgugagcaacaagggcgucgacacgguguccguggggaacacccucuacugcgucaacaagcaggagggccagagccuguacgugaagggggagcccaucaucaacuucuacgacccccugguguucccgagcgacgaguucgacgccuccaucagccaggucaacgagaagaucaaccagucccucgccuucauccgcaagagcgacgagcugcugcacaacgugaacgcgggcaaguccaccaccaacaucaugaucaccacgaucaucaucgugaucaucgucauccuccugagccugaucgccguggggcuccugcuguacugcaaggcccggugaggacuaguggaagcauuuuccuggcugauuaaaagaaauuacucagcuauggucaucuguuccuguuagaaggcuaugcagcauauuauauacuaugcgcauguuaugaaaugcauaauaaaaaauuuuaaaaaaucuaaaagaucuaaaaaaaaaaaaaaaaaaaaaaaaaaaaaaaaaaaaaaaaaaaaaaaaaaaaaaaaaaaaaaaaugcaucccccccccccccccccccccccccccccccaaaggcucuuuucagagccaccagaauu

SEQ ID NO: 2168 - RNA, 1994 nt, Artificial Sequence
  mRNA product Design d-5 comprising derived and/or modified sequence from HRSV(A2)__F-del_DSCav1_mut1 (opt2)
gggagagggcgcuuggcuugcaaggacccugagcugcggcauugaagcacacccaacccaacucgacugaagucagccucacugaaccggaucugagaaucuucucucucugggcuugccagggcucuccgaaccuagcuagcauccucuucaauuccaacuagaaagcuuaccauggagcuccucauccucaaggccaacgccaucaccaccauccucaccgccgucaccuucugcuucgccuccggccagaacaucaccgaggaguucuaccaguccaccugcuccgccgucuccaagggcuaccucggcgcccuccgcaccggcugguacaccuccgucaucaccaucgagcucuccaacaucaaggagaacaagugcaacggcaccgacgccaaggucaagcucaucaagcaggagcucgacaaguacaagaacgccgucaccgagcuccagcuccucaugcaguccacccccgccaccggcuccggcuccgccaucugcuccggcgucgccgucugcaagguccuccaccucgagggcgaggucaacaagaucaaguccgcccuccucuccaccaacaaggccgucgucucccucuccaacggcgucuccguccucaccuucaagguccucgaccucaagaacuacaucgacaagcagcuccuccccauccucaacaagcaguccugcuccauccccaacaucgagaccgucaucgaguuccagcagaagaacaaccgccuccucgagaucacccgcgaguucuccgucaacgccggcgucaccacccccgucuccaccuacaugcucaccaacuccgagcuccucucccucaucaacgacaugcccaucaccaacgaccagaagaagcucauguccaacaacguccagaucguccgccagcaguccuacuccaucaugugcaucaucaaggaggagguccucgccuacgucguccagcucccccucuacggcgucaucgacacccccugcuggaagcuccacaccuccccccucugcaccaccaacaccaaggagggcuccaacaucugccucacccgcaccgaccgcggcugguacugcgacaacgccggcuccgucuccuucuucccccaggccgagaccugcaagguccaguccaaccgcgucuucugcgacaccaugaacucccucacccuccccuccgaggucaaccucugcaacgucgacaucuucaaccccaaguacgacugcaagaucaugaccuccaagaccgacgucuccuccuccgucaucaccucccucggcgccaucgucuccugcuacggcaagaccaagugcaccgccuccaacaagaaccgcggcaucaucaagaccuucuccaacggcugcgacuacgucuccaacaagggcgucgacaccgucuccgucggcaacacccucuacugcgucaacaagcaggagggccagucccucuacgucaagggcgagcccaucaucaacuucuacgacccccucgucuuccccuccgacgaguucgacgccuccaucucccaggucaacgagaagaucaaccagucccucgccuucauccgcaaguccgacgagcuccuccacaacgucaacgccggcaaguccaccaccaacaucaugaucaccaccaucaucaucgucaucaucgucauccuccucucccucaucgccgucggccuccuccucuacugcaaggcccgcugaggacuaguggaagcauuuuccuggcugauuaaaagaaauuacucagcuauggucaucuguuccuguuagaaggcuaugcagcauauuauauacuaugcgcauguuaugaaaugcauaauaaaaaauuuuaaaaaaucuaaaagaucuaaaaaaaaaaaaaaaaaaaaaaaaaaaaaaaaaaaaaaaaaaaaaaaaaaaaaaaaaaaaaaaaugcaucccccccccccccccccccccccccccccccaaaggcucuuuucagagccaccagaauu

SEQ ID NO: 2169 - RNA, 1994 nt, Artificial Sequence
  mRNA product Design d-5 comprising derived and/or modified sequence from HRSV(A2)__F-del_DSCav1_mut1 (opt3)
gggagagggcgcuuggcuugcaaggacccugagcugcggcauugaagcacacccaacccaacucgacugaagucagccucacugaaccggaucugagaaucuucucucucugggcuugccagggcucuccgaaccuagcuagcauccucuucaauuccaacuagaaagcuuaccauggagcugcucauccuuaaggccaacgcuauuaccacaauacugacugcagugacguucugcuuugccagcggccagaauaucaccgaagaguucuaccaauccacauguucugcggucucaaaaggguauuugggagcuuuaagaacugguugguacaccaguguuauuacaaucgaacugagcaacauuaaggagaauaaaugcaacggcaccgacgccaaggugaaacuaaucaagcaggaacucgauaaguauaaaaaugcaguaacugagcugcagcuucugaugcaguccacacccgccaccgggucuggaucggcuauauguucaggcguggcagucugcaagguguugcaccucgagggugaaguuaacaaaaucaagagcgcccugcugaguacgaauaaagcuguggucucccucucuaacggggugagcguauuaacuuuuaagguucuggaccuuaagaauuacauugauaaacaauugcugccuauccuaaacaagcaguccuguucaauuccaaauaucgagaccgugauagaguuccagcagaaaaacaauaggcuccuggaaauuacacgggaguuuagugucaacgccggagugacuaccccggugagcacauauaugcuuaccaauucugaacuguugucccucaucaacgacaugcccauuacgaacgaucaaaagaaacugaugucaaauaacguccagaucguucgccagcagagcuacaguaucaugugcauuauaaaggaggaaguguuagcguauguagugcaacugccucucuacggcgucaucgacacuccauguuggaaacuucauacaucuccccugugcaccacuaauacaaaggagggcuccaacauuuguuugacccgaacggaucgugggugguacugcgacaaugcaggaagcgugucguucuuuccucaggccgaaaccuguaagguucagucuaacagaguguucugcgauacaaugaacucccuaacucugccaucagaggucaaucucugcaauguggacaucuuuaaccccaaauaugauuguaagauaaugaccaguaaaacagacguaagcuccucuguuauuacuagccugggugcuaucgugucaugcuacggcaagaccaaauguacagccaguaauaagaacagggggaucauuaagaccuucuccaauggaugcgauuaugucagcaacaaaggcguggacacugucucuguggguaauacgcuuuacuguguuaacaagcaagaggggcagucacuguaugugaaaggagaaccuaucauuaacuuuuacgacccauugguauucccgagugaugaguuugacgcaagcauaucccaggucaaugaaaagaucaaccagucucucgcuuucauucggaaaucggaugagcuguuacacaaugugaacgccggcaagagcacaaccaauaucaugaucacuaccauuauaaucguuauuaucgugauucugcuaucccucaucgcggucggccugcuuuuguauugcaaggcccgcugaggacuaguggaagcauuuuccuggcugauuaaaagaaauuacucagcuauggucaucuguuccuguuagaaggcuaugcagcauauuauauacuaugcgcauguuaugaaaugcauaauaaaaaauuuuaaaaaaucuaaaagaucuaaaaaaaaaaaaaaaaaaaaaaaaaaaaaaaaaaaaaaaaaaaaaaaaaaaaaaaaaaaaaaaaugcaucccccccccccccccccccccccccccccccaaaggcucuuuucagagccaccagaauu

SEQ ID NO: 2170 - RNA, 1994 nt, Artificial Sequence
  mRNA product Design d-5 comprising derived and/or modified sequence from HRSV(A2)__F-del_DSCav1_mut1 (opt4)
gggagagggcgcuuggcuugcaaggacccugagcugcggcauugaagcacacccaacccaacucgacugaagucagccucacugaaccggaucugagaaucuucucucucugggcuugccagggcucuccgaaccuagcuagcauccucuucaauuccaacuagaaagcuuaccauggagcugcugauccugaaggccaacgccaucaccaccauccugaccgccgugaccuucugcuucgccagcggccagaacaucaccgaggaguucuaccagagcaccugcagcgccgugagcaagggcuaccugggcgcccugagaaccggcugguacaccagcgugaucaccaucgagcugagcaacaucaaggagaacaagugcaacggcaccgacgccaaggugaagcugaucaagcaggagcuggacaaguacaagaacgccgugaccgagcugcagcugcugaugcagagcacccccgccaccggcagcggcagcgccaucugcagcggcguggccgugugcaaggugcugcaccuggagggcgaggugaacaagaucaagagcgcccugcugagcaccaacaaggccguggugagccugagcaacggcgugagcgugcugaccuucaaggugcuggaccugaagaacuacaucgacaagcagcugcugcccauccugaacaagcagagcugcagcauccccaacaucgagaccgugaucgaguuccagcagaagaacaacagacugcuggagaucaccagagaguucagcgugaacgccggcgugaccacccccgugagcaccuacaugcugaccaacagcgagcugcugagccugaucaacgacaugcccaucaccaacgaccagaagaagcugaugagcaacaacgugcagaucgugagacagcagagcuacagcaucaugugcaucaucaaggaggaggugcuggccuacguggugcagcugccccuguacggcgugaucgacacccccugcuggaagcugcacaccagcccccugugcaccaccaacaccaaggagggcagcaacaucugccugaccagaaccgacagaggcugguacugcgacaacgccggcagcgugagcuucuucccccaggccgagaccugcaaggugcagagcaacagaguguucugcgacaccaugaacagccugacccugcccagcgaggugaaccugugcaacguggacaucuucaaccccaaguacgacugcaagaucaugaccagcaagaccgacgugagcagcagcgugaucaccagccugggcgccaucgugagcugcuacggcaagaccaagugcaccgccagcaacaagaacagaggcaucaucaagaccuucagcaacggcugcgacuacgugagcaacaagggcguggacaccgugagcgugggcaacacccuguacugcgugaacaagcaggagggccagagccuguacgugaagggcgagcccaucaucaacuucuacgacccccugguguuccccagcgacgaguucgacgccagcaucagccaggugaacgagaagaucaaccagagccuggccuucaucagaaagagcgacgagcugcugcacaacgugaacgccggcaagagcaccaccaacaucaugaucaccaccaucaucaucgugaucaucgugauccugcugagccugaucgccgugggccugcugcuguacugcaaggccagaugaggacuaguggaagcauuuuccuggcugauuaaaagaaauuacucagcuauggucaucuguuccuguuagaaggcuaugcagcauauuauauacuaugcgcauguuaugaaaugcauaauaaaaaauuuuaaaaaaucuaaaagaucuaaaaaaaaaaaaaaaaaaaaaaaaaaaaaaaaaaaaaaaaaaaaaaaaaaaaaaaaaaaaaaaaugcaucccccccccccccccccccccccccccccccaaaggcucuuuucagagccaccagaauu

SEQ ID NO: 2171 - RNA, 1994 nt, Artificial Sequence
  mRNA product Design d-5 comprising derived and/or modified sequence from HRSV(A2)__F-del_DSCav1_mut1 (opt5)
gggagagggcgcuuggcuugcaaggacccugagcugcggcauugaagcacacccaacccaacucgacugaagucagccucacugaaccggaucugagaaucuucucucucugggcuugccagggcucuccgaaccuagcuagcauccucuucaauuccaacuagaaagcuuaccauggagcugcucauccugaaggccaacgcuauuaccacaauccuuacggccgugaccuucugcuuugcgagcggccagaauauuacagaagaguucuaccaauccaccuguucugcugucagcaaaggguaucugggagcccucagaacaggcugguacaccuccguuaucacaauugaacugucuaacaucaaggagaauaaaugcaacgggaccgacgccaaggugaaacuuaucaagcaggaacuggauaaguauaaaaaugcugugacggagcuccagcugcugaugcagagcacccccgccacaggauccggcucugcuauuuguagcggggucgccgugugcaagguucuccaccuggagggagaagugaacaaaaucaaguccgcgcuucugagcaccaauaaagccgucgugucucucuccaacggcguuagcgugcugacauuuaagguccuugaccugaagaauuacauugauaaacaacuccugccuauccugaacaagcagucuuguuccauuccgaauaucgagaccgugauugaguuccagcagaaaaacaaucggcuccuggaaaucacgcgcgaguuuagcgugaacgcuggcgucacaacccccguuucuacauauaugcuuaccaauuccgaacugcucagccugaucaacgacaugccuauuaccaacgaucaaaagaaacuuauguccaauaacgugcagaucgugagacagcagucuuacagcauuaugugcaucauuaaggaggaaguccuggccuaugugguucaacucccccuguacggggugaucgacacaccuuguuggaaacugcauacgagcccccucugcaccacaaauaccaaggagggauccaacaucugucugacacggaccgaucgcggcugguacugcgacaaugcugggucugucuccuucuuuccucaggccgaaacguguaaggugcagagcaacagaguuuucugcgauacaaugaacucucuuacccugccgagcgaggugaaucucugcaaugucgacauuuuuaaccccaaauaugauuguaagaucaugaccuccaaaacagacgugucuagcuccgucauuaccagccugggagcgaucgugucuugcuacggcaagacaaaauguacggccuccaauaagaaccgggggauuaucaagaccuucagcaauggaugcgauuauguuucuaacaaaggcguggacacagucuccgugggcaauacccuuuacuguguuaacaagcaagaggggcagagccuguaugugaaaggagaaccuaucauuaacuuuuacgacccccucgucuucccuuccgaugaguuugacgcuucuaucagccaggugaaugaaaagauuaaccagucccuggccuucauccgcaaaucugaugagcugcuccacaaugugaacgcuggcaagagcacaaccaauauuaugaucacgaccauuaucaucguuauuaucgucauucugcuuucccugaucgccguggggcuccugcuguauugcaaggccagaugaggacuaguggaagcauuuuccuggcugauuaaaagaaauuacucagcuauggucaucuguuccuguuagaaggcuaugcagcauauuauauacuaugcgcauguuaugaaaugcauaauaaaaaauuuuaaaaaaucuaaaagaucuaaaaaaaaaaaaaaaaaaaaaaaaaaaaaaaaaaaaaaaaaaaaaaaaaaaaaaaaaaaaaaaaugcaucccccccccccccccccccccccccccccccaaaggcucuuuucagagccaccagaauu

SEQ ID NO: 2172 - RNA, 1994 nt, Artificial Sequence
  mRNA product Design d-5 comprising derived and/or modified sequence from HRSV(A2)__F-del_DSCav1_mut1 (opt6)
gggagagggcgcuuggcuugcaaggacccugagcugcggcauugaagcacacccaacccaacucgacugaagucagccucacugaaccggaucugagaaucuucucucucugggcuugccagggcucuccgaaccuagcuagcauccucuucaauuccaacuagaaagcuuaccauggaacuacucaucuuaaaagcaaacgcaauaacaacuauucuaaccgcaguaacauuuuguuucgcaucaggacaaaacauaaccgaagaauuuuaccaaucaacauguuccgcaguuucaaaaggauacuuaggcgcacuaagaacaggcugguacaccuccgugauaacaauagaauuaucaaacauaaaagaaaacaaauguaauggaacugacgccaaaguaaaacuaauaaaacaagaacuagacaaauauaaaaacgcaguaacugaacuacaauuacuaaugcaauccaccccagcaacaggcucaggcucagcaauuugcuccggagucgcugucugcaaaguacuacaucuugaaggcgaagucaauaaaauaaaaucagcacuucuaucaacaaacaaagcaguagucucacuaucaaacggaguaucaguacuaacauuuaaaguauuagaucuaaaaaacuauauagauaaacaacuacuacccauacucaauaaacaauccuguucaauaccaaauauagaaaccguaauagaauuucaacaaaaaaacaaucgacuauuagaaaucacccgagaauuuucagucaaugcaggcguaacaacaccaguaucaaccuacauguuaaccaacuccgaacuacuaucccucauaaacgacaugccaauaacaaacgaucaaaaaaaacuaauguccaacaacguacaaauagucagacaacaaucuuauucaauaaugugcaucauaaaagaagaaguucuagccuacguaguucaacuuccauuauacggcguaauugauacaccaugcuggaaacuacacacauccccacuauguacaacaaacacaaaagaaggaucaaacaucugcuuaacuagaacagacagaggaugguacugcgacaacgcaggaucagucucauucuuuccacaagcagaaacaugcaagguccaaucaaacagaguauucugcgacacaaugaacuccuuaacacuaccaucugaaguaaaccuauguaauguagacauauuuaacccaaaauacgacugcaaaauaaugaccucaaaaacagacguauccucaucaguaauuacaagccucggagccauaguaucaugcuacggaaaaacaaaauguacagcaucaaacaaaaacagaggaauaauaaaaacguucuccaacggaugcgacuauguaucaaacaaaggcguagacacaguaucagucggaaauacccuuuacugcguaaacaaacaagaaggccaaagucuauacguaaaaggagagccaauaauaaacuuuuaugacccccuuguauucccaucugacgaauuugaugcaucaauaucccaagucaacgaaaaaaucaaccaaucauuagccuuuauuagaaaaagugacgaacuauuacacaacguuaaugcagggaaaucaacaacaaauauaaugauuacaaccauaauuauaguuaucauaguuauacuacucucacuaaucgcaguaggauuacuauuauacugcaaagcaagauaaggacuaguggaagcauuuuccuggcugauuaaaagaaauuacucagcuauggucaucuguuccuguuagaaggcuaugcagcauauuauauacuaugcgcauguuaugaaaugcauaauaaaaaauuuuaaaaaaucuaaaagaucuaaaaaaaaaaaaaaaaaaaaaaaaaaaaaaaaaaaaaaaaaaaaaaaaaaaaaaaaaaaaaaaaugcaucccccccccccccccccccccccccccccccaaaggcucuuuucagagccaccagaauu

SEQ ID NO: 2173 - RNA, 1994 nt, Artificial Sequence
  mRNA product Design d-5 comprising derived and/or modified sequence from HRSV(A2)__F-del_DSCav1_mut1 (opt11)
gggagagggcgcuuggcuugcaaggacccugagcugcggcauugaagcacacccaacccaacucgacugaagucagccucacugaaccggaucugagaaucuucucucucugggcuugccagggcucuccgaaccuagcuagcauccucuucaauuccaacuagaaagcuuaccauggaacuacucauccuaaaagccaacgcaaucacaaccauacuuacagcuguuaccuucugcuucgcauccggccaaaauaucaccgaagaguucuaccaaucaaccugcuccgccgucagcaaaggauaccucggcgcccuccgaaccggaugguacacuucugucaucacaaucgaacucuccaacaucaaagaaaacaaaugcaacgguaccgacgcgaaagucaaacucaucaaacaagaacuagacaaguacaaaaacgccgucaccgaacugcaacuccucaugcaauccacaccagcaacgggaucaggauccgccaucugcucaggcgucgccgucugcaaaguccugcaccuagaaggagaaguaaacaaaauuaaauccgcccuacucuccaccaacaaagcagucgucucacuauccaacggcgucuccguccucaccuuuaagguccucgaccucaaaaauuauauagacaaacaacuccuccccauccuaaacaaacaaucaugcuccauccccaacauagaaaccgucaucgaauuucaacagaaaaacaaccgacucuuagaaauuacccgcgaguucagcgucaacgccggagucaccacacccgucucaaccuacaugcucaccaacucagaacuccucucacuaaucaaugauaugcccaucacaaacgaccaaaagaaacucauguccaacaacguacaaaucguucgccaacaaagcuacuccaucauguguaucauuaaagaagaaguccucgccuacgucguccaacuuccgcucuacggcguaaucgacacccccugcuggaaacuucacaccucgccccucugcaccacaaacaccaaagaaggcuccaacaucugccuaacccgcaccgaccgcggcugguacugcgacaacgccggcuccgucucauuuuucccccaggcggagaccugcaaaguccaauccaaccgcgucuucugcgacaccaugaacucucuuacccucccaucagaaguaaaccucugcaacgucgacaucuuuaaccccaaauacgauugcaagauaaugaccuccaaaacagacgucucaucguccgucaucaccucccuaggagcuaucgucuccugcuacggcaagaccaaaugcaccgcuuccaacaaaaaccgcggcaucaucaaaaccuucuccaacgggugcgacuacgucucuaacaaaggcguggacacaguauccguaggaaacacacuguacugcguaaacaaacaagagggccaaucgcuuuacgucaaaggcgagccaauuaucaacuucuacgacccgcucgucuucccaucagacgaguucgacgcauccaucucccaagucaacgagaaaaucaaucagucccucgccuucauacgcaaauccgacgaacuccuacauaacguaaacgccggcaaaucuaccacaaacaucaugaucacaaccaucaucaucguaaucaucgucauccuucucucgcucaucgccguaggacugcuacuuuacugcaaggcccgcuaaggacuaguggaagcauuuuccuggcugauuaaaagaaauuacucagcuauggucaucuguuccuguuagaaggcuaugcagcauauuauauacuaugcgcauguuaugaaaugcauaauaaaaaauuuuaaaaaaucuaaaagaucuaaaaaaaaaaaaaaaaaaaaaaaaaaaaaaaaaaaaaaaaaaaaaaaaaaaaaaaaaaaaaaaaugcaucccccccccccccccccccccccccccccccaaaggcucuuuucagagccaccagaauu

SEQ ID NO: 2174 - RNA, 1874 nt, Artificial Sequence
  mRNA product Design e-1 comprising derived and/or modified sequence from HRSV(A2)__F-del_DSCav1_mut1 (opt1)
gggagaauauaagcguuggcggagcgucgguuguagcacucugcgcgcccgcucuucugcugcuguuugucuacuuccuccugcuuccccgccgccgccgccgccaucaagcuuaccauggagcugcucauccugaaggccaacgccaucaccaccauccugacggcggugaccuucugcuucgccagcggccagaacaucaccgaggaguucuaccaguccacgugcagcgccgucuccaagggguaccucggcgcccugcggaccggcugguacaccuccgugaucaccaucgagcugagcaacaucaaggagaacaagugcaacgggaccgacgccaaggugaagcucaucaagcaggagcuggacaaguacaagaacgcggucacggagcugcagcuccugaugcaguccaccccggcaaccggcuccggcuccgccaucugcagcggcgucgccgugugcaaggugcugcaccucgagggggaggucaacaagaucaagagcgcccugcuguccaccaacaaggccguggugagccucuccaacggcgucagcgugcugaccuucaaggugcuggaccucaagaacuacaucgacaagcagcugcugcccauccugaacaagcagagcugcuccauccccaacaucgagacggugaucgaguuccagcagaagaacaaccggcuccuggagaucacccgcgaguucagcgugaacgccggggucaccacccccguguccacguacaugcugaccaacagcgagcuccugucccugaucaacgacaugccgaucaccaacgaccagaagaagcucaugagcaacaacgugcagaucguccggcagcaguccuacagcaucaugugcaucaucaaggaggaggugcuggcguacgugguccagcugccccucuacggcgugaucgacacccccugcuggaagcugcacacgagcccccugugcaccaccaacaccaaggagggguccaacaucugccucacgcgcaccgaccggggcugguacugcgacaacgccggcagcgucuccuucuucccgcaggccgagaccugcaaggugcagagcaaccgcguguucugcgacaccaugaacucccugacgcugcccagcgagguaaaccucugcaacgucgacaucuucaaccccaaguacgacugcaagaucaugaccuccaagaccgacgugagcuccagcgugaucaccucccugggggccaucgucagcugcuacggcaagacgaagugcaccgccagcaacaagaaccgggggaucaucaagaccuucuccaacggcugcgacuacgugagcaacaagggcguggacaccguguccgucgggaacacccuguacugcgugaacaagcaggagggccagagccucuacgugaagggggagcccaucaucaacuucuacgacccgcuggucuuccccuccgacgaguucgacgcgagcaucucccaggugaacgagaagaucaaccagagccuggccuucauccgcaaguccgacgagcugcuccacaacgugaacgccggcaagagcacgaccaacaucaugaucaccaccaucaucaucgucaucaucgugauccugcugucccucaucgccguggggcugcugcucuacugcaaggcccggugaggacuaguguccaccugucccuccugggcugcuggauugucucguuuuccugccaaauaaacaggaucagcgcuuuacagaucuaaaaaaaaaaaaaaaaaaaaaaaaaaaaaaaaaaaaaaaaaaaaaaaaaaaaaaaaaaaaaaaaugcaucccccccccccccccccccccccccccccccaaaggcucuuuucagagccaccagaauu

SEQ ID NO: 2175 - RNA, 1874 nt, Artificial Sequence
  mRNA product Design e-1 comprising derived and/or modified sequence from HRSV(A2)__F-del_DSCav1_mut1 (opt1)
gggagaauauaagcguuggcggagcgucgguuguagcacucugcgcgcccgcucuucugcugcuguuugucuacuuccuccugcuuccccgccgccgccgccgccaucaagcuuaccauggagcugcucauccugaaggccaacgccaucaccaccauccugacggcggugaccuucugcuucgccagcggccagaacaucaccgaggaguucuaccaguccacgugcagcgccgucuccaagggguaccucggcgcccugcgcaccgggugguacaccagcgugaucaccaucgagcuguccaacaucaaggagaacaagugcaacggcaccgacgccaaggugaagcucaucaagcaggagcuggacaaguacaagaacgcggucacggagcugcagcuccugaugcagagcacccccgccaccggguccggcagcgccaucugcuccggcguggccgugugcaagguccugcaccucgagggggaggugaacaagaucaagagcgcgcugcuguccaccaacaaggccguggucagccucuccaacggcgugagcgugcugacguucaagguccuggaccucaagaacuacaucgacaagcagcugcugccgauccucaacaagcaguccugcagcauccccaacaucgagaccgugaucgaguuccagcagaagaacaaccggcugcuggagaucacccgcgaguucuccgugaacgccggggucaccacgcccgugagcaccuacaugcucaccaacuccgagcugcugagccucaucaacgacaugcccaucaccaacgaccagaagaagcugaugagcaacaacgugcagaucguccggcagcaguccuacagcaucaugugcaucaucaaggaggaggugcuggccuacgugguccagcucccgcuguacggcgugaucgacacgcccugcuggaagcugcacaccagcccccucugcaccaccaacacgaaggagggguccaacaucugccugacccgcaccgaccggggcugguacugcgacaacgccggcuccgugagcuucuucccccaggcggagaccugcaagguccaguccaaccgcguguucugcgacacgaugaacagccugacccucccguccgaggucaaccugugcaacguggacaucuucaaccccaaguacgacugcaagaucaugaccagcaagaccgacguguccagcuccgucaucacgagccugggggccaucguguccugcuacggcaagaccaagugcaccgccagcaacaagaaccgggggaucaucaagaccuucuccaacggcugcgacuacgugagcaacaagggcgucgacacgguguccguggggaacacccucuacugcgucaacaagcaggagggccagagccuguacgugaagggggagcccaucaucaacuucuacgacccccugguguucccgagcgacgaguucgacgccuccaucagccaggucaacgagaagaucaaccagucccucgccuucauccgcaagagcgacgagcugcugcacaacgugaacgcgggcaaguccaccaccaacaucaugaucaccacgaucaucaucgugaucaucgucauccuccugagccugaucgccguggggcuccugcuguacugcaaggcccggugaggacuaguguccaccugucccuccugggcugcuggauugucucguuuuccugccaaauaaacaggaucagcgcuuuacagaucuaaaaaaaaaaaaaaaaaaaaaaaaaaaaaaaaaaaaaaaaaaaaaaaaaaaaaaaaaaaaaaaaugcaucccccccccccccccccccccccccccccccaaaggcucuuuucagagccaccagaauu

SEQ ID NO: 2176 - RNA, 1874 nt, Artificial Sequence
  mRNA product Design e-1 comprising derived and/or modified sequence from HRSV(A2)__F-del_DSCav1_mut1 (opt2)
gggagaauauaagcguuggcggagcgucgguuguagcacucugcgcgcccgcucuucugcugcuguuugucuacuuccuccugcuuccccgccgccgccgccgccaucaagcuuaccauggagcuccucauccucaaggccaacgccaucaccaccauccucaccgccgucaccuucugcuucgccuccggccagaacaucaccgaggaguucuaccaguccaccugcuccgccgucuccaagggcuaccucggcgcccuccgcaccggcugguacaccuccgucaucaccaucgagcucuccaacaucaaggagaacaagugcaacggcaccgacgccaaggucaagcucaucaagcaggagcucgacaaguacaagaacgccgucaccgagcuccagcuccucaugcaguccacccccgccaccggcuccggcuccgccaucugcuccggcgucgccgucugcaagguccuccaccucgagggcgaggucaacaagaucaaguccgcccuccucuccaccaacaaggccgucgucucccucuccaacggcgucuccguccucaccuucaagguccucgaccucaagaacuacaucgacaagcagcuccuccccauccucaacaagcaguccugcuccauccccaacaucgagaccgucaucgaguuccagcagaagaacaaccgccuccucgagaucacccgcgaguucuccgucaacgccggcgucaccacccccgucuccaccuacaugcucaccaacuccgagcuccucucccucaucaacgacaugcccaucaccaacgaccagaagaagcucauguccaacaacguccagaucguccgccagcaguccuacuccaucaugugcaucaucaaggaggagguccucgccuacgucguccagcucccccucuacggcgucaucgacacccccugcuggaagcuccacaccuccccccucugcaccaccaacaccaaggagggcuccaacaucugccucacccgcaccgaccgcggcugguacugcgacaacgccggcuccgucuccuucuucccccaggccgagaccugcaagguccaguccaaccgcgucuucugcgacaccaugaacucccucacccuccccuccgaggucaaccucugcaacgucgacaucuucaaccccaaguacgacugcaagaucaugaccuccaagaccgacgucuccuccuccgucaucaccucccucggcgccaucgucuccugcuacggcaagaccaagugcaccgccuccaacaagaaccgcggcaucaucaagaccuucuccaacggcugcgacuacgucuccaacaagggcgucgacaccgucuccgucggcaacacccucuacugcgucaacaagcaggagggccagucccucuacgucaagggcgagcccaucaucaacuucuacgacccccucgucuuccccuccgacgaguucgacgccuccaucucccaggucaacgagaagaucaaccagucccucgccuucauccgcaaguccgacgagcuccuccacaacgucaacgccggcaaguccaccaccaacaucaugaucaccaccaucaucaucgucaucaucgucauccuccucucccucaucgccgucggccuccuccucuacugcaaggcccgcugaggacuaguguccaccugucccuccugggcugcuggauugucucguuuuccugccaaauaaacaggaucagcgcuuuacagaucuaaaaaaaaaaaaaaaaaaaaaaaaaaaaaaaaaaaaaaaaaaaaaaaaaaaaaaaaaaaaaaaaugcaucccccccccccccccccccccccccccccccaaaggcucuuuucagagccaccagaauu

SEQ ID NO: 2177 - RNA, 1874 nt, Artificial Sequence
  mRNA product Design e-1 comprising derived and/or modified sequence from HRSV(A2)__F-del_DSCav1_mut1 (opt3)
gggagaauauaagcguuggcggagcgucgguuguagcacucugcgcgcccgcucuucugcugcuguuugucuacuuccuccugcuuccccgccgccgccgccgccaucaagcuuaccauggagcugcucauccuuaaggccaacgcuauuaccacaauacugacugcagugacguucugcuuugccagcggccagaauaucaccgaagaguucuaccaauccacauguucugcggucucaaaaggguauuugggagcuuuaagaacugguugguacaccaguguuauuacaaucgaacugagcaacauuaaggagaauaaaugcaacggcaccgacgccaaggugaaacuaaucaagcaggaacucgauaaguauaaaaaugcaguaacugagcugcagcuucugaugcaguccacacccgccaccgggucuggaucggcuauauguucaggcguggcagucugcaagguguugcaccucgagggugaaguuaacaaaaucaagagcgcccugcugaguacgaauaaagcuguggucucccucucuaacggggugagcguauuaacuuuuaagguucuggaccuuaagaauuacauugauaaacaauugcugccuauccuaaacaagcaguccuguucaauuccaaauaucgagaccgugauagaguuccagcagaaaaacaauaggcuccuggaaauuacacgggaguuuagugucaacgccggagugacuaccccggugagcacauauaugcuuaccaauucugaacuguugucccucaucaacgacaugcccauuacgaacgaucaaaagaaacugaugucaaauaacguccagaucguucgccagcagagcuacaguaucaugugcauuauaaaggaggaaguguuagcguauguagugcaacugccucucuacggcgucaucgacacuccauguuggaaacuucauacaucuccccugugcaccacuaauacaaaggagggcuccaacauuuguuugacccgaacggaucgugggugguacugcgacaaugcaggaagcgugucguucuuuccucaggccgaaaccuguaagguucagucuaacagaguguucugcgauacaaugaacucccuaacucugccaucagaggucaaucucugcaauguggacaucuuuaaccccaaauaugauuguaagauaaugaccaguaaaacagacguaagcuccucuguuauuacuagccugggugcuaucgugucaugcuacggcaagaccaaauguacagccaguaauaagaacagggggaucauuaagaccuucuccaauggaugcgauuaugucagcaacaaaggcguggacacugucucuguggguaauacgcuuuacuguguuaacaagcaagaggggcagucacuguaugugaaaggagaaccuaucauuaacuuuuacgacccauugguauucccgagugaugaguuugacgcaagcauaucccaggucaaugaaaagaucaaccagucucucgcuuucauucggaaaucggaugagcuguuacacaaugugaacgccggcaagagcacaaccaauaucaugaucacuaccauuauaaucguuauuaucgugauucugcuaucccucaucgcggucggccugcuuuuguauugcaaggcccgcugaggacuaguguccaccugucccuccugggcugcuggauugucucguuuuccugccaaauaaacaggaucagcgcuuuacagaucuaaaaaaaaaaaaaaaaaaaaaaaaaaaaaaaaaaaaaaaaaaaaaaaaaaaaaaaaaaaaaaaaugcaucccccccccccccccccccccccccccccccaaaggcucuuuucagagccaccagaauu

SEQ ID NO: 2178 - RNA, 1874 nt, Artificial Sequence
  mRNA product Design e-1 comprising derived and/or modified sequence from HRSV(A2)__F-del_DSCav1_mut1 (opt4)
gggagaauauaagcguuggcggagcgucgguuguagcacucugcgcgcccgcucuucugcugcuguuugucuacuuccuccugcuuccccgccgccgccgccgccaucaagcuuaccauggagcugcugauccugaaggccaacgccaucaccaccauccugaccgccgugaccuucugcuucgccagcggccagaacaucaccgaggaguucuaccagagcaccugcagcgccgugagcaagggcuaccugggcgcccugagaaccggcugguacaccagcgugaucaccaucgagcugagcaacaucaaggagaacaagugcaacggcaccgacgccaaggugaagcugaucaagcaggagcuggacaaguacaagaacgccgugaccgagcugcagcugcugaugcagagcacccccgccaccggcagcggcagcgccaucugcagcggcguggccgugugcaaggugcugcaccuggagggcgaggugaacaagaucaagagcgcccugcugagcaccaacaaggccguggugagccugagcaacggcgugagcgugcugaccuucaaggugcuggaccugaagaacuacaucgacaagcagcugcugcccauccugaacaagcagagcugcagcauccccaacaucgagaccgugaucgaguuccagcagaagaacaacagacugcuggagaucaccagagaguucagcgugaacgccggcgugaccacccccgugagcaccuacaugcugaccaacagcgagcugcugagccugaucaacgacaugcccaucaccaacgaccagaagaagcugaugagcaacaacgugcagaucgugagacagcagagcuacagcaucaugugcaucaucaaggaggaggugcuggccuacguggugcagcugccccuguacggcgugaucgacacccccugcuggaagcugcacaccagcccccugugcaccaccaacaccaaggagggcagcaacaucugccugaccagaaccgacagaggcugguacugcgacaacgccggcagcgugagcuucuucccccaggccgagaccugcaaggugcagagcaacagaguguucugcgacaccaugaacagccugacccugcccagcgaggugaaccugugcaacguggacaucuucaaccccaaguacgacugcaagaucaugaccagcaagaccgacgugagcagcagcgugaucaccagccugggcgccaucgugagcugcuacggcaagaccaagugcaccgccagcaacaagaacagaggcaucaucaagaccuucagcaacggcugcgacuacgugagcaacaagggcguggacaccgugagcgugggcaacacccuguacugcgugaacaagcaggagggccagagccuguacgugaagggcgagcccaucaucaacuucuacgacccccugguguuccccagcgacgaguucgacgccagcaucagccaggugaacgagaagaucaaccagagccuggccuucaucagaaagagcgacgagcugcugcacaacgugaacgccggcaagagcaccaccaacaucaugaucaccaccaucaucaucgugaucaucgugauccugcugagccugaucgccgugggccugcugcuguacugcaaggccagaugaggacuaguguccaccugucccuccugggcugcuggauugucucguuuuccugccaaauaaacaggaucagcgcuuuacagaucuaaaaaaaaaaaaaaaaaaaaaaaaaaaaaaaaaaaaaaaaaaaaaaaaaaaaaaaaaaaaaaaaugcaucccccccccccccccccccccccccccccccaaaggcucuuuucagagccaccagaauu

SEQ ID NO: 2179 - RNA, 1874 nt, Artificial Sequence
  mRNA product Design e-1 comprising derived and/or modified sequence from HRSV(A2)__F-del_DSCav1_mut1 (opt5)
gggagaauauaagcguuggcggagcgucgguuguagcacucugcgcgcccgcucuucugcugcuguuugucuacuuccuccugcuuccccgccgccgccgccgccaucaagcuuaccauggagcugcucauccugaaggccaacgcuauuaccacaauccuuacggccgugaccuucugcuuugcgagcggccagaauauuacagaagaguucuaccaauccaccuguucugcugucagcaaaggguaucugggagcccucagaacaggcugguacaccuccguuaucacaauugaacugucuaacaucaaggagaauaaaugcaacgggaccgacgccaaggugaaacuuaucaagcaggaacuggauaaguauaaaaaugcugugacggagcuccagcugcugaugcagagcacccccgccacaggauccggcucugcuauuuguagcggggucgccgugugcaagguucuccaccuggagggagaagugaacaaaaucaaguccgcgcuucugagcaccaauaaagccgucgugucucucuccaacggcguuagcgugcugacauuuaagguccuugaccugaagaauuacauugauaaacaacuccugccuauccugaacaagcagucuuguuccauuccgaauaucgagaccgugauugaguuccagcagaaaaacaaucggcuccuggaaaucacgcgcgaguuuagcgugaacgcuggcgucacaacccccguuucuacauauaugcuuaccaauuccgaacugcucagccugaucaacgacaugccuauuaccaacgaucaaaagaaacuuauguccaauaacgugcagaucgugagacagcagucuuacagcauuaugugcaucauuaaggaggaaguccuggccuaugugguucaacucccccuguacggggugaucgacacaccuuguuggaaacugcauacgagcccccucugcaccacaaauaccaaggagggauccaacaucugucugacacggaccgaucgcggcugguacugcgacaaugcugggucugucuccuucuuuccucaggccgaaacguguaaggugcagagcaacagaguuuucugcgauacaaugaacucucuuacccugccgagcgaggugaaucucugcaaugucgacauuuuuaaccccaaauaugauuguaagaucaugaccuccaaaacagacgugucuagcuccgucauuaccagccugggagcgaucgugucuugcuacggcaagacaaaauguacggccuccaauaagaaccgggggauuaucaagaccuucagcaauggaugcgauuauguuucuaacaaaggcguggacacagucuccgugggcaauacccuuuacuguguuaacaagcaagaggggcagagccuguaugugaaaggagaaccuaucauuaacuuuuacgacccccucgucuucccuuccgaugaguuugacgcuucuaucagccaggugaaugaaaagauuaaccagucccuggccuucauccgcaaaucugaugagcugcuccacaaugugaacgcuggcaagagcacaaccaauauuaugaucacgaccauuaucaucguuauuaucgucauucugcuuucccugaucgccguggggcuccugcuguauugcaaggccagaugaggacuaguguccaccugucccuccugggcugcuggauugucucguuuuccugccaaauaaacaggaucagcgcuuuacagaucuaaaaaaaaaaaaaaaaaaaaaaaaaaaaaaaaaaaaaaaaaaaaaaaaaaaaaaaaaaaaaaaaugcaucccccccccccccccccccccccccccccccaaaggcucuuuucagagccaccagaauu

SEQ ID NO: 2180 - RNA, 1874 nt, Artificial Sequence
  mRNA product Design e-1 comprising derived and/or modified sequence from HRSV(A2)__F-del_DSCav1_mut1 (opt6)
gggagaauauaagcguuggcggagcgucgguuguagcacucugcgcgcccgcucuucugcugcuguuugucuacuuccuccugcuuccccgccgccgccgccgccaucaagcuuaccauggaacuacucaucuuaaaagcaaacgcaauaacaacuauucuaaccgcaguaacauuuuguuucgcaucaggacaaaacauaaccgaagaauuuuaccaaucaacauguuccgcaguuucaaaaggauacuuaggcgcacuaagaacaggcugguacaccuccgugauaacaauagaauuaucaaacauaaaagaaaacaaauguaauggaacugacgccaaaguaaaacuaauaaaacaagaacuagacaaauauaaaaacgcaguaacugaacuacaauuacuaaugcaauccaccccagcaacaggcucaggcucagcaauuugcuccggagucgcugucugcaaaguacuacaucuugaaggcgaagucaauaaaauaaaaucagcacuucuaucaacaaacaaagcaguagucucacuaucaaacggaguaucaguacuaacauuuaaaguauuagaucuaaaaaacuauauagauaaacaacuacuacccauacucaauaaacaauccuguucaauaccaaauauagaaaccguaauagaauuucaacaaaaaaacaaucgacuauuagaaaucacccgagaauuuucagucaaugcaggcguaacaacaccaguaucaaccuacauguuaaccaacuccgaacuacuaucccucauaaacgacaugccaauaacaaacgaucaaaaaaaacuaauguccaacaacguacaaauagucagacaacaaucuuauucaauaaugugcaucauaaaagaagaaguucuagccuacguaguucaacuuccauuauacggcguaauugauacaccaugcuggaaacuacacacauccccacuauguacaacaaacacaaaagaaggaucaaacaucugcuuaacuagaacagacagaggaugguacugcgacaacgcaggaucagucucauucuuuccacaagcagaaacaugcaagguccaaucaaacagaguauucugcgacacaaugaacuccuuaacacuaccaucugaaguaaaccuauguaauguagacauauuuaacccaaaauacgacugcaaaauaaugaccucaaaaacagacguauccucaucaguaauuacaagccucggagccauaguaucaugcuacggaaaaacaaaauguacagcaucaaacaaaaacagaggaauaauaaaaacguucuccaacggaugcgacuauguaucaaacaaaggcguagacacaguaucagucggaaauacccuuuacugcguaaacaaacaagaaggccaaagucuauacguaaaaggagagccaauaauaaacuuuuaugacccccuuguauucccaucugacgaauuugaugcaucaauaucccaagucaacgaaaaaaucaaccaaucauuagccuuuauuagaaaaagugacgaacuauuacacaacguuaaugcagggaaaucaacaacaaauauaaugauuacaaccauaauuauaguuaucauaguuauacuacucucacuaaucgcaguaggauuacuauuauacugcaaagcaagauaaggacuaguguccaccugucccuccugggcugcuggauugucucguuuuccugccaaauaaacaggaucagcgcuuuacagaucuaaaaaaaaaaaaaaaaaaaaaaaaaaaaaaaaaaaaaaaaaaaaaaaaaaaaaaaaaaaaaaaaugcaucccccccccccccccccccccccccccccccaaaggcucuuuucagagccaccagaauu

SEQ ID NO: 2181 - RNA, 1874 nt, Artificial Sequence
  mRNA product Design e-1 comprising derived and/or modified sequence from HRSV(A2)__F-del_DSCav1_mut1 (opt11)
gggagaauauaagcguuggcggagcgucgguuguagcacucugcgcgcccgcucuucugcugcuguuugucuacuuccuccugcuuccccgccgccgccgccgccaucaagcuuaccauggaacuacucauccuaaaagccaacgcaaucacaaccauacuuacagcuguuaccuucugcuucgcauccggccaaaauaucaccgaagaguucuaccaaucaaccugcuccgccgucagcaaaggauaccucggcgcccuccgaaccggaugguacacuucugucaucacaaucgaacucuccaacaucaaagaaaacaaaugcaacgguaccgacgcgaaagucaaacucaucaaacaagaacuagacaaguacaaaaacgccgucaccgaacugcaacuccucaugcaauccacaccagcaacgggaucaggauccgccaucugcucaggcgucgccgucugcaaaguccugcaccuagaaggagaaguaaacaaaauuaaauccgcccuacucuccaccaacaaagcagucgucucacuauccaacggcgucuccguccucaccuuuaagguccucgaccucaaaaauuauauagacaaacaacuccuccccauccuaaacaaacaaucaugcuccauccccaacauagaaaccgucaucgaauuucaacagaaaaacaaccgacucuuagaaauuacccgcgaguucagcgucaacgccggagucaccacacccgucucaaccuacaugcucaccaacucagaacuccucucacuaaucaaugauaugcccaucacaaacgaccaaaagaaacucauguccaacaacguacaaaucguucgccaacaaagcuacuccaucauguguaucauuaaagaagaaguccucgccuacgucguccaacuuccgcucuacggcguaaucgacacccccugcuggaaacuucacaccucgccccucugcaccacaaacaccaaagaaggcuccaacaucugccuaacccgcaccgaccgcggcugguacugcgacaacgccggcuccgucucauuuuucccccaggcggagaccugcaaaguccaauccaaccgcgucuucugcgacaccaugaacucucuuacccucccaucagaaguaaaccucugcaacgucgacaucuuuaaccccaaauacgauugcaagauaaugaccuccaaaacagacgucucaucguccgucaucaccucccuaggagcuaucgucuccugcuacggcaagaccaaaugcaccgcuuccaacaaaaaccgcggcaucaucaaaaccuucuccaacgggugcgacuacgucucuaacaaaggcguggacacaguauccguaggaaacacacuguacugcguaaacaaacaagagggccaaucgcuuuacgucaaaggcgagccaauuaucaacuucuacgacccgcucgucuucccaucagacgaguucgacgcauccaucucccaagucaacgagaaaaucaaucagucccucgccuucauacgcaaauccgacgaacuccuacauaacguaaacgccggcaaaucuaccacaaacaucaugaucacaaccaucaucaucguaaucaucgucauccuucucucgcucaucgccguaggacugcuacuuuacugcaaggcccgcuaaggacuaguguccaccugucccuccugggcugcuggauugucucguuuuccugccaaauaaacaggaucagcgcuuuacagaucuaaaaaaaaaaaaaaaaaaaaaaaaaaaaaaaaaaaaaaaaaaaaaaaaaaaaaaaaaaaaaaaaugcaucccccccccccccccccccccccccccccccaaaggcucuuuucagagccaccagaauu

SEQ ID NO: 2182 - RNA, 1856 nt, Artificial Sequence
  mRNA product Design e-2 comprising derived and/or modified sequence from HRSV(A2)__F-del_DSCav1_mut1 (opt1)
gggagacccgugacccggaaguuguacggcuacgcgacuuucccucccacaaacccucgcgcccuuccuuuccuacuugggcccggcagaaagcuuaccauggagcugcucauccugaaggccaacgccaucaccaccauccugacggcggugaccuucugcuucgccagcggccagaacaucaccgaggaguucuaccaguccacgugcagcgccgucuccaagggguaccucggcgcccugcggaccggcugguacaccuccgugaucaccaucgagcugagcaacaucaaggagaacaagugcaacgggaccgacgccaaggugaagcucaucaagcaggagcuggacaaguacaagaacgcggucacggagcugcagcuccugaugcaguccaccccggcaaccggcuccggcuccgccaucugcagcggcgucgccgugugcaaggugcugcaccucgagggggaggucaacaagaucaagagcgcccugcuguccaccaacaaggccguggugagccucuccaacggcgucagcgugcugaccuucaaggugcuggaccucaagaacuacaucgacaagcagcugcugcccauccugaacaagcagagcugcuccauccccaacaucgagacggugaucgaguuccagcagaagaacaaccggcuccuggagaucacccgcgaguucagcgugaacgccggggucaccacccccguguccacguacaugcugaccaacagcgagcuccugucccugaucaacgacaugccgaucaccaacgaccagaagaagcucaugagcaacaacgugcagaucguccggcagcaguccuacagcaucaugugcaucaucaaggaggaggugcuggcguacgugguccagcugccccucuacggcgugaucgacacccccugcuggaagcugcacacgagcccccugugcaccaccaacaccaaggagggguccaacaucugccucacgcgcaccgaccggggcugguacugcgacaacgccggcagcgucuccuucuucccgcaggccgagaccugcaaggugcagagcaaccgcguguucugcgacaccaugaacucccugacgcugcccagcgagguaaaccucugcaacgucgacaucuucaaccccaaguacgacugcaagaucaugaccuccaagaccgacgugagcuccagcgugaucaccucccugggggccaucgucagcugcuacggcaagacgaagugcaccgccagcaacaagaaccgggggaucaucaagaccuucuccaacggcugcgacuacgugagcaacaagggcguggacaccguguccgucgggaacacccuguacugcgugaacaagcaggagggccagagccucuacgugaagggggagcccaucaucaacuucuacgacccgcuggucuuccccuccgacgaguucgacgcgagcaucucccaggugaacgagaagaucaaccagagccuggccuucauccgcaaguccgacgagcugcuccacaacgugaacgccggcaagagcacgaccaacaucaugaucaccaccaucaucaucgucaucaucgugauccugcugucccucaucgccguggggcugcugcucuacugcaaggcccggugaggacuaguguccaccugucccuccugggcugcuggauugucucguuuuccugccaaauaaacaggaucagcgcuuuacagaucuaaaaaaaaaaaaaaaaaaaaaaaaaaaaaaaaaaaaaaaaaaaaaaaaaaaaaaaaaaaaaaaaugcaucccccccccccccccccccccccccccccccaaaggcucuuuucagagccaccagaauu

SEQ ID NO: 2183 - RNA, 1856 nt, Artificial Sequence
  mRNA product Design e-2 comprising derived and/or modified sequence from HRSV(A2)__F-del_DSCav1_mut1 (opt1)
gggagacccgugacccggaaguuguacggcuacgcgacuuucccucccacaaacccucgcgcccuuccuuuccuacuugggcccggcagaaagcuuaccauggagcugcucauccugaaggccaacgccaucaccaccauccugacggcggugaccuucugcuucgccagcggccagaacaucaccgaggaguucuaccaguccacgugcagcgccgucuccaagggguaccucggcgcccugcgcaccgggugguacaccagcgugaucaccaucgagcuguccaacaucaaggagaacaagugcaacggcaccgacgccaaggugaagcucaucaagcaggagcuggacaaguacaagaacgcggucacggagcugcagcuccugaugcagagcacccccgccaccggguccggcagcgccaucugcuccggcguggccgugugcaagguccugcaccucgagggggaggugaacaagaucaagagcgcgcugcuguccaccaacaaggccguggucagccucuccaacggcgugagcgugcugacguucaagguccuggaccucaagaacuacaucgacaagcagcugcugccgauccucaacaagcaguccugcagcauccccaacaucgagaccgugaucgaguuccagcagaagaacaaccggcugcuggagaucacccgcgaguucuccgugaacgccggggucaccacgcccgugagcaccuacaugcucaccaacuccgagcugcugagccucaucaacgacaugcccaucaccaacgaccagaagaagcugaugagcaacaacgugcagaucguccggcagcaguccuacagcaucaugugcaucaucaaggaggaggugcuggccuacgugguccagcucccgcuguacggcgugaucgacacgcccugcuggaagcugcacaccagcccccucugcaccaccaacacgaaggagggguccaacaucugccugacccgcaccgaccggggcugguacugcgacaacgccggcuccgugagcuucuucccccaggcggagaccugcaagguccaguccaaccgcguguucugcgacacgaugaacagccugacccucccguccgaggucaaccugugcaacguggacaucuucaaccccaaguacgacugcaagaucaugaccagcaagaccgacguguccagcuccgucaucacgagccugggggccaucguguccugcuacggcaagaccaagugcaccgccagcaacaagaaccgggggaucaucaagaccuucuccaacggcugcgacuacgugagcaacaagggcgucgacacgguguccguggggaacacccucuacugcgucaacaagcaggagggccagagccuguacgugaagggggagcccaucaucaacuucuacgacccccugguguucccgagcgacgaguucgacgccuccaucagccaggucaacgagaagaucaaccagucccucgccuucauccgcaagagcgacgagcugcugcacaacgugaacgcgggcaaguccaccaccaacaucaugaucaccacgaucaucaucgugaucaucgucauccuccugagccugaucgccguggggcuccugcuguacugcaaggcccggugaggacuaguguccaccugucccuccugggcugcuggauugucucguuuuccugccaaauaaacaggaucagcgcuuuacagaucuaaaaaaaaaaaaaaaaaaaaaaaaaaaaaaaaaaaaaaaaaaaaaaaaaaaaaaaaaaaaaaaaugcaucccccccccccccccccccccccccccccccaaaggcucuuuucagagccaccagaauu

SEQ ID NO: 2184 - RNA, 1856 nt, Artificial Sequence
  mRNA product Design e-2 comprising derived and/or modified sequence from HRSV(A2)__F-del_DSCav1_mut1 (opt2)
gggagacccgugacccggaaguuguacggcuacgcgacuuucccucccacaaacccucgcgcccuuccuuuccuacuugggcccggcagaaagcuuaccauggagcuccucauccucaaggccaacgccaucaccaccauccucaccgccgucaccuucugcuucgccuccggccagaacaucaccgaggaguucuaccaguccaccugcuccgccgucuccaagggcuaccucggcgcccuccgcaccggcugguacaccuccgucaucaccaucgagcucuccaacaucaaggagaacaagugcaacggcaccgacgccaaggucaagcucaucaagcaggagcucgacaaguacaagaacgccgucaccgagcuccagcuccucaugcaguccacccccgccaccggcuccggcuccgccaucugcuccggcgucgccgucugcaagguccuccaccucgagggcgaggucaacaagaucaaguccgcccuccucuccaccaacaaggccgucgucucccucuccaacggcgucuccguccucaccuucaagguccucgaccucaagaacuacaucgacaagcagcuccuccccauccucaacaagcaguccugcuccauccccaacaucgagaccgucaucgaguuccagcagaagaacaaccgccuccucgagaucacccgcgaguucuccgucaacgccggcgucaccacccccgucuccaccuacaugcucaccaacuccgagcuccucucccucaucaacgacaugcccaucaccaacgaccagaagaagcucauguccaacaacguccagaucguccgccagcaguccuacuccaucaugugcaucaucaaggaggagguccucgccuacgucguccagcucccccucuacggcgucaucgacacccccugcuggaagcuccacaccuccccccucugcaccaccaacaccaaggagggcuccaacaucugccucacccgcaccgaccgcggcugguacugcgacaacgccggcuccgucuccuucuucccccaggccgagaccugcaagguccaguccaaccgcgucuucugcgacaccaugaacucccucacccuccccuccgaggucaaccucugcaacgucgacaucuucaaccccaaguacgacugcaagaucaugaccuccaagaccgacgucuccuccuccgucaucaccucccucggcgccaucgucuccugcuacggcaagaccaagugcaccgccuccaacaagaaccgcggcaucaucaagaccuucuccaacggcugcgacuacgucuccaacaagggcgucgacaccgucuccgucggcaacacccucuacugcgucaacaagcaggagggccagucccucuacgucaagggcgagcccaucaucaacuucuacgacccccucgucuuccccuccgacgaguucgacgccuccaucucccaggucaacgagaagaucaaccagucccucgccuucauccgcaaguccgacgagcuccuccacaacgucaacgccggcaaguccaccaccaacaucaugaucaccaccaucaucaucgucaucaucgucauccuccucucccucaucgccgucggccuccuccucuacugcaaggcccgcugaggacuaguguccaccugucccuccugggcugcuggauugucucguuuuccugccaaauaaacaggaucagcgcuuuacagaucuaaaaaaaaaaaaaaaaaaaaaaaaaaaaaaaaaaaaaaaaaaaaaaaaaaaaaaaaaaaaaaaaugcaucccccccccccccccccccccccccccccccaaaggcucuuuucagagccaccagaauu

SEQ ID NO: 2185 - RNA, 1856 nt, Artificial Sequence
  mRNA product Design e-2 comprising derived and/or modified sequence from HRSV(A2)__F-del_DSCav1_mut1 (opt3)
gggagacccgugacccggaaguuguacggcuacgcgacuuucccucccacaaacccucgcgcccuuccuuuccuacuugggcccggcagaaagcuuaccauggagcugcucauccuuaaggccaacgcuauuaccacaauacugacugcagugacguucugcuuugccagcggccagaauaucaccgaagaguucuaccaauccacauguucugcggucucaaaaggguauuugggagcuuuaagaacugguugguacaccaguguuauuacaaucgaacugagcaacauuaaggagaauaaaugcaacggcaccgacgccaaggugaaacuaaucaagcaggaacucgauaaguauaaaaaugcaguaacugagcugcagcuucugaugcaguccacacccgccaccgggucuggaucggcuauauguucaggcguggcagucugcaagguguugcaccucgagggugaaguuaacaaaaucaagagcgcccugcugaguacgaauaaagcuguggucucccucucuaacggggugagcguauuaacuuuuaagguucuggaccuuaagaauuacauugauaaacaauugcugccuauccuaaacaagcaguccuguucaauuccaaauaucgagaccgugauagaguuccagcagaaaaacaauaggcuccuggaaauuacacgggaguuuagugucaacgccggagugacuaccccggugagcacauauaugcuuaccaauucugaacuguugucccucaucaacgacaugcccauuacgaacgaucaaaagaaacugaugucaaauaacguccagaucguucgccagcagagcuacaguaucaugugcauuauaaaggaggaaguguuagcguauguagugcaacugccucucuacggcgucaucgacacuccauguuggaaacuucauacaucuccccugugcaccacuaauacaaaggagggcuccaacauuuguuugacccgaacggaucgugggugguacugcgacaaugcaggaagcgugucguucuuuccucaggccgaaaccuguaagguucagucuaacagaguguucugcgauacaaugaacucccuaacucugccaucagaggucaaucucugcaauguggacaucuuuaaccccaaauaugauuguaagauaaugaccaguaaaacagacguaagcuccucuguuauuacuagccugggugcuaucgugucaugcuacggcaagaccaaauguacagccaguaauaagaacagggggaucauuaagaccuucuccaauggaugcgauuaugucagcaacaaaggcguggacacugucucuguggguaauacgcuuuacuguguuaacaagcaagaggggcagucacuguaugugaaaggagaaccuaucauuaacuuuuacgacccauugguauucccgagugaugaguuugacgcaagcauaucccaggucaaugaaaagaucaaccagucucucgcuuucauucggaaaucggaugagcuguuacacaaugugaacgccggcaagagcacaaccaauaucaugaucacuaccauuauaaucguuauuaucgugauucugcuaucccucaucgcggucggccugcuuuuguauugcaaggcccgcugaggacuaguguccaccugucccuccugggcugcuggauugucucguuuuccugccaaauaaacaggaucagcgcuuuacagaucuaaaaaaaaaaaaaaaaaaaaaaaaaaaaaaaaaaaaaaaaaaaaaaaaaaaaaaaaaaaaaaaaugcaucccccccccccccccccccccccccccccccaaaggcucuuuucagagccaccagaauu

SEQ ID NO: 2186 - RNA, 1856 nt, Artificial Sequence
  mRNA product Design e-2 comprising derived and/or modified sequence from HRSV(A2)__F-del_DSCav1_mut1 (opt4)
gggagacccgugacccggaaguuguacggcuacgcgacuuucccucccacaaacccucgcgcccuuccuuuccuacuugggcccggcagaaagcuuaccauggagcugcugauccugaaggccaacgccaucaccaccauccugaccgccgugaccuucugcuucgccagcggccagaacaucaccgaggaguucuaccagagcaccugcagcgccgugagcaagggcuaccugggcgcccugagaaccggcugguacaccagcgugaucaccaucgagcugagcaacaucaaggagaacaagugcaacggcaccgacgccaaggugaagcugaucaagcaggagcuggacaaguacaagaacgccgugaccgagcugcagcugcugaugcagagcacccccgccaccggcagcggcagcgccaucugcagcggcguggccgugugcaaggugcugcaccuggagggcgaggugaacaagaucaagagcgcccugcugagcaccaacaaggccguggugagccugagcaacggcgugagcgugcugaccuucaaggugcuggaccugaagaacuacaucgacaagcagcugcugcccauccugaacaagcagagcugcagcauccccaacaucgagaccgugaucgaguuccagcagaagaacaacagacugcuggagaucaccagagaguucagcgugaacgccggcgugaccacccccgugagcaccuacaugcugaccaacagcgagcugcugagccugaucaacgacaugcccaucaccaacgaccagaagaagcugaugagcaacaacgugcagaucgugagacagcagagcuacagcaucaugugcaucaucaaggaggaggugcuggccuacguggugcagcugccccuguacggcgugaucgacacccccugcuggaagcugcacaccagcccccugugcaccaccaacaccaaggagggcagcaacaucugccugaccagaaccgacagaggcugguacugcgacaacgccggcagcgugagcuucuucccccaggccgagaccugcaaggugcagagcaacagaguguucugcgacaccaugaacagccugacccugcccagcgaggugaaccugugcaacguggacaucuucaaccccaaguacgacugcaagaucaugaccagcaagaccgacgugagcagcagcgugaucaccagccugggcgccaucgugagcugcuacggcaagaccaagugcaccgccagcaacaagaacagaggcaucaucaagaccuucagcaacggcugcgacuacgugagcaacaagggcguggacaccgugagcgugggcaacacccuguacugcgugaacaagcaggagggccagagccuguacgugaagggcgagcccaucaucaacuucuacgacccccugguguuccccagcgacgaguucgacgccagcaucagccaggugaacgagaagaucaaccagagccuggccuucaucagaaagagcgacgagcugcugcacaacgugaacgccggcaagagcaccaccaacaucaugaucaccaccaucaucaucgugaucaucgugauccugcugagccugaucgccgugggccugcugcuguacugcaaggccagaugaggacuaguguccaccugucccuccugggcugcuggauugucucguuuuccugccaaauaaacaggaucagcgcuuuacagaucuaaaaaaaaaaaaaaaaaaaaaaaaaaaaaaaaaaaaaaaaaaaaaaaaaaaaaaaaaaaaaaaaugcaucccccccccccccccccccccccccccccccaaaggcucuuuucagagccaccagaauu

SEQ ID NO: 2187 - RNA, 1856 nt, Artificial Sequence
  mRNA product Design e-2 comprising derived and/or modified sequence from HRSV(A2)__F-del_DSCav1_mut1 (opt5)
gggagacccgugacccggaaguuguacggcuacgcgacuuucccucccacaaacccucgcgcccuuccuuuccuacuugggcccggcagaaagcuuaccauggagcugcucauccugaaggccaacgcuauuaccacaauccuuacggccgugaccuucugcuuugcgagcggccagaauauuacagaagaguucuaccaauccaccuguucugcugucagcaaaggguaucugggagcccucagaacaggcugguacaccuccguuaucacaauugaacugucuaacaucaaggagaauaaaugcaacgggaccgacgccaaggugaaacuuaucaagcaggaacuggauaaguauaaaaaugcugugacggagcuccagcugcugaugcagagcacccccgccacaggauccggcucugcuauuuguagcggggucgccgugugcaagguucuccaccuggagggagaagugaacaaaaucaaguccgcgcuucugagcaccaauaaagccgucgugucucucuccaacggcguuagcgugcugacauuuaagguccuugaccugaagaauuacauugauaaacaacuccugccuauccugaacaagcagucuuguuccauuccgaauaucgagaccgugauugaguuccagcagaaaaacaaucggcuccuggaaaucacgcgcgaguuuagcgugaacgcuggcgucacaacccccguuucuacauauaugcuuaccaauuccgaacugcucagccugaucaacgacaugccuauuaccaacgaucaaaagaaacuuauguccaauaacgugcagaucgugagacagcagucuuacagcauuaugugcaucauuaaggaggaaguccuggccuaugugguucaacucccccuguacggggugaucgacacaccuuguuggaaacugcauacgagcccccucugcaccacaaauaccaaggagggauccaacaucugucugacacggaccgaucgcggcugguacugcgacaaugcugggucugucuccuucuuuccucaggccgaaacguguaaggugcagagcaacagaguuuucugcgauacaaugaacucucuuacccugccgagcgaggugaaucucugcaaugucgacauuuuuaaccccaaauaugauuguaagaucaugaccuccaaaacagacgugucuagcuccgucauuaccagccugggagcgaucgugucuugcuacggcaagacaaaauguacggccuccaauaagaaccgggggauuaucaagaccuucagcaauggaugcgauuauguuucuaacaaaggcguggacacagucuccgugggcaauacccuuuacuguguuaacaagcaagaggggcagagccuguaugugaaaggagaaccuaucauuaacuuuuacgacccccucgucuucccuuccgaugaguuugacgcuucuaucagccaggugaaugaaaagauuaaccagucccuggccuucauccgcaaaucugaugagcugcuccacaaugugaacgcuggcaagagcacaaccaauauuaugaucacgaccauuaucaucguuauuaucgucauucugcuuucccugaucgccguggggcuccugcuguauugcaaggccagaugaggacuaguguccaccugucccuccugggcugcuggauugucucguuuuccugccaaauaaacaggaucagcgcuuuacagaucuaaaaaaaaaaaaaaaaaaaaaaaaaaaaaaaaaaaaaaaaaaaaaaaaaaaaaaaaaaaaaaaaugcaucccccccccccccccccccccccccccccccaaaggcucuuuucagagccaccagaauu

SEQ ID NO: 2188 - RNA, 1856 nt, Artificial Sequence
  mRNA product Design e-2 comprising derived and/or modified sequence from HRSV(A2)__F-del_DSCav1_mut1 (opt6)
gggagacccgugacccggaaguuguacggcuacgcgacuuucccucccacaaacccucgcgcccuuccuuuccuacuugggcccggcagaaagcuuaccauggaacuacucaucuuaaaagcaaacgcaauaacaacuauucuaaccgcaguaacauuuuguuucgcaucaggacaaaacauaaccgaagaauuuuaccaaucaacauguuccgcaguuucaaaaggauacuuaggcgcacuaagaacaggcugguacaccuccgugauaacaauagaauuaucaaacauaaaagaaaacaaauguaauggaacugacgccaaaguaaaacuaauaaaacaagaacuagacaaauauaaaaacgcaguaacugaacuacaauuacuaaugcaauccaccccagcaacaggcucaggcucagcaauuugcuccggagucgcugucugcaaaguacuacaucuugaaggcgaagucaauaaaauaaaaucagcacuucuaucaacaaacaaagcaguagucucacuaucaaacggaguaucaguacuaacauuuaaaguauuagaucuaaaaaacuauauagauaaacaacuacuacccauacucaauaaacaauccuguucaauaccaaauauagaaaccguaauagaauuucaacaaaaaaacaaucgacuauuagaaaucacccgagaauuuucagucaaugcaggcguaacaacaccaguaucaaccuacauguuaaccaacuccgaacuacuaucccucauaaacgacaugccaauaacaaacgaucaaaaaaaacuaauguccaacaacguacaaauagucagacaacaaucuuauucaauaaugugcaucauaaaagaagaaguucuagccuacguaguucaacuuccauuauacggcguaauugauacaccaugcuggaaacuacacacauccccacuauguacaacaaacacaaaagaaggaucaaacaucugcuuaacuagaacagacagaggaugguacugcgacaacgcaggaucagucucauucuuuccacaagcagaaacaugcaagguccaaucaaacagaguauucugcgacacaaugaacuccuuaacacuaccaucugaaguaaaccuauguaauguagacauauuuaacccaaaauacgacugcaaaauaaugaccucaaaaacagacguauccucaucaguaauuacaagccucggagccauaguaucaugcuacggaaaaacaaaauguacagcaucaaacaaaaacagaggaauaauaaaaacguucuccaacggaugcgacuauguaucaaacaaaggcguagacacaguaucagucggaaauacccuuuacugcguaaacaaacaagaaggccaaagucuauacguaaaaggagagccaauaauaaacuuuuaugacccccuuguauucccaucugacgaauuugaugcaucaauaucccaagucaacgaaaaaaucaaccaaucauuagccuuuauuagaaaaagugacgaacuauuacacaacguuaaugcagggaaaucaacaacaaauauaaugauuacaaccauaauuauaguuaucauaguuauacuacucucacuaaucgcaguaggauuacuauuauacugcaaagcaagauaaggacuaguguccaccugucccuccugggcugcuggauugucucguuuuccugccaaauaaacaggaucagcgcuuuacagaucuaaaaaaaaaaaaaaaaaaaaaaaaaaaaaaaaaaaaaaaaaaaaaaaaaaaaaaaaaaaaaaaaugcaucccccccccccccccccccccccccccccccaaaggcucuuuucagagccaccagaauu

SEQ ID NO: 2189 - RNA, 1856 nt, Artificial Sequence
  mRNA product Design e-2 comprising derived and/or modified sequence from HRSV(A2)__F-del_DSCav1_mut1 (opt11)
gggagacccgugacccggaaguuguacggcuacgcgacuuucccucccacaaacccucgcgcccuuccuuuccuacuugggcccggcagaaagcuuaccauggaacuacucauccuaaaagccaacgcaaucacaaccauacuuacagcuguuaccuucugcuucgcauccggccaaaauaucaccgaagaguucuaccaaucaaccugcuccgccgucagcaaaggauaccucggcgcccuccgaaccggaugguacacuucugucaucacaaucgaacucuccaacaucaaagaaaacaaaugcaacgguaccgacgcgaaagucaaacucaucaaacaagaacuagacaaguacaaaaacgccgucaccgaacugcaacuccucaugcaauccacaccagcaacgggaucaggauccgccaucugcucaggcgucgccgucugcaaaguccugcaccuagaaggagaaguaaacaaaauuaaauccgcccuacucuccaccaacaaagcagucgucucacuauccaacggcgucuccguccucaccuuuaagguccucgaccucaaaaauuauauagacaaacaacuccuccccauccuaaacaaacaaucaugcuccauccccaacauagaaaccgucaucgaauuucaacagaaaaacaaccgacucuuagaaauuacccgcgaguucagcgucaacgccggagucaccacacccgucucaaccuacaugcucaccaacucagaacuccucucacuaaucaaugauaugcccaucacaaacgaccaaaagaaacucauguccaacaacguacaaaucguucgccaacaaagcuacuccaucauguguaucauuaaagaagaaguccucgccuacgucguccaacuuccgcucuacggcguaaucgacacccccugcuggaaacuucacaccucgccccucugcaccacaaacaccaaagaaggcuccaacaucugccuaacccgcaccgaccgcggcugguacugcgacaacgccggcuccgucucauuuuucccccaggcggagaccugcaaaguccaauccaaccgcgucuucugcgacaccaugaacucucuuacccucccaucagaaguaaaccucugcaacgucgacaucuuuaaccccaaauacgauugcaagauaaugaccuccaaaacagacgucucaucguccgucaucaccucccuaggagcuaucgucuccugcuacggcaagaccaaaugcaccgcuuccaacaaaaaccgcggcaucaucaaaaccuucuccaacgggugcgacuacgucucuaacaaaggcguggacacaguauccguaggaaacacacuguacugcguaaacaaacaagagggccaaucgcuuuacgucaaaggcgagccaauuaucaacuucuacgacccgcucgucuucccaucagacgaguucgacgcauccaucucccaagucaacgagaaaaucaaucagucccucgccuucauacgcaaauccgacgaacuccuacauaacguaaacgccggcaaaucuaccacaaacaucaugaucacaaccaucaucaucguaaucaucgucauccuucucucgcucaucgccguaggacugcuacuuuacugcaaggcccgcuaaggacuaguguccaccugucccuccugggcugcuggauugucucguuuuccugccaaauaaacaggaucagcgcuuuacagaucuaaaaaaaaaaaaaaaaaaaaaaaaaaaaaaaaaaaaaaaaaaaaaaaaaaaaaaaaaaaaaaaaugcaucccccccccccccccccccccccccccccccaaaggcucuuuucagagccaccagaauu

SEQ ID NO: 2190 - RNA, 1826 nt, Artificial Sequence
  mRNA product Design e-3 comprising derived and/or modified sequence from HRSV(A2)__F-del_DSCav1_mut1 (opt1)
gggagacuuucccauucuguagcagaauuugguguugccuguggucuuggucccgcggagaagcuuaccauggagcugcucauccugaaggccaacgccaucaccaccauccugacggcggugaccuucugcuucgccagcggccagaacaucaccgaggaguucuaccaguccacgugcagcgccgucuccaagggguaccucggcgcccugcggaccggcugguacaccuccgugaucaccaucgagcugagcaacaucaaggagaacaagugcaacgggaccgacgccaaggugaagcucaucaagcaggagcuggacaaguacaagaacgcggucacggagcugcagcuccugaugcaguccaccccggcaaccggcuccggcuccgccaucugcagcggcgucgccgugugcaaggugcugcaccucgagggggaggucaacaagaucaagagcgcccugcuguccaccaacaaggccguggugagccucuccaacggcgucagcgugcugaccuucaaggugcuggaccucaagaacuacaucgacaagcagcugcugcccauccugaacaagcagagcugcuccauccccaacaucgagacggugaucgaguuccagcagaagaacaaccggcuccuggagaucacccgcgaguucagcgugaacgccggggucaccacccccguguccacguacaugcugaccaacagcgagcuccugucccugaucaacgacaugccgaucaccaacgaccagaagaagcucaugagcaacaacgugcagaucguccggcagcaguccuacagcaucaugugcaucaucaaggaggaggugcuggcguacgugguccagcugccccucuacggcgugaucgacacccccugcuggaagcugcacacgagcccccugugcaccaccaacaccaaggagggguccaacaucugccucacgcgcaccgaccggggcugguacugcgacaacgccggcagcgucuccuucuucccgcaggccgagaccugcaaggugcagagcaaccgcguguucugcgacaccaugaacucccugacgcugcccagcgagguaaaccucugcaacgucgacaucuucaaccccaaguacgacugcaagaucaugaccuccaagaccgacgugagcuccagcgugaucaccucccugggggccaucgucagcugcuacggcaagacgaagugcaccgccagcaacaagaaccgggggaucaucaagaccuucuccaacggcugcgacuacgugagcaacaagggcguggacaccguguccgucgggaacacccuguacugcgugaacaagcaggagggccagagccucuacgugaagggggagcccaucaucaacuucuacgacccgcuggucuuccccuccgacgaguucgacgcgagcaucucccaggugaacgagaagaucaaccagagccuggccuucauccgcaaguccgacgagcugcuccacaacgugaacgccggcaagagcacgaccaacaucaugaucaccaccaucaucaucgucaucaucgugauccugcugucccucaucgccguggggcugcugcucuacugcaaggcccggugaggacuaguguccaccugucccuccugggcugcuggauugucucguuuuccugccaaauaaacaggaucagcgcuuuacagaucuaaaaaaaaaaaaaaaaaaaaaaaaaaaaaaaaaaaaaaaaaaaaaaaaaaaaaaaaaaaaaaaaugcaucccccccccccccccccccccccccccccccaaaggcucuuuucagagccaccagaauu

SEQ ID NO: 2191 - RNA, 1826 nt, Artificial Sequence
  mRNA product Design e-3 comprising derived and/or modified sequence from HRSV(A2)__F-del_DSCav1_mut1 (opt1)
gggagacuuucccauucuguagcagaauuugguguugccuguggucuuggucccgcggagaagcuuaccauggagcugcucauccugaaggccaacgccaucaccaccauccugacggcggugaccuucugcuucgccagcggccagaacaucaccgaggaguucuaccaguccacgugcagcgccgucuccaagggguaccucggcgcccugcgcaccgggugguacaccagcgugaucaccaucgagcuguccaacaucaaggagaacaagugcaacggcaccgacgccaaggugaagcucaucaagcaggagcuggacaaguacaagaacgcggucacggagcugcagcuccugaugcagagcacccccgccaccggguccggcagcgccaucugcuccggcguggccgugugcaagguccugcaccucgagggggaggugaacaagaucaagagcgcgcugcuguccaccaacaaggccguggucagccucuccaacggcgugagcgugcugacguucaagguccuggaccucaagaacuacaucgacaagcagcugcugccgauccucaacaagcaguccugcagcauccccaacaucgagaccgugaucgaguuccagcagaagaacaaccggcugcuggagaucacccgcgaguucuccgugaacgccggggucaccacgcccgugagcaccuacaugcucaccaacuccgagcugcugagccucaucaacgacaugcccaucaccaacgaccagaagaagcugaugagcaacaacgugcagaucguccggcagcaguccuacagcaucaugugcaucaucaaggaggaggugcuggccuacgugguccagcucccgcuguacggcgugaucgacacgcccugcuggaagcugcacaccagcccccucugcaccaccaacacgaaggagggguccaacaucugccugacccgcaccgaccggggcugguacugcgacaacgccggcuccgugagcuucuucccccaggcggagaccugcaagguccaguccaaccgcguguucugcgacacgaugaacagccugacccucccguccgaggucaaccugugcaacguggacaucuucaaccccaaguacgacugcaagaucaugaccagcaagaccgacguguccagcuccgucaucacgagccugggggccaucguguccugcuacggcaagaccaagugcaccgccagcaacaagaaccgggggaucaucaagaccuucuccaacggcugcgacuacgugagcaacaagggcgucgacacgguguccguggggaacacccucuacugcgucaacaagcaggagggccagagccuguacgugaagggggagcccaucaucaacuucuacgacccccugguguucccgagcgacgaguucgacgccuccaucagccaggucaacgagaagaucaaccagucccucgccuucauccgcaagagcgacgagcugcugcacaacgugaacgcgggcaaguccaccaccaacaucaugaucaccacgaucaucaucgugaucaucgucauccuccugagccugaucgccguggggcuccugcuguacugcaaggcccggugaggacuaguguccaccugucccuccugggcugcuggauugucucguuuuccugccaaauaaacaggaucagcgcuuuacagaucuaaaaaaaaaaaaaaaaaaaaaaaaaaaaaaaaaaaaaaaaaaaaaaaaaaaaaaaaaaaaaaaaugcaucccccccccccccccccccccccccccccccaaaggcucuuuucagagccaccagaauu

SEQ ID NO: 2192 - RNA, 1826 nt, Artificial Sequence
  mRNA product Design e-3 comprising derived and/or modified sequence from HRSV(A2)__F-del_DSCav1_mut1 (opt2)
gggagacuuucccauucuguagcagaauuugguguugccuguggucuuggucccgcggagaagcuuaccauggagcuccucauccucaaggccaacgccaucaccaccauccucaccgccgucaccuucugcuucgccuccggccagaacaucaccgaggaguucuaccaguccaccugcuccgccgucuccaagggcuaccucggcgcccuccgcaccggcugguacaccuccgucaucaccaucgagcucuccaacaucaaggagaacaagugcaacggcaccgacgccaaggucaagcucaucaagcaggagcucgacaaguacaagaacgccgucaccgagcuccagcuccucaugcaguccacccccgccaccggcuccggcuccgccaucugcuccggcgucgccgucugcaagguccuccaccucgagggcgaggucaacaagaucaaguccgcccuccucuccaccaacaaggccgucgucucccucuccaacggcgucuccguccucaccuucaagguccucgaccucaagaacuacaucgacaagcagcuccuccccauccucaacaagcaguccugcuccauccccaacaucgagaccgucaucgaguuccagcagaagaacaaccgccuccucgagaucacccgcgaguucuccgucaacgccggcgucaccacccccgucuccaccuacaugcucaccaacuccgagcuccucucccucaucaacgacaugcccaucaccaacgaccagaagaagcucauguccaacaacguccagaucguccgccagcaguccuacuccaucaugugcaucaucaaggaggagguccucgccuacgucguccagcucccccucuacggcgucaucgacacccccugcuggaagcuccacaccuccccccucugcaccaccaacaccaaggagggcuccaacaucugccucacccgcaccgaccgcggcugguacugcgacaacgccggcuccgucuccuucuucccccaggccgagaccugcaagguccaguccaaccgcgucuucugcgacaccaugaacucccucacccuccccuccgaggucaaccucugcaacgucgacaucuucaaccccaaguacgacugcaagaucaugaccuccaagaccgacgucuccuccuccgucaucaccucccucggcgccaucgucuccugcuacggcaagaccaagugcaccgccuccaacaagaaccgcggcaucaucaagaccuucuccaacggcugcgacuacgucuccaacaagggcgucgacaccgucuccgucggcaacacccucuacugcgucaacaagcaggagggccagucccucuacgucaagggcgagcccaucaucaacuucuacgacccccucgucuuccccuccgacgaguucgacgccuccaucucccaggucaacgagaagaucaaccagucccucgccuucauccgcaaguccgacgagcuccuccacaacgucaacgccggcaaguccaccaccaacaucaugaucaccaccaucaucaucgucaucaucgucauccuccucucccucaucgccgucggccuccuccucuacugcaaggcccgcugaggacuaguguccaccugucccuccugggcugcuggauugucucguuuuccugccaaauaaacaggaucagcgcuuuacagaucuaaaaaaaaaaaaaaaaaaaaaaaaaaaaaaaaaaaaaaaaaaaaaaaaaaaaaaaaaaaaaaaaugcaucccccccccccccccccccccccccccccccaaaggcucuuuucagagccaccagaauu

SEQ ID NO: 2193 - RNA, 1826 nt, Artificial Sequence
  mRNA product Design e-3 comprising derived and/or modified sequence from HRSV(A2)__F-del_DSCav1_mut1 (opt3)
gggagacuuucccauucuguagcagaauuugguguugccuguggucuuggucccgcggagaagcuuaccauggagcugcucauccuuaaggccaacgcuauuaccacaauacugacugcagugacguucugcuuugccagcggccagaauaucaccgaagaguucuaccaauccacauguucugcggucucaaaaggguauuugggagcuuuaagaacugguugguacaccaguguuauuacaaucgaacugagcaacauuaaggagaauaaaugcaacggcaccgacgccaaggugaaacuaaucaagcaggaacucgauaaguauaaaaaugcaguaacugagcugcagcuucugaugcaguccacacccgccaccgggucuggaucggcuauauguucaggcguggcagucugcaagguguugcaccucgagggugaaguuaacaaaaucaagagcgcccugcugaguacgaauaaagcuguggucucccucucuaacggggugagcguauuaacuuuuaagguucuggaccuuaagaauuacauugauaaacaauugcugccuauccuaaacaagcaguccuguucaauuccaaauaucgagaccgugauagaguuccagcagaaaaacaauaggcuccuggaaauuacacgggaguuuagugucaacgccggagugacuaccccggugagcacauauaugcuuaccaauucugaacuguugucccucaucaacgacaugcccauuacgaacgaucaaaagaaacugaugucaaauaacguccagaucguucgccagcagagcuacaguaucaugugcauuauaaaggaggaaguguuagcguauguagugcaacugccucucuacggcgucaucgacacuccauguuggaaacuucauacaucuccccugugcaccacuaauacaaaggagggcuccaacauuuguuugacccgaacggaucgugggugguacugcgacaaugcaggaagcgugucguucuuuccucaggccgaaaccuguaagguucagucuaacagaguguucugcgauacaaugaacucccuaacucugccaucagaggucaaucucugcaauguggacaucuuuaaccccaaauaugauuguaagauaaugaccaguaaaacagacguaagcuccucuguuauuacuagccugggugcuaucgugucaugcuacggcaagaccaaauguacagccaguaauaagaacagggggaucauuaagaccuucuccaauggaugcgauuaugucagcaacaaaggcguggacacugucucuguggguaauacgcuuuacuguguuaacaagcaagaggggcagucacuguaugugaaaggagaaccuaucauuaacuuuuacgacccauugguauucccgagugaugaguuugacgcaagcauaucccaggucaaugaaaagaucaaccagucucucgcuuucauucggaaaucggaugagcuguuacacaaugugaacgccggcaagagcacaaccaauaucaugaucacuaccauuauaaucguuauuaucgugauucugcuaucccucaucgcggucggccugcuuuuguauugcaaggcccgcugaggacuaguguccaccugucccuccugggcugcuggauugucucguuuuccugccaaauaaacaggaucagcgcuuuacagaucuaaaaaaaaaaaaaaaaaaaaaaaaaaaaaaaaaaaaaaaaaaaaaaaaaaaaaaaaaaaaaaaaugcaucccccccccccccccccccccccccccccccaaaggcucuuuucagagccaccagaauu

SEQ ID NO: 2194 - RNA, 1826 nt, Artificial Sequence
  mRNA product Design e-3 comprising derived and/or modified sequence from HRSV(A2)__F-del_DSCav1_mut1 (opt4)
gggagacuuucccauucuguagcagaauuugguguugccuguggucuuggucccgcggagaagcuuaccauggagcugcugauccugaaggccaacgccaucaccaccauccugaccgccgugaccuucugcuucgccagcggccagaacaucaccgaggaguucuaccagagcaccugcagcgccgugagcaagggcuaccugggcgcccugagaaccggcugguacaccagcgugaucaccaucgagcugagcaacaucaaggagaacaagugcaacggcaccgacgccaaggugaagcugaucaagcaggagcuggacaaguacaagaacgccgugaccgagcugcagcugcugaugcagagcacccccgccaccggcagcggcagcgccaucugcagcggcguggccgugugcaaggugcugcaccuggagggcgaggugaacaagaucaagagcgcccugcugagcaccaacaaggccguggugagccugagcaacggcgugagcgugcugaccuucaaggugcuggaccugaagaacuacaucgacaagcagcugcugcccauccugaacaagcagagcugcagcauccccaacaucgagaccgugaucgaguuccagcagaagaacaacagacugcuggagaucaccagagaguucagcgugaacgccggcgugaccacccccgugagcaccuacaugcugaccaacagcgagcugcugagccugaucaacgacaugcccaucaccaacgaccagaagaagcugaugagcaacaacgugcagaucgugagacagcagagcuacagcaucaugugcaucaucaaggaggaggugcuggccuacguggugcagcugccccuguacggcgugaucgacacccccugcuggaagcugcacaccagcccccugugcaccaccaacaccaaggagggcagcaacaucugccugaccagaaccgacagaggcugguacugcgacaacgccggcagcgugagcuucuucccccaggccgagaccugcaaggugcagagcaacagaguguucugcgacaccaugaacagccugacccugcccagcgaggugaaccugugcaacguggacaucuucaaccccaaguacgacugcaagaucaugaccagcaagaccgacgugagcagcagcgugaucaccagccugggcgccaucgugagcugcuacggcaagaccaagugcaccgccagcaacaagaacagaggcaucaucaagaccuucagcaacggcugcgacuacgugagcaacaagggcguggacaccgugagcgugggcaacacccuguacugcgugaacaagcaggagggccagagccuguacgugaagggcgagcccaucaucaacuucuacgacccccugguguuccccagcgacgaguucgacgccagcaucagccaggugaacgagaagaucaaccagagccuggccuucaucagaaagagcgacgagcugcugcacaacgugaacgccggcaagagcaccaccaacaucaugaucaccaccaucaucaucgugaucaucgugauccugcugagccugaucgccgugggccugcugcuguacugcaaggccagaugaggacuaguguccaccugucccuccugggcugcuggauugucucguuuuccugccaaauaaacaggaucagcgcuuuacagaucuaaaaaaaaaaaaaaaaaaaaaaaaaaaaaaaaaaaaaaaaaaaaaaaaaaaaaaaaaaaaaaaaugcaucccccccccccccccccccccccccccccccaaaggcucuuuucagagccaccagaauu

SEQ ID NO: 2195 - RNA, 1826 nt, Artificial Sequence
  mRNA product Design e-3 comprising derived and/or modified sequence from HRSV(A2)__F-del_DSCav1_mut1 (opt5)
gggagacuuucccauucuguagcagaauuugguguugccuguggucuuggucccgcggagaagcuuaccauggagcugcucauccugaaggccaacgcuauuaccacaauccuuacggccgugaccuucugcuuugcgagcggccagaauauuacagaagaguucuaccaauccaccuguucugcugucagcaaaggguaucugggagcccucagaacaggcugguacaccuccguuaucacaauugaacugucuaacaucaaggagaauaaaugcaacgggaccgacgccaaggugaaacuuaucaagcaggaacuggauaaguauaaaaaugcugugacggagcuccagcugcugaugcagagcacccccgccacaggauccggcucugcuauuuguagcggggucgccgugugcaagguucuccaccuggagggagaagugaacaaaaucaaguccgcgcuucugagcaccaauaaagccgucgugucucucuccaacggcguuagcgugcugacauuuaagguccuugaccugaagaauuacauugauaaacaacuccugccuauccugaacaagcagucuuguuccauuccgaauaucgagaccgugauugaguuccagcagaaaaacaaucggcuccuggaaaucacgcgcgaguuuagcgugaacgcuggcgucacaacccccguuucuacauauaugcuuaccaauuccgaacugcucagccugaucaacgacaugccuauuaccaacgaucaaaagaaacuuauguccaauaacgugcagaucgugagacagcagucuuacagcauuaugugcaucauuaaggaggaaguccuggccuaugugguucaacucccccuguacggggugaucgacacaccuuguuggaaacugcauacgagcccccucugcaccacaaauaccaaggagggauccaacaucugucugacacggaccgaucgcggcugguacugcgacaaugcugggucugucuccuucuuuccucaggccgaaacguguaaggugcagagcaacagaguuuucugcgauacaaugaacucucuuacccugccgagcgaggugaaucucugcaaugucgacauuuuuaaccccaaauaugauuguaagaucaugaccuccaaaacagacgugucuagcuccgucauuaccagccugggagcgaucgugucuugcuacggcaagacaaaauguacggccuccaauaagaaccgggggauuaucaagaccuucagcaauggaugcgauuauguuucuaacaaaggcguggacacagucuccgugggcaauacccuuuacuguguuaacaagcaagaggggcagagccuguaugugaaaggagaaccuaucauuaacuuuuacgacccccucgucuucccuuccgaugaguuugacgcuucuaucagccaggugaaugaaaagauuaaccagucccuggccuucauccgcaaaucugaugagcugcuccacaaugugaacgcuggcaagagcacaaccaauauuaugaucacgaccauuaucaucguuauuaucgucauucugcuuucccugaucgccguggggcuccugcuguauugcaaggccagaugaggacuaguguccaccugucccuccugggcugcuggauugucucguuuuccugccaaauaaacaggaucagcgcuuuacagaucuaaaaaaaaaaaaaaaaaaaaaaaaaaaaaaaaaaaaaaaaaaaaaaaaaaaaaaaaaaaaaaaaugcaucccccccccccccccccccccccccccccccaaaggcucuuuucagagccaccagaauu

SEQ ID NO: 2196 - RNA, 1826 nt, Artificial Sequence
  mRNA product Design e-3 comprising derived and/or modified sequence from HRSV(A2)__F-del_DSCav1_mut1 (opt6)
gggagacuuucccauucuguagcagaauuugguguugccuguggucuuggucccgcggagaagcuuaccauggaacuacucaucuuaaaagcaaacgcaauaacaacuauucuaaccgcaguaacauuuuguuucgcaucaggacaaaacauaaccgaagaauuuuaccaaucaacauguuccgcaguuucaaaaggauacuuaggcgcacuaagaacaggcugguacaccuccgugauaacaauagaauuaucaaacauaaaagaaaacaaauguaauggaacugacgccaaaguaaaacuaauaaaacaagaacuagacaaauauaaaaacgcaguaacugaacuacaauuacuaaugcaauccaccccagcaacaggcucaggcucagcaauuugcuccggagucgcugucugcaaaguacuacaucuugaaggcgaagucaauaaaauaaaaucagcacuucuaucaacaaacaaagcaguagucucacuaucaaacggaguaucaguacuaacauuuaaaguauuagaucuaaaaaacuauauagauaaacaacuacuacccauacucaauaaacaauccuguucaauaccaaauauagaaaccguaauagaauuucaacaaaaaaacaaucgacuauuagaaaucacccgagaauuuucagucaaugcaggcguaacaacaccaguaucaaccuacauguuaaccaacuccgaacuacuaucccucauaaacgacaugccaauaacaaacgaucaaaaaaaacuaauguccaacaacguacaaauagucagacaacaaucuuauucaauaaugugcaucauaaaagaagaaguucuagccuacguaguucaacuuccauuauacggcguaauugauacaccaugcuggaaacuacacacauccccacuauguacaacaaacacaaaagaaggaucaaacaucugcuuaacuagaacagacagaggaugguacugcgacaacgcaggaucagucucauucuuuccacaagcagaaacaugcaagguccaaucaaacagaguauucugcgacacaaugaacuccuuaacacuaccaucugaaguaaaccuauguaauguagacauauuuaacccaaaauacgacugcaaaauaaugaccucaaaaacagacguauccucaucaguaauuacaagccucggagccauaguaucaugcuacggaaaaacaaaauguacagcaucaaacaaaaacagaggaauaauaaaaacguucuccaacggaugcgacuauguaucaaacaaaggcguagacacaguaucagucggaaauacccuuuacugcguaaacaaacaagaaggccaaagucuauacguaaaaggagagccaauaauaaacuuuuaugacccccuuguauucccaucugacgaauuugaugcaucaauaucccaagucaacgaaaaaaucaaccaaucauuagccuuuauuagaaaaagugacgaacuauuacacaacguuaaugcagggaaaucaacaacaaauauaaugauuacaaccauaauuauaguuaucauaguuauacuacucucacuaaucgcaguaggauuacuauuauacugcaaagcaagauaaggacuaguguccaccugucccuccugggcugcuggauugucucguuuuccugccaaauaaacaggaucagcgcuuuacagaucuaaaaaaaaaaaaaaaaaaaaaaaaaaaaaaaaaaaaaaaaaaaaaaaaaaaaaaaaaaaaaaaaugcaucccccccccccccccccccccccccccccccaaaggcucuuuucagagccaccagaauu

SEQ ID NO: 2197 - RNA, 1826 nt, Artificial Sequence
  mRNA product Design e-3 comprising derived and/or modified sequence from HRSV(A2)__F-del_DSCav1_mut1 (opt11)
gggagacuuucccauucuguagcagaauuugguguugccuguggucuuggucccgcggagaagcuuaccauggaacuacucauccuaaaagccaacgcaaucacaaccauacuuacagcuguuaccuucugcuucgcauccggccaaaauaucaccgaagaguucuaccaaucaaccugcuccgccgucagcaaaggauaccucggcgcccuccgaaccggaugguacacuucugucaucacaaucgaacucuccaacaucaaagaaaacaaaugcaacgguaccgacgcgaaagucaaacucaucaaacaagaacuagacaaguacaaaaacgccgucaccgaacugcaacuccucaugcaauccacaccagcaacgggaucaggauccgccaucugcucaggcgucgccgucugcaaaguccugcaccuagaaggagaaguaaacaaaauuaaauccgcccuacucuccaccaacaaagcagucgucucacuauccaacggcgucuccguccucaccuuuaagguccucgaccucaaaaauuauauagacaaacaacuccuccccauccuaaacaaacaaucaugcuccauccccaacauagaaaccgucaucgaauuucaacagaaaaacaaccgacucuuagaaauuacccgcgaguucagcgucaacgccggagucaccacacccgucucaaccuacaugcucaccaacucagaacuccucucacuaaucaaugauaugcccaucacaaacgaccaaaagaaacucauguccaacaacguacaaaucguucgccaacaaagcuacuccaucauguguaucauuaaagaagaaguccucgccuacgucguccaacuuccgcucuacggcguaaucgacacccccugcuggaaacuucacaccucgccccucugcaccacaaacaccaaagaaggcuccaacaucugccuaacccgcaccgaccgcggcugguacugcgacaacgccggcuccgucucauuuuucccccaggcggagaccugcaaaguccaauccaaccgcgucuucugcgacaccaugaacucucuuacccucccaucagaaguaaaccucugcaacgucgacaucuuuaaccccaaauacgauugcaagauaaugaccuccaaaacagacgucucaucguccgucaucaccucccuaggagcuaucgucuccugcuacggcaagaccaaaugcaccgcuuccaacaaaaaccgcggcaucaucaaaaccuucuccaacgggugcgacuacgucucuaacaaaggcguggacacaguauccguaggaaacacacuguacugcguaaacaaacaagagggccaaucgcuuuacgucaaaggcgagccaauuaucaacuucuacgacccgcucgucuucccaucagacgaguucgacgcauccaucucccaagucaacgagaaaaucaaucagucccucgccuucauacgcaaauccgacgaacuccuacauaacguaaacgccggcaaaucuaccacaaacaucaugaucacaaccaucaucaucguaaucaucgucauccuucucucgcucaucgccguaggacugcuacuuuacugcaaggcccgcuaaggacuaguguccaccugucccuccugggcugcuggauugucucguuuuccugccaaauaaacaggaucagcgcuuuacagaucuaaaaaaaaaaaaaaaaaaaaaaaaaaaaaaaaaaaaaaaaaaaaaaaaaaaaaaaaaaaaaaaaugcaucccccccccccccccccccccccccccccccaaaggcucuuuucagagccaccagaauu

SEQ ID NO: 2198 - RNA, 1880 nt, Artificial Sequence
  mRNA product Design e-4 comprising derived and/or modified sequence from HRSV(A2)__F-del_DSCav1_mut1 (opt1)
gggagacuccugucgggcggaaguaggaggaguagaguuuaaaaacaguacucuuuuuccgguucgggacguaguugaagcaacgacaagccggauaaccgcucuugagacaggaagcuuaccauggagcugcucauccugaaggccaacgccaucaccaccauccugacggcggugaccuucugcuucgccagcggccagaacaucaccgaggaguucuaccaguccacgugcagcgccgucuccaagggguaccucggcgcccugcggaccggcugguacaccuccgugaucaccaucgagcugagcaacaucaaggagaacaagugcaacgggaccgacgccaaggugaagcucaucaagcaggagcuggacaaguacaagaacgcggucacggagcugcagcuccugaugcaguccaccccggcaaccggcuccggcuccgccaucugcagcggcgucgccgugugcaaggugcugcaccucgagggggaggucaacaagaucaagagcgcccugcuguccaccaacaaggccguggugagccucuccaacggcgucagcgugcugaccuucaaggugcuggaccucaagaacuacaucgacaagcagcugcugcccauccugaacaagcagagcugcuccauccccaacaucgagacggugaucgaguuccagcagaagaacaaccggcuccuggagaucacccgcgaguucagcgugaacgccggggucaccacccccguguccacguacaugcugaccaacagcgagcuccugucccugaucaacgacaugccgaucaccaacgaccagaagaagcucaugagcaacaacgugcagaucguccggcagcaguccuacagcaucaugugcaucaucaaggaggaggugcuggcguacgugguccagcugccccucuacggcgugaucgacacccccugcuggaagcugcacacgagcccccugugcaccaccaacaccaaggagggguccaacaucugccucacgcgcaccgaccggggcugguacugcgacaacgccggcagcgucuccuucuucccgcaggccgagaccugcaaggugcagagcaaccgcguguucugcgacaccaugaacucccugacgcugcccagcgagguaaaccucugcaacgucgacaucuucaaccccaaguacgacugcaagaucaugaccuccaagaccgacgugagcuccagcgugaucaccucccugggggccaucgucagcugcuacggcaagacgaagugcaccgccagcaacaagaaccgggggaucaucaagaccuucuccaacggcugcgacuacgugagcaacaagggcguggacaccguguccgucgggaacacccuguacugcgugaacaagcaggagggccagagccucuacgugaagggggagcccaucaucaacuucuacgacccgcuggucuuccccuccgacgaguucgacgcgagcaucucccaggugaacgagaagaucaaccagagccuggccuucauccgcaaguccgacgagcugcuccacaacgugaacgccggcaagagcacgaccaacaucaugaucaccaccaucaucaucgucaucaucgugauccugcugucccucaucgccguggggcugcugcucuacugcaaggcccggugaggacuaguguccaccugucccuccugggcugcuggauugucucguuuuccugccaaauaaacaggaucagcgcuuuacagaucuaaaaaaaaaaaaaaaaaaaaaaaaaaaaaaaaaaaaaaaaaaaaaaaaaaaaaaaaaaaaaaaaugcaucccccccccccccccccccccccccccccccaaaggcucuuuucagagccaccagaauu

SEQ ID NO: 2199 - RNA, 1880 nt, Artificial Sequence
  mRNA product Design e-4 comprising derived and/or modified sequence from HRSV(A2)__F-del_DSCav1_mut1 (opt1)
gggagacuccugucgggcggaaguaggaggaguagaguuuaaaaacaguacucuuuuuccgguucgggacguaguugaagcaacgacaagccggauaaccgcucuugagacaggaagcuuaccauggagcugcucauccugaaggccaacgccaucaccaccauccugacggcggugaccuucugcuucgccagcggccagaacaucaccgaggaguucuaccaguccacgugcagcgccgucuccaagggguaccucggcgcccugcgcaccgggugguacaccagcgugaucaccaucgagcuguccaacaucaaggagaacaagugcaacggcaccgacgccaaggugaagcucaucaagcaggagcuggacaaguacaagaacgcggucacggagcugcagcuccugaugcagagcacccccgccaccggguccggcagcgccaucugcuccggcguggccgugugcaagguccugcaccucgagggggaggugaacaagaucaagagcgcgcugcuguccaccaacaaggccguggucagccucuccaacggcgugagcgugcugacguucaagguccuggaccucaagaacuacaucgacaagcagcugcugccgauccucaacaagcaguccugcagcauccccaacaucgagaccgugaucgaguuccagcagaagaacaaccggcugcuggagaucacccgcgaguucuccgugaacgccggggucaccacgcccgugagcaccuacaugcucaccaacuccgagcugcugagccucaucaacgacaugcccaucaccaacgaccagaagaagcugaugagcaacaacgugcagaucguccggcagcaguccuacagcaucaugugcaucaucaaggaggaggugcuggccuacgugguccagcucccgcuguacggcgugaucgacacgcccugcuggaagcugcacaccagcccccucugcaccaccaacacgaaggagggguccaacaucugccugacccgcaccgaccggggcugguacugcgacaacgccggcuccgugagcuucuucccccaggcggagaccugcaagguccaguccaaccgcguguucugcgacacgaugaacagccugacccucccguccgaggucaaccugugcaacguggacaucuucaaccccaaguacgacugcaagaucaugaccagcaagaccgacguguccagcuccgucaucacgagccugggggccaucguguccugcuacggcaagaccaagugcaccgccagcaacaagaaccgggggaucaucaagaccuucuccaacggcugcgacuacgugagcaacaagggcgucgacacgguguccguggggaacacccucuacugcgucaacaagcaggagggccagagccuguacgugaagggggagcccaucaucaacuucuacgacccccugguguucccgagcgacgaguucgacgccuccaucagccaggucaacgagaagaucaaccagucccucgccuucauccgcaagagcgacgagcugcugcacaacgugaacgcgggcaaguccaccaccaacaucaugaucaccacgaucaucaucgugaucaucgucauccuccugagccugaucgccguggggcuccugcuguacugcaaggcccggugaggacuaguguccaccugucccuccugggcugcuggauugucucguuuuccugccaaauaaacaggaucagcgcuuuacagaucuaaaaaaaaaaaaaaaaaaaaaaaaaaaaaaaaaaaaaaaaaaaaaaaaaaaaaaaaaaaaaaaaugcaucccccccccccccccccccccccccccccccaaaggcucuuuucagagccaccagaauu

SEQ ID NO: 2200 - RNA, 1880 nt, Artificial Sequence
  mRNA product Design e-4 comprising derived and/or modified sequence from HRSV(A2)__F-del_DSCav1_mut1 (opt2)
gggagacuccugucgggcggaaguaggaggaguagaguuuaaaaacaguacucuuuuuccgguucgggacguaguugaagcaacgacaagccggauaaccgcucuugagacaggaagcuuaccauggagcuccucauccucaaggccaacgccaucaccaccauccucaccgccgucaccuucugcuucgccuccggccagaacaucaccgaggaguucuaccaguccaccugcuccgccgucuccaagggcuaccucggcgcccuccgcaccggcugguacaccuccgucaucaccaucgagcucuccaacaucaaggagaacaagugcaacggcaccgacgccaaggucaagcucaucaagcaggagcucgacaaguacaagaacgccgucaccgagcuccagcuccucaugcaguccacccccgccaccggcuccggcuccgccaucugcuccggcgucgccgucugcaagguccuccaccucgagggcgaggucaacaagaucaaguccgcccuccucuccaccaacaaggccgucgucucccucuccaacggcgucuccguccucaccuucaagguccucgaccucaagaacuacaucgacaagcagcuccuccccauccucaacaagcaguccugcuccauccccaacaucgagaccgucaucgaguuccagcagaagaacaaccgccuccucgagaucacccgcgaguucuccgucaacgccggcgucaccacccccgucuccaccuacaugcucaccaacuccgagcuccucucccucaucaacgacaugcccaucaccaacgaccagaagaagcucauguccaacaacguccagaucguccgccagcaguccuacuccaucaugugcaucaucaaggaggagguccucgccuacgucguccagcucccccucuacggcgucaucgacacccccugcuggaagcuccacaccuccccccucugcaccaccaacaccaaggagggcuccaacaucugccucacccgcaccgaccgcggcugguacugcgacaacgccggcuccgucuccuucuucccccaggccgagaccugcaagguccaguccaaccgcgucuucugcgacaccaugaacucccucacccuccccuccgaggucaaccucugcaacgucgacaucuucaaccccaaguacgacugcaagaucaugaccuccaagaccgacgucuccuccuccgucaucaccucccucggcgccaucgucuccugcuacggcaagaccaagugcaccgccuccaacaagaaccgcggcaucaucaagaccuucuccaacggcugcgacuacgucuccaacaagggcgucgacaccgucuccgucggcaacacccucuacugcgucaacaagcaggagggccagucccucuacgucaagggcgagcccaucaucaacuucuacgacccccucgucuuccccuccgacgaguucgacgccuccaucucccaggucaacgagaagaucaaccagucccucgccuucauccgcaaguccgacgagcuccuccacaacgucaacgccggcaaguccaccaccaacaucaugaucaccaccaucaucaucgucaucaucgucauccuccucucccucaucgccgucggccuccuccucuacugcaaggcccgcugaggacuaguguccaccugucccuccugggcugcuggauugucucguuuuccugccaaauaaacaggaucagcgcuuuacagaucuaaaaaaaaaaaaaaaaaaaaaaaaaaaaaaaaaaaaaaaaaaaaaaaaaaaaaaaaaaaaaaaaugcaucccccccccccccccccccccccccccccccaaaggcucuuuucagagccaccagaauu

SEQ ID NO: 2201 - RNA, 1880 nt, Artificial Sequence
  mRNA product Design e-4 comprising derived and/or modified sequence from HRSV(A2)__F-del_DSCav1_mut1 (opt3)
gggagacuccugucgggcggaaguaggaggaguagaguuuaaaaacaguacucuuuuuccgguucgggacguaguugaagcaacgacaagccggauaaccgcucuugagacaggaagcuuaccauggagcugcucauccuuaaggccaacgcuauuaccacaauacugacugcagugacguucugcuuugccagcggccagaauaucaccgaagaguucuaccaauccacauguucugcggucucaaaaggguauuugggagcuuuaagaacugguugguacaccaguguuauuacaaucgaacugagcaacauuaaggagaauaaaugcaacggcaccgacgccaaggugaaacuaaucaagcaggaacucgauaaguauaaaaaugcaguaacugagcugcagcuucugaugcaguccacacccgccaccgggucuggaucggcuauauguucaggcguggcagucugcaagguguugcaccucgagggugaaguuaacaaaaucaagagcgcccugcugaguacgaauaaagcuguggucucccucucuaacggggugagcguauuaacuuuuaagguucuggaccuuaagaauuacauugauaaacaauugcugccuauccuaaacaagcaguccuguucaauuccaaauaucgagaccgugauagaguuccagcagaaaaacaauaggcuccuggaaauuacacgggaguuuagugucaacgccggagugacuaccccggugagcacauauaugcuuaccaauucugaacuguugucccucaucaacgacaugcccauuacgaacgaucaaaagaaacugaugucaaauaacguccagaucguucgccagcagagcuacaguaucaugugcauuauaaaggaggaaguguuagcguauguagugcaacugccucucuacggcgucaucgacacuccauguuggaaacuucauacaucuccccugugcaccacuaauacaaaggagggcuccaacauuuguuugacccgaacggaucgugggugguacugcgacaaugcaggaagcgugucguucuuuccucaggccgaaaccuguaagguucagucuaacagaguguucugcgauacaaugaacucccuaacucugccaucagaggucaaucucugcaauguggacaucuuuaaccccaaauaugauuguaagauaaugaccaguaaaacagacguaagcuccucuguuauuacuagccugggugcuaucgugucaugcuacggcaagaccaaauguacagccaguaauaagaacagggggaucauuaagaccuucuccaauggaugcgauuaugucagcaacaaaggcguggacacugucucuguggguaauacgcuuuacuguguuaacaagcaagaggggcagucacuguaugugaaaggagaaccuaucauuaacuuuuacgacccauugguauucccgagugaugaguuugacgcaagcauaucccaggucaaugaaaagaucaaccagucucucgcuuucauucggaaaucggaugagcuguuacacaaugugaacgccggcaagagcacaaccaauaucaugaucacuaccauuauaaucguuauuaucgugauucugcuaucccucaucgcggucggccugcuuuuguauugcaaggcccgcugaggacuaguguccaccugucccuccugggcugcuggauugucucguuuuccugccaaauaaacaggaucagcgcuuuacagaucuaaaaaaaaaaaaaaaaaaaaaaaaaaaaaaaaaaaaaaaaaaaaaaaaaaaaaaaaaaaaaaaaugcaucccccccccccccccccccccccccccccccaaaggcucuuuucagagccaccagaauu

SEQ ID NO: 2202 - RNA, 1880 nt, Artificial Sequence
  mRNA product Design e-4 comprising derived and/or modified sequence from HRSV(A2)__F-del_DSCav1_mut1 (opt4)
gggagacuccugucgggcggaaguaggaggaguagaguuuaaaaacaguacucuuuuuccgguucgggacguaguugaagcaacgacaagccggauaaccgcucuugagacaggaagcuuaccauggagcugcugauccugaaggccaacgccaucaccaccauccugaccgccgugaccuucugcuucgccagcggccagaacaucaccgaggaguucuaccagagcaccugcagcgccgugagcaagggcuaccugggcgcccugagaaccggcugguacaccagcgugaucaccaucgagcugagcaacaucaaggagaacaagugcaacggcaccgacgccaaggugaagcugaucaagcaggagcuggacaaguacaagaacgccgugaccgagcugcagcugcugaugcagagcacccccgccaccggcagcggcagcgccaucugcagcggcguggccgugugcaaggugcugcaccuggagggcgaggugaacaagaucaagagcgcccugcugagcaccaacaaggccguggugagccugagcaacggcgugagcgugcugaccuucaaggugcuggaccugaagaacuacaucgacaagcagcugcugcccauccugaacaagcagagcugcagcauccccaacaucgagaccgugaucgaguuccagcagaagaacaacagacugcuggagaucaccagagaguucagcgugaacgccggcgugaccacccccgugagcaccuacaugcugaccaacagcgagcugcugagccugaucaacgacaugcccaucaccaacgaccagaagaagcugaugagcaacaacgugcagaucgugagacagcagagcuacagcaucaugugcaucaucaaggaggaggugcuggccuacguggugcagcugccccuguacggcgugaucgacacccccugcuggaagcugcacaccagcccccugugcaccaccaacaccaaggagggcagcaacaucugccugaccagaaccgacagaggcugguacugcgacaacgccggcagcgugagcuucuucccccaggccgagaccugcaaggugcagagcaacagaguguucugcgacaccaugaacagccugacccugcccagcgaggugaaccugugcaacguggacaucuucaaccccaaguacgacugcaagaucaugaccagcaagaccgacgugagcagcagcgugaucaccagccugggcgccaucgugagcugcuacggcaagaccaagugcaccgccagcaacaagaacagaggcaucaucaagaccuucagcaacggcugcgacuacgugagcaacaagggcguggacaccgugagcgugggcaacacccuguacugcgugaacaagcaggagggccagagccuguacgugaagggcgagcccaucaucaacuucuacgacccccugguguuccccagcgacgaguucgacgccagcaucagccaggugaacgagaagaucaaccagagccuggccuucaucagaaagagcgacgagcugcugcacaacgugaacgccggcaagagcaccaccaacaucaugaucaccaccaucaucaucgugaucaucgugauccugcugagccugaucgccgugggccugcugcuguacugcaaggccagaugaggacuaguguccaccugucccuccugggcugcuggauugucucguuuuccugccaaauaaacaggaucagcgcuuuacagaucuaaaaaaaaaaaaaaaaaaaaaaaaaaaaaaaaaaaaaaaaaaaaaaaaaaaaaaaaaaaaaaaaugcaucccccccccccccccccccccccccccccccaaaggcucuuuucagagccaccagaauu

SEQ ID NO: 2203 - RNA, 1880 nt, Artificial Sequence
  mRNA product Design e-4 comprising derived and/or modified sequence from HRSV(A2)__F-del_DSCav1_mut1 (opt5)
gggagacuccugucgggcggaaguaggaggaguagaguuuaaaaacaguacucuuuuuccgguucgggacguaguugaagcaacgacaagccggauaaccgcucuugagacaggaagcuuaccauggagcugcucauccugaaggccaacgcuauuaccacaauccuuacggccgugaccuucugcuuugcgagcggccagaauauuacagaagaguucuaccaauccaccuguucugcugucagcaaaggguaucugggagcccucagaacaggcugguacaccuccguuaucacaauugaacugucuaacaucaaggagaauaaaugcaacgggaccgacgccaaggugaaacuuaucaagcaggaacuggauaaguauaaaaaugcugugacggagcuccagcugcugaugcagagcacccccgccacaggauccggcucugcuauuuguagcggggucgccgugugcaagguucuccaccuggagggagaagugaacaaaaucaaguccgcgcuucugagcaccaauaaagccgucgugucucucuccaacggcguuagcgugcugacauuuaagguccuugaccugaagaauuacauugauaaacaacuccugccuauccugaacaagcagucuuguuccauuccgaauaucgagaccgugauugaguuccagcagaaaaacaaucggcuccuggaaaucacgcgcgaguuuagcgugaacgcuggcgucacaacccccguuucuacauauaugcuuaccaauuccgaacugcucagccugaucaacgacaugccuauuaccaacgaucaaaagaaacuuauguccaauaacgugcagaucgugagacagcagucuuacagcauuaugugcaucauuaaggaggaaguccuggccuaugugguucaacucccccuguacggggugaucgacacaccuuguuggaaacugcauacgagcccccucugcaccacaaauaccaaggagggauccaacaucugucugacacggaccgaucgcggcugguacugcgacaaugcugggucugucuccuucuuuccucaggccgaaacguguaaggugcagagcaacagaguuuucugcgauacaaugaacucucuuacccugccgagcgaggugaaucucugcaaugucgacauuuuuaaccccaaauaugauuguaagaucaugaccuccaaaacagacgugucuagcuccgucauuaccagccugggagcgaucgugucuugcuacggcaagacaaaauguacggccuccaauaagaaccgggggauuaucaagaccuucagcaauggaugcgauuauguuucuaacaaaggcguggacacagucuccgugggcaauacccuuuacuguguuaacaagcaagaggggcagagccuguaugugaaaggagaaccuaucauuaacuuuuacgacccccucgucuucccuuccgaugaguuugacgcuucuaucagccaggugaaugaaaagauuaaccagucccuggccuucauccgcaaaucugaugagcugcuccacaaugugaacgcuggcaagagcacaaccaauauuaugaucacgaccauuaucaucguuauuaucgucauucugcuuucccugaucgccguggggcuccugcuguauugcaaggccagaugaggacuaguguccaccugucccuccugggcugcuggauugucucguuuuccugccaaauaaacaggaucagcgcuuuacagaucuaaaaaaaaaaaaaaaaaaaaaaaaaaaaaaaaaaaaaaaaaaaaaaaaaaaaaaaaaaaaaaaaugcaucccccccccccccccccccccccccccccccaaaggcucuuuucagagccaccagaauu

SEQ ID NO: 2204 - RNA, 1880 nt, Artificial Sequence
  mRNA product Design e-4 comprising derived and/or modified sequence from HRSV(A2)__F-del_DSCav1_mut1 (opt6)
gggagacuccugucgggcggaaguaggaggaguagaguuuaaaaacaguacucuuuuuccgguucgggacguaguugaagcaacgacaagccggauaaccgcucuugagacaggaagcuuaccauggaacuacucaucuuaaaagcaaacgcaauaacaacuauucuaaccgcaguaacauuuuguuucgcaucaggacaaaacauaaccgaagaauuuuaccaaucaacauguuccgcaguuucaaaaggauacuuaggcgcacuaagaacaggcugguacaccuccgugauaacaauagaauuaucaaacauaaaagaaaacaaauguaauggaacugacgccaaaguaaaacuaauaaaacaagaacuagacaaauauaaaaacgcaguaacugaacuacaauuacuaaugcaauccaccccagcaacaggcucaggcucagcaauuugcuccggagucgcugucugcaaaguacuacaucuugaaggcgaagucaauaaaauaaaaucagcacuucuaucaacaaacaaagcaguagucucacuaucaaacggaguaucaguacuaacauuuaaaguauuagaucuaaaaaacuauauagauaaacaacuacuacccauacucaauaaacaauccuguucaauaccaaauauagaaaccguaauagaauuucaacaaaaaaacaaucgacuauuagaaaucacccgagaauuuucagucaaugcaggcguaacaacaccaguaucaaccuacauguuaaccaacuccgaacuacuaucccucauaaacgacaugccaauaacaaacgaucaaaaaaaacuaauguccaacaacguacaaauagucagacaacaaucuuauucaauaaugugcaucauaaaagaagaaguucuagccuacguaguucaacuuccauuauacggcguaauugauacaccaugcuggaaacuacacacauccccacuauguacaacaaacacaaaagaaggaucaaacaucugcuuaacuagaacagacagaggaugguacugcgacaacgcaggaucagucucauucuuuccacaagcagaaacaugcaagguccaaucaaacagaguauucugcgacacaaugaacuccuuaacacuaccaucugaaguaaaccuauguaauguagacauauuuaacccaaaauacgacugcaaaauaaugaccucaaaaacagacguauccucaucaguaauuacaagccucggagccauaguaucaugcuacggaaaaacaaaauguacagcaucaaacaaaaacagaggaauaauaaaaacguucuccaacggaugcgacuauguaucaaacaaaggcguagacacaguaucagucggaaauacccuuuacugcguaaacaaacaagaaggccaaagucuauacguaaaaggagagccaauaauaaacuuuuaugacccccuuguauucccaucugacgaauuugaugcaucaauaucccaagucaacgaaaaaaucaaccaaucauuagccuuuauuagaaaaagugacgaacuauuacacaacguuaaugcagggaaaucaacaacaaauauaaugauuacaaccauaauuauaguuaucauaguuauacuacucucacuaaucgcaguaggauuacuauuauacugcaaagcaagauaaggacuaguguccaccugucccuccugggcugcuggauugucucguuuuccugccaaauaaacaggaucagcgcuuuacagaucuaaaaaaaaaaaaaaaaaaaaaaaaaaaaaaaaaaaaaaaaaaaaaaaaaaaaaaaaaaaaaaaaugcaucccccccccccccccccccccccccccccccaaaggcucuuuucagagccaccagaauu

SEQ ID NO: 2205 - RNA, 1880 nt, Artificial Sequence
  mRNA product Design e-4 comprising derived and/or modified sequence from HRSV(A2)__F-del_DSCav1_mut1 (opt11)
gggagacuccugucgggcggaaguaggaggaguagaguuuaaaaacaguacucuuuuuccgguucgggacguaguugaagcaacgacaagccggauaaccgcucuugagacaggaagcuuaccauggaacuacucauccuaaaagccaacgcaaucacaaccauacuuacagcuguuaccuucugcuucgcauccggccaaaauaucaccgaagaguucuaccaaucaaccugcuccgccgucagcaaaggauaccucggcgcccuccgaaccggaugguacacuucugucaucacaaucgaacucuccaacaucaaagaaaacaaaugcaacgguaccgacgcgaaagucaaacucaucaaacaagaacuagacaaguacaaaaacgccgucaccgaacugcaacuccucaugcaauccacaccagcaacgggaucaggauccgccaucugcucaggcgucgccgucugcaaaguccugcaccuagaaggagaaguaaacaaaauuaaauccgcccuacucuccaccaacaaagcagucgucucacuauccaacggcgucuccguccucaccuuuaagguccucgaccucaaaaauuauauagacaaacaacuccuccccauccuaaacaaacaaucaugcuccauccccaacauagaaaccgucaucgaauuucaacagaaaaacaaccgacucuuagaaauuacccgcgaguucagcgucaacgccggagucaccacacccgucucaaccuacaugcucaccaacucagaacuccucucacuaaucaaugauaugcccaucacaaacgaccaaaagaaacucauguccaacaacguacaaaucguucgccaacaaagcuacuccaucauguguaucauuaaagaagaaguccucgccuacgucguccaacuuccgcucuacggcguaaucgacacccccugcuggaaacuucacaccucgccccucugcaccacaaacaccaaagaaggcuccaacaucugccuaacccgcaccgaccgcggcugguacugcgacaacgccggcuccgucucauuuuucccccaggcggagaccugcaaaguccaauccaaccgcgucuucugcgacaccaugaacucucuuacccucccaucagaaguaaaccucugcaacgucgacaucuuuaaccccaaauacgauugcaagauaaugaccuccaaaacagacgucucaucguccgucaucaccucccuaggagcuaucgucuccugcuacggcaagaccaaaugcaccgcuuccaacaaaaaccgcggcaucaucaaaaccuucuccaacgggugcgacuacgucucuaacaaaggcguggacacaguauccguaggaaacacacuguacugcguaaacaaacaagagggccaaucgcuuuacgucaaaggcgagccaauuaucaacuucuacgacccgcucgucuucccaucagacgaguucgacgcauccaucucccaagucaacgagaaaaucaaucagucccucgccuucauacgcaaauccgacgaacuccuacauaacguaaacgccggcaaaucuaccacaaacaucaugaucacaaccaucaucaucguaaucaucgucauccuucucucgcucaucgccguaggacugcuacuuuacugcaaggcccgcuaaggacuaguguccaccugucccuccugggcugcuggauugucucguuuuccugccaaauaaacaggaucagcgcuuuacagaucuaaaaaaaaaaaaaaaaaaaaaaaaaaaaaaaaaaaaaaaaaaaaaaaaaaaaaaaaaaaaaaaaugcaucccccccccccccccccccccccccccccccaaaggcucuuuucagagccaccagaauu

SEQ ID NO: 2206 - RNA, 1847 nt, Artificial Sequence
  mRNA product Design e-5 comprising derived and/or modified sequence from HRSV(A2)__F-del_DSCav1_mut1 (opt1)
gggagagcggcucggccauuuugucccagucaguccggaggcugcggcugcagaaguaccgccugcggaguaacugcaaagaagcuuaccauggagcugcucauccugaaggccaacgccaucaccaccauccugacggcggugaccuucugcuucgccagcggccagaacaucaccgaggaguucuaccaguccacgugcagcgccgucuccaagggguaccucggcgcccugcggaccggcugguacaccuccgugaucaccaucgagcugagcaacaucaaggagaacaagugcaacgggaccgacgccaaggugaagcucaucaagcaggagcuggacaaguacaagaacgcggucacggagcugcagcuccugaugcaguccaccccggcaaccggcuccggcuccgccaucugcagcggcgucgccgugugcaaggugcugcaccucgagggggaggucaacaagaucaagagcgcccugcuguccaccaacaaggccguggugagccucuccaacggcgucagcgugcugaccuucaaggugcuggaccucaagaacuacaucgacaagcagcugcugcccauccugaacaagcagagcugcuccauccccaacaucgagacggugaucgaguuccagcagaagaacaaccggcuccuggagaucacccgcgaguucagcgugaacgccggggucaccacccccguguccacguacaugcugaccaacagcgagcuccugucccugaucaacgacaugccgaucaccaacgaccagaagaagcucaugagcaacaacgugcagaucguccggcagcaguccuacagcaucaugugcaucaucaaggaggaggugcuggcguacgugguccagcugccccucuacggcgugaucgacacccccugcuggaagcugcacacgagcccccugugcaccaccaacaccaaggagggguccaacaucugccucacgcgcaccgaccggggcugguacugcgacaacgccggcagcgucuccuucuucccgcaggccgagaccugcaaggugcagagcaaccgcguguucugcgacaccaugaacucccugacgcugcccagcgagguaaaccucugcaacgucgacaucuucaaccccaaguacgacugcaagaucaugaccuccaagaccgacgugagcuccagcgugaucaccucccugggggccaucgucagcugcuacggcaagacgaagugcaccgccagcaacaagaaccgggggaucaucaagaccuucuccaacggcugcgacuacgugagcaacaagggcguggacaccguguccgucgggaacacccuguacugcgugaacaagcaggagggccagagccucuacgugaagggggagcccaucaucaacuucuacgacccgcuggucuuccccuccgacgaguucgacgcgagcaucucccaggugaacgagaagaucaaccagagccuggccuucauccgcaaguccgacgagcugcuccacaacgugaacgccggcaagagcacgaccaacaucaugaucaccaccaucaucaucgucaucaucgugauccugcugucccucaucgccguggggcugcugcucuacugcaaggcccggugaggacuaguguccaccugucccuccugggcugcuggauugucucguuuuccugccaaauaaacaggaucagcgcuuuacagaucuaaaaaaaaaaaaaaaaaaaaaaaaaaaaaaaaaaaaaaaaaaaaaaaaaaaaaaaaaaaaaaaaugcaucccccccccccccccccccccccccccccccaaaggcucuuuucagagccaccagaauu

SEQ ID NO: 2207 - RNA, 1847 nt, Artificial Sequence
  mRNA product Design e-5 comprising derived and/or modified sequence from HRSV(A2)__F-del_DSCav1_mut1 (opt1)
gggagagcggcucggccauuuugucccagucaguccggaggcugcggcugcagaaguaccgccugcggaguaacugcaaagaagcuuaccauggagcugcucauccugaaggccaacgccaucaccaccauccugacggcggugaccuucugcuucgccagcggccagaacaucaccgaggaguucuaccaguccacgugcagcgccgucuccaagggguaccucggcgcccugcgcaccgggugguacaccagcgugaucaccaucgagcuguccaacaucaaggagaacaagugcaacggcaccgacgccaaggugaagcucaucaagcaggagcuggacaaguacaagaacgcggucacggagcugcagcuccugaugcagagcacccccgccaccggguccggcagcgccaucugcuccggcguggccgugugcaagguccugcaccucgagggggaggugaacaagaucaagagcgcgcugcuguccaccaacaaggccguggucagccucuccaacggcgugagcgugcugacguucaagguccuggaccucaagaacuacaucgacaagcagcugcugccgauccucaacaagcaguccugcagcauccccaacaucgagaccgugaucgaguuccagcagaagaacaaccggcugcuggagaucacccgcgaguucuccgugaacgccggggucaccacgcccgugagcaccuacaugcucaccaacuccgagcugcugagccucaucaacgacaugcccaucaccaacgaccagaagaagcugaugagcaacaacgugcagaucguccggcagcaguccuacagcaucaugugcaucaucaaggaggaggugcuggccuacgugguccagcucccgcuguacggcgugaucgacacgcccugcuggaagcugcacaccagcccccucugcaccaccaacacgaaggagggguccaacaucugccugacccgcaccgaccggggcugguacugcgacaacgccggcuccgugagcuucuucccccaggcggagaccugcaagguccaguccaaccgcguguucugcgacacgaugaacagccugacccucccguccgaggucaaccugugcaacguggacaucuucaaccccaaguacgacugcaagaucaugaccagcaagaccgacguguccagcuccgucaucacgagccugggggccaucguguccugcuacggcaagaccaagugcaccgccagcaacaagaaccgggggaucaucaagaccuucuccaacggcugcgacuacgugagcaacaagggcgucgacacgguguccguggggaacacccucuacugcgucaacaagcaggagggccagagccuguacgugaagggggagcccaucaucaacuucuacgacccccugguguucccgagcgacgaguucgacgccuccaucagccaggucaacgagaagaucaaccagucccucgccuucauccgcaagagcgacgagcugcugcacaacgugaacgcgggcaaguccaccaccaacaucaugaucaccacgaucaucaucgugaucaucgucauccuccugagccugaucgccguggggcuccugcuguacugcaaggcccggugaggacuaguguccaccugucccuccugggcugcuggauugucucguuuuccugccaaauaaacaggaucagcgcuuuacagaucuaaaaaaaaaaaaaaaaaaaaaaaaaaaaaaaaaaaaaaaaaaaaaaaaaaaaaaaaaaaaaaaaugcaucccccccccccccccccccccccccccccccaaaggcucuuuucagagccaccagaauu

SEQ ID NO: 2208 - RNA, 1847 nt, Artificial Sequence
  mRNA product Design e-5 comprising derived and/or modified sequence from HRSV(A2)__F-del_DSCav1_mut1 (opt2)
gggagagcggcucggccauuuugucccagucaguccggaggcugcggcugcagaaguaccgccugcggaguaacugcaaagaagcuuaccauggagcuccucauccucaaggccaacgccaucaccaccauccucaccgccgucaccuucugcuucgccuccggccagaacaucaccgaggaguucuaccaguccaccugcuccgccgucuccaagggcuaccucggcgcccuccgcaccggcugguacaccuccgucaucaccaucgagcucuccaacaucaaggagaacaagugcaacggcaccgacgccaaggucaagcucaucaagcaggagcucgacaaguacaagaacgccgucaccgagcuccagcuccucaugcaguccacccccgccaccggcuccggcuccgccaucugcuccggcgucgccgucugcaagguccuccaccucgagggcgaggucaacaagaucaaguccgcccuccucuccaccaacaaggccgucgucucccucuccaacggcgucuccguccucaccuucaagguccucgaccucaagaacuacaucgacaagcagcuccuccccauccucaacaagcaguccugcuccauccccaacaucgagaccgucaucgaguuccagcagaagaacaaccgccuccucgagaucacccgcgaguucuccgucaacgccggcgucaccacccccgucuccaccuacaugcucaccaacuccgagcuccucucccucaucaacgacaugcccaucaccaacgaccagaagaagcucauguccaacaacguccagaucguccgccagcaguccuacuccaucaugugcaucaucaaggaggagguccucgccuacgucguccagcucccccucuacggcgucaucgacacccccugcuggaagcuccacaccuccccccucugcaccaccaacaccaaggagggcuccaacaucugccucacccgcaccgaccgcggcugguacugcgacaacgccggcuccgucuccuucuucccccaggccgagaccugcaagguccaguccaaccgcgucuucugcgacaccaugaacucccucacccuccccuccgaggucaaccucugcaacgucgacaucuucaaccccaaguacgacugcaagaucaugaccuccaagaccgacgucuccuccuccgucaucaccucccucggcgccaucgucuccugcuacggcaagaccaagugcaccgccuccaacaagaaccgcggcaucaucaagaccuucuccaacggcugcgacuacgucuccaacaagggcgucgacaccgucuccgucggcaacacccucuacugcgucaacaagcaggagggccagucccucuacgucaagggcgagcccaucaucaacuucuacgacccccucgucuuccccuccgacgaguucgacgccuccaucucccaggucaacgagaagaucaaccagucccucgccuucauccgcaaguccgacgagcuccuccacaacgucaacgccggcaaguccaccaccaacaucaugaucaccaccaucaucaucgucaucaucgucauccuccucucccucaucgccgucggccuccuccucuacugcaaggcccgcugaggacuaguguccaccugucccuccugggcugcuggauugucucguuuuccugccaaauaaacaggaucagcgcuuuacagaucuaaaaaaaaaaaaaaaaaaaaaaaaaaaaaaaaaaaaaaaaaaaaaaaaaaaaaaaaaaaaaaaaugcaucccccccccccccccccccccccccccccccaaaggcucuuuucagagccaccagaauu

SEQ ID NO: 2209 - RNA, 1847 nt, Artificial Sequence
  mRNA product Design e-5 comprising derived and/or modified sequence from HRSV(A2)__F-del_DSCav1_mut1 (opt3)
gggagagcggcucggccauuuugucccagucaguccggaggcugcggcugcagaaguaccgccugcggaguaacugcaaagaagcuuaccauggagcugcucauccuuaaggccaacgcuauuaccacaauacugacugcagugacguucugcuuugccagcggccagaauaucaccgaagaguucuaccaauccacauguucugcggucucaaaaggguauuugggagcuuuaagaacugguugguacaccaguguuauuacaaucgaacugagcaacauuaaggagaauaaaugcaacggcaccgacgccaaggugaaacuaaucaagcaggaacucgauaaguauaaaaaugcaguaacugagcugcagcuucugaugcaguccacacccgccaccgggucuggaucggcuauauguucaggcguggcagucugcaagguguugcaccucgagggugaaguuaacaaaaucaagagcgcccugcugaguacgaauaaagcuguggucucccucucuaacggggugagcguauuaacuuuuaagguucuggaccuuaagaauuacauugauaaacaauugcugccuauccuaaacaagcaguccuguucaauuccaaauaucgagaccgugauagaguuccagcagaaaaacaauaggcuccuggaaauuacacgggaguuuagugucaacgccggagugacuaccccggugagcacauauaugcuuaccaauucugaacuguugucccucaucaacgacaugcccauuacgaacgaucaaaagaaacugaugucaaauaacguccagaucguucgccagcagagcuacaguaucaugugcauuauaaaggaggaaguguuagcguauguagugcaacugccucucuacggcgucaucgacacuccauguuggaaacuucauacaucuccccugugcaccacuaauacaaaggagggcuccaacauuuguuugacccgaacggaucgugggugguacugcgacaaugcaggaagcgugucguucuuuccucaggccgaaaccuguaagguucagucuaacagaguguucugcgauacaaugaacucccuaacucugccaucagaggucaaucucugcaauguggacaucuuuaaccccaaauaugauuguaagauaaugaccaguaaaacagacguaagcuccucuguuauuacuagccugggugcuaucgugucaugcuacggcaagaccaaauguacagccaguaauaagaacagggggaucauuaagaccuucuccaauggaugcgauuaugucagcaacaaaggcguggacacugucucuguggguaauacgcuuuacuguguuaacaagcaagaggggcagucacuguaugugaaaggagaaccuaucauuaacuuuuacgacccauugguauucccgagugaugaguuugacgcaagcauaucccaggucaaugaaaagaucaaccagucucucgcuuucauucggaaaucggaugagcuguuacacaaugugaacgccggcaagagcacaaccaauaucaugaucacuaccauuauaaucguuauuaucgugauucugcuaucccucaucgcggucggccugcuuuuguauugcaaggcccgcugaggacuaguguccaccugucccuccugggcugcuggauugucucguuuuccugccaaauaaacaggaucagcgcuuuacagaucuaaaaaaaaaaaaaaaaaaaaaaaaaaaaaaaaaaaaaaaaaaaaaaaaaaaaaaaaaaaaaaaaugcaucccccccccccccccccccccccccccccccaaaggcucuuuucagagccaccagaauu

SEQ ID NO: 2210 - RNA, 1847 nt, Artificial Sequence
  mRNA product Design e-5 comprising derived and/or modified sequence from HRSV(A2)__F-del_DSCav1_mut1 (opt4)
gggagagcggcucggccauuuugucccagucaguccggaggcugcggcugcagaaguaccgccugcggaguaacugcaaagaagcuuaccauggagcugcugauccugaaggccaacgccaucaccaccauccugaccgccgugaccuucugcuucgccagcggccagaacaucaccgaggaguucuaccagagcaccugcagcgccgugagcaagggcuaccugggcgcccugagaaccggcugguacaccagcgugaucaccaucgagcugagcaacaucaaggagaacaagugcaacggcaccgacgccaaggugaagcugaucaagcaggagcuggacaaguacaagaacgccgugaccgagcugcagcugcugaugcagagcacccccgccaccggcagcggcagcgccaucugcagcggcguggccgugugcaaggugcugcaccuggagggcgaggugaacaagaucaagagcgcccugcugagcaccaacaaggccguggugagccugagcaacggcgugagcgugcugaccuucaaggugcuggaccugaagaacuacaucgacaagcagcugcugcccauccugaacaagcagagcugcagcauccccaacaucgagaccgugaucgaguuccagcagaagaacaacagacugcuggagaucaccagagaguucagcgugaacgccggcgugaccacccccgugagcaccuacaugcugaccaacagcgagcugcugagccugaucaacgacaugcccaucaccaacgaccagaagaagcugaugagcaacaacgugcagaucgugagacagcagagcuacagcaucaugugcaucaucaaggaggaggugcuggccuacguggugcagcugccccuguacggcgugaucgacacccccugcuggaagcugcacaccagcccccugugcaccaccaacaccaaggagggcagcaacaucugccugaccagaaccgacagaggcugguacugcgacaacgccggcagcgugagcuucuucccccaggccgagaccugcaaggugcagagcaacagaguguucugcgacaccaugaacagccugacccugcccagcgaggugaaccugugcaacguggacaucuucaaccccaaguacgacugcaagaucaugaccagcaagaccgacgugagcagcagcgugaucaccagccugggcgccaucgugagcugcuacggcaagaccaagugcaccgccagcaacaagaacagaggcaucaucaagaccuucagcaacggcugcgacuacgugagcaacaagggcguggacaccgugagcgugggcaacacccuguacugcgugaacaagcaggagggccagagccuguacgugaagggcgagcccaucaucaacuucuacgacccccugguguuccccagcgacgaguucgacgccagcaucagccaggugaacgagaagaucaaccagagccuggccuucaucagaaagagcgacgagcugcugcacaacgugaacgccggcaagagcaccaccaacaucaugaucaccaccaucaucaucgugaucaucgugauccugcugagccugaucgccgugggccugcugcuguacugcaaggccagaugaggacuaguguccaccugucccuccugggcugcuggauugucucguuuuccugccaaauaaacaggaucagcgcuuuacagaucuaaaaaaaaaaaaaaaaaaaaaaaaaaaaaaaaaaaaaaaaaaaaaaaaaaaaaaaaaaaaaaaaugcaucccccccccccccccccccccccccccccccaaaggcucuuuucagagccaccagaauu

SEQ ID NO: 2211 - RNA, 1847 nt, Artificial Sequence
  mRNA product Design e-5 comprising derived and/or modified sequence from HRSV(A2)__F-del_DSCav1_mut1 (opt5)
gggagagcggcucggccauuuugucccagucaguccggaggcugcggcugcagaaguaccgccugcggaguaacugcaaagaagcuuaccauggagcugcucauccugaaggccaacgcuauuaccacaauccuuacggccgugaccuucugcuuugcgagcggccagaauauuacagaagaguucuaccaauccaccuguucugcugucagcaaaggguaucugggagcccucagaacaggcugguacaccuccguuaucacaauugaacugucuaacaucaaggagaauaaaugcaacgggaccgacgccaaggugaaacuuaucaagcaggaacuggauaaguauaaaaaugcugugacggagcuccagcugcugaugcagagcacccccgccacaggauccggcucugcuauuuguagcggggucgccgugugcaagguucuccaccuggagggagaagugaacaaaaucaaguccgcgcuucugagcaccaauaaagccgucgugucucucuccaacggcguuagcgugcugacauuuaagguccuugaccugaagaauuacauugauaaacaacuccugccuauccugaacaagcagucuuguuccauuccgaauaucgagaccgugauugaguuccagcagaaaaacaaucggcuccuggaaaucacgcgcgaguuuagcgugaacgcuggcgucacaacccccguuucuacauauaugcuuaccaauuccgaacugcucagccugaucaacgacaugccuauuaccaacgaucaaaagaaacuuauguccaauaacgugcagaucgugagacagcagucuuacagcauuaugugcaucauuaaggaggaaguccuggccuaugugguucaacucccccuguacggggugaucgacacaccuuguuggaaacugcauacgagcccccucugcaccacaaauaccaaggagggauccaacaucugucugacacggaccgaucgcggcugguacugcgacaaugcugggucugucuccuucuuuccucaggccgaaacguguaaggugcagagcaacagaguuuucugcgauacaaugaacucucuuacccugccgagcgaggugaaucucugcaaugucgacauuuuuaaccccaaauaugauuguaagaucaugaccuccaaaacagacgugucuagcuccgucauuaccagccugggagcgaucgugucuugcuacggcaagacaaaauguacggccuccaauaagaaccgggggauuaucaagaccuucagcaauggaugcgauuauguuucuaacaaaggcguggacacagucuccgugggcaauacccuuuacuguguuaacaagcaagaggggcagagccuguaugugaaaggagaaccuaucauuaacuuuuacgacccccucgucuucccuuccgaugaguuugacgcuucuaucagccaggugaaugaaaagauuaaccagucccuggccuucauccgcaaaucugaugagcugcuccacaaugugaacgcuggcaagagcacaaccaauauuaugaucacgaccauuaucaucguuauuaucgucauucugcuuucccugaucgccguggggcuccugcuguauugcaaggccagaugaggacuaguguccaccugucccuccugggcugcuggauugucucguuuuccugccaaauaaacaggaucagcgcuuuacagaucuaaaaaaaaaaaaaaaaaaaaaaaaaaaaaaaaaaaaaaaaaaaaaaaaaaaaaaaaaaaaaaaaugcaucccccccccccccccccccccccccccccccaaaggcucuuuucagagccaccagaauu

SEQ ID NO: 2212 - RNA, 1847 nt, Artificial Sequence
  mRNA product Design e-5 comprising derived and/or modified sequence from HRSV(A2)__F-del_DSCav1_mut1 (opt6)
gggagagcggcucggccauuuugucccagucaguccggaggcugcggcugcagaaguaccgccugcggaguaacugcaaagaagcuuaccauggaacuacucaucuuaaaagcaaacgcaauaacaacuauucuaaccgcaguaacauuuuguuucgcaucaggacaaaacauaaccgaagaauuuuaccaaucaacauguuccgcaguuucaaaaggauacuuaggcgcacuaagaacaggcugguacaccuccgugauaacaauagaauuaucaaacauaaaagaaaacaaauguaauggaacugacgccaaaguaaaacuaauaaaacaagaacuagacaaauauaaaaacgcaguaacugaacuacaauuacuaaugcaauccaccccagcaacaggcucaggcucagcaauuugcuccggagucgcugucugcaaaguacuacaucuugaaggcgaagucaauaaaauaaaaucagcacuucuaucaacaaacaaagcaguagucucacuaucaaacggaguaucaguacuaacauuuaaaguauuagaucuaaaaaacuauauagauaaacaacuacuacccauacucaauaaacaauccuguucaauaccaaauauagaaaccguaauagaauuucaacaaaaaaacaaucgacuauuagaaaucacccgagaauuuucagucaaugcaggcguaacaacaccaguaucaaccuacauguuaaccaacuccgaacuacuaucccucauaaacgacaugccaauaacaaacgaucaaaaaaaacuaauguccaacaacguacaaauagucagacaacaaucuuauucaauaaugugcaucauaaaagaagaaguucuagccuacguaguucaacuuccauuauacggcguaauugauacaccaugcuggaaacuacacacauccccacuauguacaacaaacacaaaagaaggaucaaacaucugcuuaacuagaacagacagaggaugguacugcgacaacgcaggaucagucucauucuuuccacaagcagaaacaugcaagguccaaucaaacagaguauucugcgacacaaugaacuccuuaacacuaccaucugaaguaaaccuauguaauguagacauauuuaacccaaaauacgacugcaaaauaaugaccucaaaaacagacguauccucaucaguaauuacaagccucggagccauaguaucaugcuacggaaaaacaaaauguacagcaucaaacaaaaacagaggaauaauaaaaacguucuccaacggaugcgacuauguaucaaacaaaggcguagacacaguaucagucggaaauacccuuuacugcguaaacaaacaagaaggccaaagucuauacguaaaaggagagccaauaauaaacuuuuaugacccccuuguauucccaucugacgaauuugaugcaucaauaucccaagucaacgaaaaaaucaaccaaucauuagccuuuauuagaaaaagugacgaacuauuacacaacguuaaugcagggaaaucaacaacaaauauaaugauuacaaccauaauuauaguuaucauaguuauacuacucucacuaaucgcaguaggauuacuauuauacugcaaagcaagauaaggacuaguguccaccugucccuccugggcugcuggauugucucguuuuccugccaaauaaacaggaucagcgcuuuacagaucuaaaaaaaaaaaaaaaaaaaaaaaaaaaaaaaaaaaaaaaaaaaaaaaaaaaaaaaaaaaaaaaaugcaucccccccccccccccccccccccccccccccaaaggcucuuuucagagccaccagaauu

SEQ ID NO: 2213 - RNA, 1847 nt, Artificial Sequence
  mRNA product Design e-5 comprising derived and/or modified sequence from HRSV(A2)__F-del_DSCav1_mut1 (opt11)
gggagagcggcucggccauuuugucccagucaguccggaggcugcggcugcagaaguaccgccugcggaguaacugcaaagaagcuuaccauggaacuacucauccuaaaagccaacgcaaucacaaccauacuuacagcuguuaccuucugcuucgcauccggccaaaauaucaccgaagaguucuaccaaucaaccugcuccgccgucagcaaaggauaccucggcgcccuccgaaccggaugguacacuucugucaucacaaucgaacucuccaacaucaaagaaaacaaaugcaacgguaccgacgcgaaagucaaacucaucaaacaagaacuagacaaguacaaaaacgccgucaccgaacugcaacuccucaugcaauccacaccagcaacgggaucaggauccgccaucugcucaggcgucgccgucugcaaaguccugcaccuagaaggagaaguaaacaaaauuaaauccgcccuacucuccaccaacaaagcagucgucucacuauccaacggcgucuccguccucaccuuuaagguccucgaccucaaaaauuauauagacaaacaacuccuccccauccuaaacaaacaaucaugcuccauccccaacauagaaaccgucaucgaauuucaacagaaaaacaaccgacucuuagaaauuacccgcgaguucagcgucaacgccggagucaccacacccgucucaaccuacaugcucaccaacucagaacuccucucacuaaucaaugauaugcccaucacaaacgaccaaaagaaacucauguccaacaacguacaaaucguucgccaacaaagcuacuccaucauguguaucauuaaagaagaaguccucgccuacgucguccaacuuccgcucuacggcguaaucgacacccccugcuggaaacuucacaccucgccccucugcaccacaaacaccaaagaaggcuccaacaucugccuaacccgcaccgaccgcggcugguacugcgacaacgccggcuccgucucauuuuucccccaggcggagaccugcaaaguccaauccaaccgcgucuucugcgacaccaugaacucucuuacccucccaucagaaguaaaccucugcaacgucgacaucuuuaaccccaaauacgauugcaagauaaugaccuccaaaacagacgucucaucguccgucaucaccucccuaggagcuaucgucuccugcuacggcaagaccaaaugcaccgcuuccaacaaaaaccgcggcaucaucaaaaccuucuccaacgggugcgacuacgucucuaacaaaggcguggacacaguauccguaggaaacacacuguacugcguaaacaaacaagagggccaaucgcuuuacgucaaaggcgagccaauuaucaacuucuacgacccgcucgucuucccaucagacgaguucgacgcauccaucucccaagucaacgagaaaaucaaucagucccucgccuucauacgcaaauccgacgaacuccuacauaacguaaacgccggcaaaucuaccacaaacaucaugaucacaaccaucaucaucguaaucaucgucauccuucucucgcucaucgccguaggacugcuacuuuacugcaaggcccgcuaaggacuaguguccaccugucccuccugggcugcuggauugucucguuuuccugccaaauaaacaggaucagcgcuuuacagaucuaaaaaaaaaaaaaaaaaaaaaaaaaaaaaaaaaaaaaaaaaaaaaaaaaaaaaaaaaaaaaaaaugcaucccccccccccccccccccccccccccccccaaaggcucuuuucagagccaccagaauu

SEQ ID NO: 2214 - RNA, 1914 nt, Artificial Sequence
  mRNA product Design e-6 comprising derived and/or modified sequence from HRSV(A2)__F-del_DSCav1_mut1 (opt1)
gggagagcggcucggccauuuugucccagucaguccggaggcugcggcugcagaaguaccgccugcggaguaacugcaaagaagcuuaccauggagcugcucauccugaaggccaacgccaucaccaccauccugacggcggugaccuucugcuucgccagcggccagaacaucaccgaggaguucuaccaguccacgugcagcgccgucuccaagggguaccucggcgcccugcggaccggcugguacaccuccgugaucaccaucgagcugagcaacaucaaggagaacaagugcaacgggaccgacgccaaggugaagcucaucaagcaggagcuggacaaguacaagaacgcggucacggagcugcagcuccugaugcaguccaccccggcaaccggcuccggcuccgccaucugcagcggcgucgccgugugcaaggugcugcaccucgagggggaggucaacaagaucaagagcgcccugcuguccaccaacaaggccguggugagccucuccaacggcgucagcgugcugaccuucaaggugcuggaccucaagaacuacaucgacaagcagcugcugcccauccugaacaagcagagcugcuccauccccaacaucgagacggugaucgaguuccagcagaagaacaaccggcuccuggagaucacccgcgaguucagcgugaacgccggggucaccacccccguguccacguacaugcugaccaacagcgagcuccugucccugaucaacgacaugccgaucaccaacgaccagaagaagcucaugagcaacaacgugcagaucguccggcagcaguccuacagcaucaugugcaucaucaaggaggaggugcuggcguacgugguccagcugccccucuacggcgugaucgacacccccugcuggaagcugcacacgagcccccugugcaccaccaacaccaaggagggguccaacaucugccucacgcgcaccgaccggggcugguacugcgacaacgccggcagcgucuccuucuucccgcaggccgagaccugcaaggugcagagcaaccgcguguucugcgacaccaugaacucccugacgcugcccagcgagguaaaccucugcaacgucgacaucuucaaccccaaguacgacugcaagaucaugaccuccaagaccgacgugagcuccagcgugaucaccucccugggggccaucgucagcugcuacggcaagacgaagugcaccgccagcaacaagaaccgggggaucaucaagaccuucuccaacggcugcgacuacgugagcaacaagggcguggacaccguguccgucgggaacacccuguacugcgugaacaagcaggagggccagagccucuacgugaagggggagcccaucaucaacuucuacgacccgcuggucuuccccuccgacgaguucgacgcgagcaucucccaggugaacgagaagaucaaccagagccuggccuucauccgcaaguccgacgagcugcuccacaacgugaacgccggcaagagcacgaccaacaucaugaucaccaccaucaucaucgucaucaucgugauccugcugucccucaucgccguggggcugcugcucuacugcaaggcccggugaggacuaguacuggcugcaucucccuuuccucuguccuccauccuucucccaggauggugaagggggaccugguacccagugauccccaccccaggauccuaaaucaugacuuaccugcuaauaaaaacucauuggaaaagugagaagaucuaaaaaaaaaaaaaaaaaaaaaaaaaaaaaaaaaaaaaaaaaaaaaaaaaaaaaaaaaaaaaaaaugcaucccccccccccccccccccccccccccccccaaaggcucuuuucagagccaccagaauu

SEQ ID NO: 2215 - RNA, 1914 nt, Artificial Sequence
  mRNA product Design e-6 comprising derived and/or modified sequence from HRSV(A2)__F-del_DSCav1_mut1 (opt1)
gggagagcggcucggccauuuugucccagucaguccggaggcugcggcugcagaaguaccgccugcggaguaacugcaaagaagcuuaccauggagcugcucauccugaaggccaacgccaucaccaccauccugacggcggugaccuucugcuucgccagcggccagaacaucaccgaggaguucuaccaguccacgugcagcgccgucuccaagggguaccucggcgcccugcgcaccgggugguacaccagcgugaucaccaucgagcuguccaacaucaaggagaacaagugcaacggcaccgacgccaaggugaagcucaucaagcaggagcuggacaaguacaagaacgcggucacggagcugcagcuccugaugcagagcacccccgccaccggguccggcagcgccaucugcuccggcguggccgugugcaagguccugcaccucgagggggaggugaacaagaucaagagcgcgcugcuguccaccaacaaggccguggucagccucuccaacggcgugagcgugcugacguucaagguccuggaccucaagaacuacaucgacaagcagcugcugccgauccucaacaagcaguccugcagcauccccaacaucgagaccgugaucgaguuccagcagaagaacaaccggcugcuggagaucacccgcgaguucuccgugaacgccggggucaccacgcccgugagcaccuacaugcucaccaacuccgagcugcugagccucaucaacgacaugcccaucaccaacgaccagaagaagcugaugagcaacaacgugcagaucguccggcagcaguccuacagcaucaugugcaucaucaaggaggaggugcuggccuacgugguccagcucccgcuguacggcgugaucgacacgcccugcuggaagcugcacaccagcccccucugcaccaccaacacgaaggagggguccaacaucugccugacccgcaccgaccggggcugguacugcgacaacgccggcuccgugagcuucuucccccaggcggagaccugcaagguccaguccaaccgcguguucugcgacacgaugaacagccugacccucccguccgaggucaaccugugcaacguggacaucuucaaccccaaguacgacugcaagaucaugaccagcaagaccgacguguccagcuccgucaucacgagccugggggccaucguguccugcuacggcaagaccaagugcaccgccagcaacaagaaccgggggaucaucaagaccuucuccaacggcugcgacuacgugagcaacaagggcgucgacacgguguccguggggaacacccucuacugcgucaacaagcaggagggccagagccuguacgugaagggggagcccaucaucaacuucuacgacccccugguguucccgagcgacgaguucgacgccuccaucagccaggucaacgagaagaucaaccagucccucgccuucauccgcaagagcgacgagcugcugcacaacgugaacgcgggcaaguccaccaccaacaucaugaucaccacgaucaucaucgugaucaucgucauccuccugagccugaucgccguggggcuccugcuguacugcaaggcccggugaggacuaguacuggcugcaucucccuuuccucuguccuccauccuucucccaggauggugaagggggaccugguacccagugauccccaccccaggauccuaaaucaugacuuaccugcuaauaaaaacucauuggaaaagugagaagaucuaaaaaaaaaaaaaaaaaaaaaaaaaaaaaaaaaaaaaaaaaaaaaaaaaaaaaaaaaaaaaaaaugcaucccccccccccccccccccccccccccccccaaaggcucuuuucagagccaccagaauu

SEQ ID NO: 2216 - RNA, 1914 nt, Artificial Sequence
  mRNA product Design e-6 comprising derived and/or modified sequence from HRSV(A2)__F-del_DSCav1_mut1 (opt2)
gggagagcggcucggccauuuugucccagucaguccggaggcugcggcugcagaaguaccgccugcggaguaacugcaaagaagcuuaccauggagcuccucauccucaaggccaacgccaucaccaccauccucaccgccgucaccuucugcuucgccuccggccagaacaucaccgaggaguucuaccaguccaccugcuccgccgucuccaagggcuaccucggcgcccuccgcaccggcugguacaccuccgucaucaccaucgagcucuccaacaucaaggagaacaagugcaacggcaccgacgccaaggucaagcucaucaagcaggagcucgacaaguacaagaacgccgucaccgagcuccagcuccucaugcaguccacccccgccaccggcuccggcuccgccaucugcuccggcgucgccgucugcaagguccuccaccucgagggcgaggucaacaagaucaaguccgcccuccucuccaccaacaaggccgucgucucccucuccaacggcgucuccguccucaccuucaagguccucgaccucaagaacuacaucgacaagcagcuccuccccauccucaacaagcaguccugcuccauccccaacaucgagaccgucaucgaguuccagcagaagaacaaccgccuccucgagaucacccgcgaguucuccgucaacgccggcgucaccacccccgucuccaccuacaugcucaccaacuccgagcuccucucccucaucaacgacaugcccaucaccaacgaccagaagaagcucauguccaacaacguccagaucguccgccagcaguccuacuccaucaugugcaucaucaaggaggagguccucgccuacgucguccagcucccccucuacggcgucaucgacacccccugcuggaagcuccacaccuccccccucugcaccaccaacaccaaggagggcuccaacaucugccucacccgcaccgaccgcggcugguacugcgacaacgccggcuccgucuccuucuucccccaggccgagaccugcaagguccaguccaaccgcgucuucugcgacaccaugaacucccucacccuccccuccgaggucaaccucugcaacgucgacaucuucaaccccaaguacgacugcaagaucaugaccuccaagaccgacgucuccuccuccgucaucaccucccucggcgccaucgucuccugcuacggcaagaccaagugcaccgccuccaacaagaaccgcggcaucaucaagaccuucuccaacggcugcgacuacgucuccaacaagggcgucgacaccgucuccgucggcaacacccucuacugcgucaacaagcaggagggccagucccucuacgucaagggcgagcccaucaucaacuucuacgacccccucgucuuccccuccgacgaguucgacgccuccaucucccaggucaacgagaagaucaaccagucccucgccuucauccgcaaguccgacgagcuccuccacaacgucaacgccggcaaguccaccaccaacaucaugaucaccaccaucaucaucgucaucaucgucauccuccucucccucaucgccgucggccuccuccucuacugcaaggcccgcugaggacuaguacuggcugcaucucccuuuccucuguccuccauccuucucccaggauggugaagggggaccugguacccagugauccccaccccaggauccuaaaucaugacuuaccugcuaauaaaaacucauuggaaaagugagaagaucuaaaaaaaaaaaaaaaaaaaaaaaaaaaaaaaaaaaaaaaaaaaaaaaaaaaaaaaaaaaaaaaaugcaucccccccccccccccccccccccccccccccaaaggcucuuuucagagccaccagaauu

SEQ ID NO: 2217 - RNA, 1914 nt, Artificial Sequence
  mRNA product Design e-6 comprising derived and/or modified sequence from HRSV(A2)__F-del_DSCav1_mut1 (opt3)
gggagagcggcucggccauuuugucccagucaguccggaggcugcggcugcagaaguaccgccugcggaguaacugcaaagaagcuuaccauggagcugcucauccuuaaggccaacgcuauuaccacaauacugacugcagugacguucugcuuugccagcggccagaauaucaccgaagaguucuaccaauccacauguucugcggucucaaaaggguauuugggagcuuuaagaacugguugguacaccaguguuauuacaaucgaacugagcaacauuaaggagaauaaaugcaacggcaccgacgccaaggugaaacuaaucaagcaggaacucgauaaguauaaaaaugcaguaacugagcugcagcuucugaugcaguccacacccgccaccgggucuggaucggcuauauguucaggcguggcagucugcaagguguugcaccucgagggugaaguuaacaaaaucaagagcgcccugcugaguacgaauaaagcuguggucucccucucuaacggggugagcguauuaacuuuuaagguucuggaccuuaagaauuacauugauaaacaauugcugccuauccuaaacaagcaguccuguucaauuccaaauaucgagaccgugauagaguuccagcagaaaaacaauaggcuccuggaaauuacacgggaguuuagugucaacgccggagugacuaccccggugagcacauauaugcuuaccaauucugaacuguugucccucaucaacgacaugcccauuacgaacgaucaaaagaaacugaugucaaauaacguccagaucguucgccagcagagcuacaguaucaugugcauuauaaaggaggaaguguuagcguauguagugcaacugccucucuacggcgucaucgacacuccauguuggaaacuucauacaucuccccugugcaccacuaauacaaaggagggcuccaacauuuguuugacccgaacggaucgugggugguacugcgacaaugcaggaagcgugucguucuuuccucaggccgaaaccuguaagguucagucuaacagaguguucugcgauacaaugaacucccuaacucugccaucagaggucaaucucugcaauguggacaucuuuaaccccaaauaugauuguaagauaaugaccaguaaaacagacguaagcuccucuguuauuacuagccugggugcuaucgugucaugcuacggcaagaccaaauguacagccaguaauaagaacagggggaucauuaagaccuucuccaauggaugcgauuaugucagcaacaaaggcguggacacugucucuguggguaauacgcuuuacuguguuaacaagcaagaggggcagucacuguaugugaaaggagaaccuaucauuaacuuuuacgacccauugguauucccgagugaugaguuugacgcaagcauaucccaggucaaugaaaagaucaaccagucucucgcuuucauucggaaaucggaugagcuguuacacaaugugaacgccggcaagagcacaaccaauaucaugaucacuaccauuauaaucguuauuaucgugauucugcuaucccucaucgcggucggccugcuuuuguauugcaaggcccgcugaggacuaguacuggcugcaucucccuuuccucuguccuccauccuucucccaggauggugaagggggaccugguacccagugauccccaccccaggauccuaaaucaugacuuaccugcuaauaaaaacucauuggaaaagugagaagaucuaaaaaaaaaaaaaaaaaaaaaaaaaaaaaaaaaaaaaaaaaaaaaaaaaaaaaaaaaaaaaaaaugcaucccccccccccccccccccccccccccccccaaaggcucuuuucagagccaccagaauu

SEQ ID NO: 2218 - RNA, 1914 nt, Artificial Sequence
  mRNA product Design e-6 comprising derived and/or modified sequence from HRSV(A2)__F-del_DSCav1_mut1 (opt4)
gggagagcggcucggccauuuugucccagucaguccggaggcugcggcugcagaaguaccgccugcggaguaacugcaaagaagcuuaccauggagcugcugauccugaaggccaacgccaucaccaccauccugaccgccgugaccuucugcuucgccagcggccagaacaucaccgaggaguucuaccagagcaccugcagcgccgugagcaagggcuaccugggcgcccugagaaccggcugguacaccagcgugaucaccaucgagcugagcaacaucaaggagaacaagugcaacggcaccgacgccaaggugaagcugaucaagcaggagcuggacaaguacaagaacgccgugaccgagcugcagcugcugaugcagagcacccccgccaccggcagcggcagcgccaucugcagcggcguggccgugugcaaggugcugcaccuggagggcgaggugaacaagaucaagagcgcccugcugagcaccaacaaggccguggugagccugagcaacggcgugagcgugcugaccuucaaggugcuggaccugaagaacuacaucgacaagcagcugcugcccauccugaacaagcagagcugcagcauccccaacaucgagaccgugaucgaguuccagcagaagaacaacagacugcuggagaucaccagagaguucagcgugaacgccggcgugaccacccccgugagcaccuacaugcugaccaacagcgagcugcugagccugaucaacgacaugcccaucaccaacgaccagaagaagcugaugagcaacaacgugcagaucgugagacagcagagcuacagcaucaugugcaucaucaaggaggaggugcuggccuacguggugcagcugccccuguacggcgugaucgacacccccugcuggaagcugcacaccagcccccugugcaccaccaacaccaaggagggcagcaacaucugccugaccagaaccgacagaggcugguacugcgacaacgccggcagcgugagcuucuucccccaggccgagaccugcaaggugcagagcaacagaguguucugcgacaccaugaacagccugacccugcccagcgaggugaaccugugcaacguggacaucuucaaccccaaguacgacugcaagaucaugaccagcaagaccgacgugagcagcagcgugaucaccagccugggcgccaucgugagcugcuacggcaagaccaagugcaccgccagcaacaagaacagaggcaucaucaagaccuucagcaacggcugcgacuacgugagcaacaagggcguggacaccgugagcgugggcaacacccuguacugcgugaacaagcaggagggccagagccuguacgugaagggcgagcccaucaucaacuucuacgacccccugguguuccccagcgacgaguucgacgccagcaucagccaggugaacgagaagaucaaccagagccuggccuucaucagaaagagcgacgagcugcugcacaacgugaacgccggcaagagcaccaccaacaucaugaucaccaccaucaucaucgugaucaucgugauccugcugagccugaucgccgugggccugcugcuguacugcaaggccagaugaggacuaguacuggcugcaucucccuuuccucuguccuccauccuucucccaggauggugaagggggaccugguacccagugauccccaccccaggauccuaaaucaugacuuaccugcuaauaaaaacucauuggaaaagugagaagaucuaaaaaaaaaaaaaaaaaaaaaaaaaaaaaaaaaaaaaaaaaaaaaaaaaaaaaaaaaaaaaaaaugcaucccccccccccccccccccccccccccccccaaaggcucuuuucagagccaccagaauu

SEQ ID NO: 2219 - RNA, 1914 nt, Artificial Sequence
  mRNA product Design e-6 comprising derived and/or modified sequence from HRSV(A2)__F-del_DSCav1_mut1 (opt5)
gggagagcggcucggccauuuugucccagucaguccggaggcugcggcugcagaaguaccgccugcggaguaacugcaaagaagcuuaccauggagcugcucauccugaaggccaacgcuauuaccacaauccuuacggccgugaccuucugcuuugcgagcggccagaauauuacagaagaguucuaccaauccaccuguucugcugucagcaaaggguaucugggagcccucagaacaggcugguacaccuccguuaucacaauugaacugucuaacaucaaggagaauaaaugcaacgggaccgacgccaaggugaaacuuaucaagcaggaacuggauaaguauaaaaaugcugugacggagcuccagcugcugaugcagagcacccccgccacaggauccggcucugcuauuuguagcggggucgccgugugcaagguucuccaccuggagggagaagugaacaaaaucaaguccgcgcuucugagcaccaauaaagccgucgugucucucuccaacggcguuagcgugcugacauuuaagguccuugaccugaagaauuacauugauaaacaacuccugccuauccugaacaagcagucuuguuccauuccgaauaucgagaccgugauugaguuccagcagaaaaacaaucggcuccuggaaaucacgcgcgaguuuagcgugaacgcuggcgucacaacccccguuucuacauauaugcuuaccaauuccgaacugcucagccugaucaacgacaugccuauuaccaacgaucaaaagaaacuuauguccaauaacgugcagaucgugagacagcagucuuacagcauuaugugcaucauuaaggaggaaguccuggccuaugugguucaacucccccuguacggggugaucgacacaccuuguuggaaacugcauacgagcccccucugcaccacaaauaccaaggagggauccaacaucugucugacacggaccgaucgcggcugguacugcgacaaugcugggucugucuccuucuuuccucaggccgaaacguguaaggugcagagcaacagaguuuucugcgauacaaugaacucucuuacccugccgagcgaggugaaucucugcaaugucgacauuuuuaaccccaaauaugauuguaagaucaugaccuccaaaacagacgugucuagcuccgucauuaccagccugggagcgaucgugucuugcuacggcaagacaaaauguacggccuccaauaagaaccgggggauuaucaagaccuucagcaauggaugcgauuauguuucuaacaaaggcguggacacagucuccgugggcaauacccuuuacuguguuaacaagcaagaggggcagagccuguaugugaaaggagaaccuaucauuaacuuuuacgacccccucgucuucccuuccgaugaguuugacgcuucuaucagccaggugaaugaaaagauuaaccagucccuggccuucauccgcaaaucugaugagcugcuccacaaugugaacgcuggcaagagcacaaccaauauuaugaucacgaccauuaucaucguuauuaucgucauucugcuuucccugaucgccguggggcuccugcuguauugcaaggccagaugaggacuaguacuggcugcaucucccuuuccucuguccuccauccuucucccaggauggugaagggggaccugguacccagugauccccaccccaggauccuaaaucaugacuuaccugcuaauaaaaacucauuggaaaagugagaagaucuaaaaaaaaaaaaaaaaaaaaaaaaaaaaaaaaaaaaaaaaaaaaaaaaaaaaaaaaaaaaaaaaugcaucccccccccccccccccccccccccccccccaaaggcucuuuucagagccaccagaauu

SEQ ID NO: 2220 - RNA, 1914 nt, Artificial Sequence
  mRNA product Design e-6 comprising derived and/or modified sequence from HRSV(A2)__F-del_DSCav1_mut1 (opt6)
gggagagcggcucggccauuuugucccagucaguccggaggcugcggcugcagaaguaccgccugcggaguaacugcaaagaagcuuaccauggaacuacucaucuuaaaagcaaacgcaauaacaacuauucuaaccgcaguaacauuuuguuucgcaucaggacaaaacauaaccgaagaauuuuaccaaucaacauguuccgcaguuucaaaaggauacuuaggcgcacuaagaacaggcugguacaccuccgugauaacaauagaauuaucaaacauaaaagaaaacaaauguaauggaacugacgccaaaguaaaacuaauaaaacaagaacuagacaaauauaaaaacgcaguaacugaacuacaauuacuaaugcaauccaccccagcaacaggcucaggcucagcaauuugcuccggagucgcugucugcaaaguacuacaucuugaaggcgaagucaauaaaauaaaaucagcacuucuaucaacaaacaaagcaguagucucacuaucaaacggaguaucaguacuaacauuuaaaguauuagaucuaaaaaacuauauagauaaacaacuacuacccauacucaauaaacaauccuguucaauaccaaauauagaaaccguaauagaauuucaacaaaaaaacaaucgacuauuagaaaucacccgagaauuuucagucaaugcaggcguaacaacaccaguaucaaccuacauguuaaccaacuccgaacuacuaucccucauaaacgacaugccaauaacaaacgaucaaaaaaaacuaauguccaacaacguacaaauagucagacaacaaucuuauucaauaaugugcaucauaaaagaagaaguucuagccuacguaguucaacuuccauuauacggcguaauugauacaccaugcuggaaacuacacacauccccacuauguacaacaaacacaaaagaaggaucaaacaucugcuuaacuagaacagacagaggaugguacugcgacaacgcaggaucagucucauucuuuccacaagcagaaacaugcaagguccaaucaaacagaguauucugcgacacaaugaacuccuuaacacuaccaucugaaguaaaccuauguaauguagacauauuuaacccaaaauacgacugcaaaauaaugaccucaaaaacagacguauccucaucaguaauuacaagccucggagccauaguaucaugcuacggaaaaacaaaauguacagcaucaaacaaaaacagaggaauaauaaaaacguucuccaacggaugcgacuauguaucaaacaaaggcguagacacaguaucagucggaaauacccuuuacugcguaaacaaacaagaaggccaaagucuauacguaaaaggagagccaauaauaaacuuuuaugacccccuuguauucccaucugacgaauuugaugcaucaauaucccaagucaacgaaaaaaucaaccaaucauuagccuuuauuagaaaaagugacgaacuauuacacaacguuaaugcagggaaaucaacaacaaauauaaugauuacaaccauaauuauaguuaucauaguuauacuacucucacuaaucgcaguaggauuacuauuauacugcaaagcaagauaaggacuaguacuggcugcaucucccuuuccucuguccuccauccuucucccaggauggugaagggggaccugguacccagugauccccaccccaggauccuaaaucaugacuuaccugcuaauaaaaacucauuggaaaagugagaagaucuaaaaaaaaaaaaaaaaaaaaaaaaaaaaaaaaaaaaaaaaaaaaaaaaaaaaaaaaaaaaaaaaugcaucccccccccccccccccccccccccccccccaaaggcucuuuucagagccaccagaauu

SEQ ID NO: 2221 - RNA, 1914 nt, Artificial Sequence
  mRNA product Design e-6 comprising derived and/or modified sequence from HRSV(A2)__F-del_DSCav1_mut1 (opt11)
gggagagcggcucggccauuuugucccagucaguccggaggcugcggcugcagaaguaccgccugcggaguaacugcaaagaagcuuaccauggaacuacucauccuaaaagccaacgcaaucacaaccauacuuacagcuguuaccuucugcuucgcauccggccaaaauaucaccgaagaguucuaccaaucaaccugcuccgccgucagcaaaggauaccucggcgcccuccgaaccggaugguacacuucugucaucacaaucgaacucuccaacaucaaagaaaacaaaugcaacgguaccgacgcgaaagucaaacucaucaaacaagaacuagacaaguacaaaaacgccgucaccgaacugcaacuccucaugcaauccacaccagcaacgggaucaggauccgccaucugcucaggcgucgccgucugcaaaguccugcaccuagaaggagaaguaaacaaaauuaaauccgcccuacucuccaccaacaaagcagucgucucacuauccaacggcgucuccguccucaccuuuaagguccucgaccucaaaaauuauauagacaaacaacuccuccccauccuaaacaaacaaucaugcuccauccccaacauagaaaccgucaucgaauuucaacagaaaaacaaccgacucuuagaaauuacccgcgaguucagcgucaacgccggagucaccacacccgucucaaccuacaugcucaccaacucagaacuccucucacuaaucaaugauaugcccaucacaaacgaccaaaagaaacucauguccaacaacguacaaaucguucgccaacaaagcuacuccaucauguguaucauuaaagaagaaguccucgccuacgucguccaacuuccgcucuacggcguaaucgacacccccugcuggaaacuucacaccucgccccucugcaccacaaacaccaaagaaggcuccaacaucugccuaacccgcaccgaccgcggcugguacugcgacaacgccggcuccgucucauuuuucccccaggcggagaccugcaaaguccaauccaaccgcgucuucugcgacaccaugaacucucuuacccucccaucagaaguaaaccucugcaacgucgacaucuuuaaccccaaauacgauugcaagauaaugaccuccaaaacagacgucucaucguccgucaucaccucccuaggagcuaucgucuccugcuacggcaagaccaaaugcaccgcuuccaacaaaaaccgcggcaucaucaaaaccuucuccaacgggugcgacuacgucucuaacaaaggcguggacacaguauccguaggaaacacacuguacugcguaaacaaacaagagggccaaucgcuuuacgucaaaggcgagccaauuaucaacuucuacgacccgcucgucuucccaucagacgaguucgacgcauccaucucccaagucaacgagaaaaucaaucagucccucgccuucauacgcaaauccgacgaacuccuacauaacguaaacgccggcaaaucuaccacaaacaucaugaucacaaccaucaucaucguaaucaucgucauccuucucucgcucaucgccguaggacugcuacuuuacugcaaggcccgcuaaggacuaguacuggcugcaucucccuuuccucuguccuccauccuucucccaggauggugaagggggaccugguacccagugauccccaccccaggauccuaaaucaugacuuaccugcuaauaaaaacucauuggaaaagugagaagaucuaaaaaaaaaaaaaaaaaaaaaaaaaaaaaaaaaaaaaaaaaaaaaaaaaaaaaaaaaaaaaaaaugcaucccccccccccccccccccccccccccccccaaaggcucuuuucagagccaccagaauu

SEQ ID NO: 2222 - RNA, 2130 nt, Artificial Sequence
  mRNA product Design f-1 comprising derived and/or modified sequence from HRSV(A2)__F-del_DSCav1_mut1 (opt1)
gggagagcggcucggccauuuugucccagucaguccggaggcugcggcugcagaaguaccgccugcggaguaacugcaaagaagcuuaccauggagcugcucauccugaaggccaacgccaucaccaccauccugacggcggugaccuucugcuucgccagcggccagaacaucaccgaggaguucuaccaguccacgugcagcgccgucuccaagggguaccucggcgcccugcggaccggcugguacaccuccgugaucaccaucgagcugagcaacaucaaggagaacaagugcaacgggaccgacgccaaggugaagcucaucaagcaggagcuggacaaguacaagaacgcggucacggagcugcagcuccugaugcaguccaccccggcaaccggcuccggcuccgccaucugcagcggcgucgccgugugcaaggugcugcaccucgagggggaggucaacaagaucaagagcgcccugcuguccaccaacaaggccguggugagccucuccaacggcgucagcgugcugaccuucaaggugcuggaccucaagaacuacaucgacaagcagcugcugcccauccugaacaagcagagcugcuccauccccaacaucgagacggugaucgaguuccagcagaagaacaaccggcuccuggagaucacccgcgaguucagcgugaacgccggggucaccacccccguguccacguacaugcugaccaacagcgagcuccugucccugaucaacgacaugccgaucaccaacgaccagaagaagcucaugagcaacaacgugcagaucguccggcagcaguccuacagcaucaugugcaucaucaaggaggaggugcuggcguacgugguccagcugccccucuacggcgugaucgacacccccugcuggaagcugcacacgagcccccugugcaccaccaacaccaaggagggguccaacaucugccucacgcgcaccgaccggggcugguacugcgacaacgccggcagcgucuccuucuucccgcaggccgagaccugcaaggugcagagcaaccgcguguucugcgacaccaugaacucccugacgcugcccagcgagguaaaccucugcaacgucgacaucuucaaccccaaguacgacugcaagaucaugaccuccaagaccgacgugagcuccagcgugaucaccucccugggggccaucgucagcugcuacggcaagacgaagugcaccgccagcaacaagaaccgggggaucaucaagaccuucuccaacggcugcgacuacgugagcaacaagggcguggacaccguguccgucgggaacacccuguacugcgugaacaagcaggagggccagagccucuacgugaagggggagcccaucaucaacuucuacgacccgcuggucuuccccuccgacgaguucgacgcgagcaucucccaggugaacgagaagaucaaccagagccuggccuucauccgcaaguccgacgagcugcuccacaacgugaacgccggcaagagcacgaccaacaucaugaucaccaccaucaucaucgucaucaucgugauccugcugucccucaucgccguggggcugcugcucuacugcaaggcccggugaggacuagugaagggaacacccaaauuuaauucagccuuaagcacaauuaauuaagagugaaacguaauuguacaagcaguuggucacccaccauagggcaugaucaacaccgcaaccuuuccuuuuucccccagugauucugaaaaaccccucuucccuucagcuugcuuagauguuccaaauuuaguaagcuuaaggcggccuacagaagaaaaagaaaaaaaaggccacaaaaguucccucucacuuucaguaaauaaaauaaaagcagcaacagaaauaaagaaauaaaugaaauucaaaaugaaauaaauauuguguugugcagcauuaaaaaaucaauaaaaauuaaaaaugagcaagaucuaaaaaaaaaaaaaaaaaaaaaaaaaaaaaaaaaaaaaaaaaaaaaaaaaaaaaaaaaaaaaaaaugcaucccccccccccccccccccccccccccccccaaaggcucuuuucagagccaccagaauu

SEQ ID NO: 2223 - RNA, 2130 nt, Artificial Sequence
  mRNA product Design f-1 comprising derived and/or modified sequence from HRSV(A2)__F-del_DSCav1_mut1 (opt1)
gggagagcggcucggccauuuugucccagucaguccggaggcugcggcugcagaaguaccgccugcggaguaacugcaaagaagcuuaccauggagcugcucauccugaaggccaacgccaucaccaccauccugacggcggugaccuucugcuucgccagcggccagaacaucaccgaggaguucuaccaguccacgugcagcgccgucuccaagggguaccucggcgcccugcgcaccgggugguacaccagcgugaucaccaucgagcuguccaacaucaaggagaacaagugcaacggcaccgacgccaaggugaagcucaucaagcaggagcuggacaaguacaagaacgcggucacggagcugcagcuccugaugcagagcacccccgccaccggguccggcagcgccaucugcuccggcguggccgugugcaagguccugcaccucgagggggaggugaacaagaucaagagcgcgcugcuguccaccaacaaggccguggucagccucuccaacggcgugagcgugcugacguucaagguccuggaccucaagaacuacaucgacaagcagcugcugccgauccucaacaagcaguccugcagcauccccaacaucgagaccgugaucgaguuccagcagaagaacaaccggcugcuggagaucacccgcgaguucuccgugaacgccggggucaccacgcccgugagcaccuacaugcucaccaacuccgagcugcugagccucaucaacgacaugcccaucaccaacgaccagaagaagcugaugagcaacaacgugcagaucguccggcagcaguccuacagcaucaugugcaucaucaaggaggaggugcuggccuacgugguccagcucccgcuguacggcgugaucgacacgcccugcuggaagcugcacaccagcccccucugcaccaccaacacgaaggagggguccaacaucugccugacccgcaccgaccggggcugguacugcgacaacgccggcuccgugagcuucuucccccaggcggagaccugcaagguccaguccaaccgcguguucugcgacacgaugaacagccugacccucccguccgaggucaaccugugcaacguggacaucuucaaccccaaguacgacugcaagaucaugaccagcaagaccgacguguccagcuccgucaucacgagccugggggccaucguguccugcuacggcaagaccaagugcaccgccagcaacaagaaccgggggaucaucaagaccuucuccaacggcugcgacuacgugagcaacaagggcgucgacacgguguccguggggaacacccucuacugcgucaacaagcaggagggccagagccuguacgugaagggggagcccaucaucaacuucuacgacccccugguguucccgagcgacgaguucgacgccuccaucagccaggucaacgagaagaucaaccagucccucgccuucauccgcaagagcgacgagcugcugcacaacgugaacgcgggcaaguccaccaccaacaucaugaucaccacgaucaucaucgugaucaucgucauccuccugagccugaucgccguggggcuccugcuguacugcaaggcccggugaggacuagugaagggaacacccaaauuuaauucagccuuaagcacaauuaauuaagagugaaacguaauuguacaagcaguuggucacccaccauagggcaugaucaacaccgcaaccuuuccuuuuucccccagugauucugaaaaaccccucuucccuucagcuugcuuagauguuccaaauuuaguaagcuuaaggcggccuacagaagaaaaagaaaaaaaaggccacaaaaguucccucucacuuucaguaaauaaaauaaaagcagcaacagaaauaaagaaauaaaugaaauucaaaaugaaauaaauauuguguugugcagcauuaaaaaaucaauaaaaauuaaaaaugagcaagaucuaaaaaaaaaaaaaaaaaaaaaaaaaaaaaaaaaaaaaaaaaaaaaaaaaaaaaaaaaaaaaaaaugcaucccccccccccccccccccccccccccccccaaaggcucuuuucagagccaccagaauu

SEQ ID NO: 2224 - RNA, 2130 nt, Artificial Sequence
  mRNA product Design f-1 comprising derived and/or modified sequence from HRSV(A2)__F-del_DSCav1_mut1 (opt2)
gggagagcggcucggccauuuugucccagucaguccggaggcugcggcugcagaaguaccgccugcggaguaacugcaaagaagcuuaccauggagcuccucauccucaaggccaacgccaucaccaccauccucaccgccgucaccuucugcuucgccuccggccagaacaucaccgaggaguucuaccaguccaccugcuccgccgucuccaagggcuaccucggcgcccuccgcaccggcugguacaccuccgucaucaccaucgagcucuccaacaucaaggagaacaagugcaacggcaccgacgccaaggucaagcucaucaagcaggagcucgacaaguacaagaacgccgucaccgagcuccagcuccucaugcaguccacccccgccaccggcuccggcuccgccaucugcuccggcgucgccgucugcaagguccuccaccucgagggcgaggucaacaagaucaaguccgcccuccucuccaccaacaaggccgucgucucccucuccaacggcgucuccguccucaccuucaagguccucgaccucaagaacuacaucgacaagcagcuccuccccauccucaacaagcaguccugcuccauccccaacaucgagaccgucaucgaguuccagcagaagaacaaccgccuccucgagaucacccgcgaguucuccgucaacgccggcgucaccacccccgucuccaccuacaugcucaccaacuccgagcuccucucccucaucaacgacaugcccaucaccaacgaccagaagaagcucauguccaacaacguccagaucguccgccagcaguccuacuccaucaugugcaucaucaaggaggagguccucgccuacgucguccagcucccccucuacggcgucaucgacacccccugcuggaagcuccacaccuccccccucugcaccaccaacaccaaggagggcuccaacaucugccucacccgcaccgaccgcggcugguacugcgacaacgccggcuccgucuccuucuucccccaggccgagaccugcaagguccaguccaaccgcgucuucugcgacaccaugaacucccucacccuccccuccgaggucaaccucugcaacgucgacaucuucaaccccaaguacgacugcaagaucaugaccuccaagaccgacgucuccuccuccgucaucaccucccucggcgccaucgucuccugcuacggcaagaccaagugcaccgccuccaacaagaaccgcggcaucaucaagaccuucuccaacggcugcgacuacgucuccaacaagggcgucgacaccgucuccgucggcaacacccucuacugcgucaacaagcaggagggccagucccucuacgucaagggcgagcccaucaucaacuucuacgacccccucgucuuccccuccgacgaguucgacgccuccaucucccaggucaacgagaagaucaaccagucccucgccuucauccgcaaguccgacgagcuccuccacaacgucaacgccggcaaguccaccaccaacaucaugaucaccaccaucaucaucgucaucaucgucauccuccucucccucaucgccgucggccuccuccucuacugcaaggcccgcugaggacuagugaagggaacacccaaauuuaauucagccuuaagcacaauuaauuaagagugaaacguaauuguacaagcaguuggucacccaccauagggcaugaucaacaccgcaaccuuuccuuuuucccccagugauucugaaaaaccccucuucccuucagcuugcuuagauguuccaaauuuaguaagcuuaaggcggccuacagaagaaaaagaaaaaaaaggccacaaaaguucccucucacuuucaguaaauaaaauaaaagcagcaacagaaauaaagaaauaaaugaaauucaaaaugaaauaaauauuguguugugcagcauuaaaaaaucaauaaaaauuaaaaaugagcaagaucuaaaaaaaaaaaaaaaaaaaaaaaaaaaaaaaaaaaaaaaaaaaaaaaaaaaaaaaaaaaaaaaaugcaucccccccccccccccccccccccccccccccaaaggcucuuuucagagccaccagaauu

SEQ ID NO: 2225 - RNA, 2130 nt, Artificial Sequence
  mRNA product Design f-1 comprising derived and/or modified sequence from HRSV(A2)__F-del_DSCav1_mut1 (opt3)
gggagagcggcucggccauuuugucccagucaguccggaggcugcggcugcagaaguaccgccugcggaguaacugcaaagaagcuuaccauggagcugcucauccuuaaggccaacgcuauuaccacaauacugacugcagugacguucugcuuugccagcggccagaauaucaccgaagaguucuaccaauccacauguucugcggucucaaaaggguauuugggagcuuuaagaacugguugguacaccaguguuauuacaaucgaacugagcaacauuaaggagaauaaaugcaacggcaccgacgccaaggugaaacuaaucaagcaggaacucgauaaguauaaaaaugcaguaacugagcugcagcuucugaugcaguccacacccgccaccgggucuggaucggcuauauguucaggcguggcagucugcaagguguugcaccucgagggugaaguuaacaaaaucaagagcgcccugcugaguacgaauaaagcuguggucucccucucuaacggggugagcguauuaacuuuuaagguucuggaccuuaagaauuacauugauaaacaauugcugccuauccuaaacaagcaguccuguucaauuccaaauaucgagaccgugauagaguuccagcagaaaaacaauaggcuccuggaaauuacacgggaguuuagugucaacgccggagugacuaccccggugagcacauauaugcuuaccaauucugaacuguugucccucaucaacgacaugcccauuacgaacgaucaaaagaaacugaugucaaauaacguccagaucguucgccagcagagcuacaguaucaugugcauuauaaaggaggaaguguuagcguauguagugcaacugccucucuacggcgucaucgacacuccauguuggaaacuucauacaucuccccugugcaccacuaauacaaaggagggcuccaacauuuguuugacccgaacggaucgugggugguacugcgacaaugcaggaagcgugucguucuuuccucaggccgaaaccuguaagguucagucuaacagaguguucugcgauacaaugaacucccuaacucugccaucagaggucaaucucugcaauguggacaucuuuaaccccaaauaugauuguaagauaaugaccaguaaaacagacguaagcuccucuguuauuacuagccugggugcuaucgugucaugcuacggcaagaccaaauguacagccaguaauaagaacagggggaucauuaagaccuucuccaauggaugcgauuaugucagcaacaaaggcguggacacugucucuguggguaauacgcuuuacuguguuaacaagcaagaggggcagucacuguaugugaaaggagaaccuaucauuaacuuuuacgacccauugguauucccgagugaugaguuugacgcaagcauaucccaggucaaugaaaagaucaaccagucucucgcuuucauucggaaaucggaugagcuguuacacaaugugaacgccggcaagagcacaaccaauaucaugaucacuaccauuauaaucguuauuaucgugauucugcuaucccucaucgcggucggccugcuuuuguauugcaaggcccgcugaggacuagugaagggaacacccaaauuuaauucagccuuaagcacaauuaauuaagagugaaacguaauuguacaagcaguuggucacccaccauagggcaugaucaacaccgcaaccuuuccuuuuucccccagugauucugaaaaaccccucuucccuucagcuugcuuagauguuccaaauuuaguaagcuuaaggcggccuacagaagaaaaagaaaaaaaaggccacaaaaguucccucucacuuucaguaaauaaaauaaaagcagcaacagaaauaaagaaauaaaugaaauucaaaaugaaauaaauauuguguugugcagcauuaaaaaaucaauaaaaauuaaaaaugagcaagaucuaaaaaaaaaaaaaaaaaaaaaaaaaaaaaaaaaaaaaaaaaaaaaaaaaaaaaaaaaaaaaaaaugcaucccccccccccccccccccccccccccccccaaaggcucuuuucagagccaccagaauu

SEQ ID NO: 2226 - RNA, 2130 nt, Artificial Sequence
  mRNA product Design f-1 comprising derived and/or modified sequence from HRSV(A2)__F-del_DSCav1_mut1 (opt4)
gggagagcggcucggccauuuugucccagucaguccggaggcugcggcugcagaaguaccgccugcggaguaacugcaaagaagcuuaccauggagcugcugauccugaaggccaacgccaucaccaccauccugaccgccgugaccuucugcuucgccagcggccagaacaucaccgaggaguucuaccagagcaccugcagcgccgugagcaagggcuaccugggcgcccugagaaccggcugguacaccagcgugaucaccaucgagcugagcaacaucaaggagaacaagugcaacggcaccgacgccaaggugaagcugaucaagcaggagcuggacaaguacaagaacgccgugaccgagcugcagcugcugaugcagagcacccccgccaccggcagcggcagcgccaucugcagcggcguggccgugugcaaggugcugcaccuggagggcgaggugaacaagaucaagagcgcccugcugagcaccaacaaggccguggugagccugagcaacggcgugagcgugcugaccuucaaggugcuggaccugaagaacuacaucgacaagcagcugcugcccauccugaacaagcagagcugcagcauccccaacaucgagaccgugaucgaguuccagcagaagaacaacagacugcuggagaucaccagagaguucagcgugaacgccggcgugaccacccccgugagcaccuacaugcugaccaacagcgagcugcugagccugaucaacgacaugcccaucaccaacgaccagaagaagcugaugagcaacaacgugcagaucgugagacagcagagcuacagcaucaugugcaucaucaaggaggaggugcuggccuacguggugcagcugccccuguacggcgugaucgacacccccugcuggaagcugcacaccagcccccugugcaccaccaacaccaaggagggcagcaacaucugccugaccagaaccgacagaggcugguacugcgacaacgccggcagcgugagcuucuucccccaggccgagaccugcaaggugcagagcaacagaguguucugcgacaccaugaacagccugacccugcccagcgaggugaaccugugcaacguggacaucuucaaccccaaguacgacugcaagaucaugaccagcaagaccgacgugagcagcagcgugaucaccagccugggcgccaucgugagcugcuacggcaagaccaagugcaccgccagcaacaagaacagaggcaucaucaagaccuucagcaacggcugcgacuacgugagcaacaagggcguggacaccgugagcgugggcaacacccuguacugcgugaacaagcaggagggccagagccuguacgugaagggcgagcccaucaucaacuucuacgacccccugguguuccccagcgacgaguucgacgccagcaucagccaggugaacgagaagaucaaccagagccuggccuucaucagaaagagcgacgagcugcugcacaacgugaacgccggcaagagcaccaccaacaucaugaucaccaccaucaucaucgugaucaucgugauccugcugagccugaucgccgugggccugcugcuguacugcaaggccagaugaggacuagugaagggaacacccaaauuuaauucagccuuaagcacaauuaauuaagagugaaacguaauuguacaagcaguuggucacccaccauagggcaugaucaacaccgcaaccuuuccuuuuucccccagugauucugaaaaaccccucuucccuucagcuugcuuagauguuccaaauuuaguaagcuuaaggcggccuacagaagaaaaagaaaaaaaaggccacaaaaguucccucucacuuucaguaaauaaaauaaaagcagcaacagaaauaaagaaauaaaugaaauucaaaaugaaauaaauauuguguugugcagcauuaaaaaaucaauaaaaauuaaaaaugagcaagaucuaaaaaaaaaaaaaaaaaaaaaaaaaaaaaaaaaaaaaaaaaaaaaaaaaaaaaaaaaaaaaaaaugcaucccccccccccccccccccccccccccccccaaaggcucuuuucagagccaccagaauu

SEQ ID NO: 2227 - RNA, 2130 nt, Artificial Sequence
  mRNA product Design f-1 comprising derived and/or modified sequence from HRSV(A2)__F-del_DSCav1_mut1 (opt5)
gggagagcggcucggccauuuugucccagucaguccggaggcugcggcugcagaaguaccgccugcggaguaacugcaaagaagcuuaccauggagcugcucauccugaaggccaacgcuauuaccacaauccuuacggccgugaccuucugcuuugcgagcggccagaauauuacagaagaguucuaccaauccaccuguucugcugucagcaaaggguaucugggagcccucagaacaggcugguacaccuccguuaucacaauugaacugucuaacaucaaggagaauaaaugcaacgggaccgacgccaaggugaaacuuaucaagcaggaacuggauaaguauaaaaaugcugugacggagcuccagcugcugaugcagagcacccccgccacaggauccggcucugcuauuuguagcggggucgccgugugcaagguucuccaccuggagggagaagugaacaaaaucaaguccgcgcuucugagcaccaauaaagccgucgugucucucuccaacggcguuagcgugcugacauuuaagguccuugaccugaagaauuacauugauaaacaacuccugccuauccugaacaagcagucuuguuccauuccgaauaucgagaccgugauugaguuccagcagaaaaacaaucggcuccuggaaaucacgcgcgaguuuagcgugaacgcuggcgucacaacccccguuucuacauauaugcuuaccaauuccgaacugcucagccugaucaacgacaugccuauuaccaacgaucaaaagaaacuuauguccaauaacgugcagaucgugagacagcagucuuacagcauuaugugcaucauuaaggaggaaguccuggccuaugugguucaacucccccuguacggggugaucgacacaccuuguuggaaacugcauacgagcccccucugcaccacaaauaccaaggagggauccaacaucugucugacacggaccgaucgcggcugguacugcgacaaugcugggucugucuccuucuuuccucaggccgaaacguguaaggugcagagcaacagaguuuucugcgauacaaugaacucucuuacccugccgagcgaggugaaucucugcaaugucgacauuuuuaaccccaaauaugauuguaagaucaugaccuccaaaacagacgugucuagcuccgucauuaccagccugggagcgaucgugucuugcuacggcaagacaaaauguacggccuccaauaagaaccgggggauuaucaagaccuucagcaauggaugcgauuauguuucuaacaaaggcguggacacagucuccgugggcaauacccuuuacuguguuaacaagcaagaggggcagagccuguaugugaaaggagaaccuaucauuaacuuuuacgacccccucgucuucccuuccgaugaguuugacgcuucuaucagccaggugaaugaaaagauuaaccagucccuggccuucauccgcaaaucugaugagcugcuccacaaugugaacgcuggcaagagcacaaccaauauuaugaucacgaccauuaucaucguuauuaucgucauucugcuuucccugaucgccguggggcuccugcuguauugcaaggccagaugaggacuagugaagggaacacccaaauuuaauucagccuuaagcacaauuaauuaagagugaaacguaauuguacaagcaguuggucacccaccauagggcaugaucaacaccgcaaccuuuccuuuuucccccagugauucugaaaaaccccucuucccuucagcuugcuuagauguuccaaauuuaguaagcuuaaggcggccuacagaagaaaaagaaaaaaaaggccacaaaaguucccucucacuuucaguaaauaaaauaaaagcagcaacagaaauaaagaaauaaaugaaauucaaaaugaaauaaauauuguguugugcagcauuaaaaaaucaauaaaaauuaaaaaugagcaagaucuaaaaaaaaaaaaaaaaaaaaaaaaaaaaaaaaaaaaaaaaaaaaaaaaaaaaaaaaaaaaaaaaugcaucccccccccccccccccccccccccccccccaaaggcucuuuucagagccaccagaauu

SEQ ID NO: 2228 - RNA, 2130 nt, Artificial Sequence
  mRNA product Design f-1 comprising derived and/or modified sequence from HRSV(A2)__F-del_DSCav1_mut1 (opt6)
gggagagcggcucggccauuuugucccagucaguccggaggcugcggcugcagaaguaccgccugcggaguaacugcaaagaagcuuaccauggaacuacucaucuuaaaagcaaacgcaauaacaacuauucuaaccgcaguaacauuuuguuucgcaucaggacaaaacauaaccgaagaauuuuaccaaucaacauguuccgcaguuucaaaaggauacuuaggcgcacuaagaacaggcugguacaccuccgugauaacaauagaauuaucaaacauaaaagaaaacaaauguaauggaacugacgccaaaguaaaacuaauaaaacaagaacuagacaaauauaaaaacgcaguaacugaacuacaauuacuaaugcaauccaccccagcaacaggcucaggcucagcaauuugcuccggagucgcugucugcaaaguacuacaucuugaaggcgaagucaauaaaauaaaaucagcacuucuaucaacaaacaaagcaguagucucacuaucaaacggaguaucaguacuaacauuuaaaguauuagaucuaaaaaacuauauagauaaacaacuacuacccauacucaauaaacaauccuguucaauaccaaauauagaaaccguaauagaauuucaacaaaaaaacaaucgacuauuagaaaucacccgagaauuuucagucaaugcaggcguaacaacaccaguaucaaccuacauguuaaccaacuccgaacuacuaucccucauaaacgacaugccaauaacaaacgaucaaaaaaaacuaauguccaacaacguacaaauagucagacaacaaucuuauucaauaaugugcaucauaaaagaagaaguucuagccuacguaguucaacuuccauuauacggcguaauugauacaccaugcuggaaacuacacacauccccacuauguacaacaaacacaaaagaaggaucaaacaucugcuuaacuagaacagacagaggaugguacugcgacaacgcaggaucagucucauucuuuccacaagcagaaacaugcaagguccaaucaaacagaguauucugcgacacaaugaacuccuuaacacuaccaucugaaguaaaccuauguaauguagacauauuuaacccaaaauacgacugcaaaauaaugaccucaaaaacagacguauccucaucaguaauuacaagccucggagccauaguaucaugcuacggaaaaacaaaauguacagcaucaaacaaaaacagaggaauaauaaaaacguucuccaacggaugcgacuauguaucaaacaaaggcguagacacaguaucagucggaaauacccuuuacugcguaaacaaacaagaaggccaaagucuauacguaaaaggagagccaauaauaaacuuuuaugacccccuuguauucccaucugacgaauuugaugcaucaauaucccaagucaacgaaaaaaucaaccaaucauuagccuuuauuagaaaaagugacgaacuauuacacaacguuaaugcagggaaaucaacaacaaauauaaugauuacaaccauaauuauaguuaucauaguuauacuacucucacuaaucgcaguaggauuacuauuauacugcaaagcaagauaaggacuagugaagggaacacccaaauuuaauucagccuuaagcacaauuaauuaagagugaaacguaauuguacaagcaguuggucacccaccauagggcaugaucaacaccgcaaccuuuccuuuuucccccagugauucugaaaaaccccucuucccuucagcuugcuuagauguuccaaauuuaguaagcuuaaggcggccuacagaagaaaaagaaaaaaaaggccacaaaaguucccucucacuuucaguaaauaaaauaaaagcagcaacagaaauaaagaaauaaaugaaauucaaaaugaaauaaauauuguguugugcagcauuaaaaaaucaauaaaaauuaaaaaugagcaagaucuaaaaaaaaaaaaaaaaaaaaaaaaaaaaaaaaaaaaaaaaaaaaaaaaaaaaaaaaaaaaaaaaugcaucccccccccccccccccccccccccccccccaaaggcucuuuucagagccaccagaauu

SEQ ID NO: 2229 - RNA, 2130 nt, Artificial Sequence
  mRNA product Design f-1 comprising derived and/or modified sequence from HRSV(A2)__F-del_DSCav1_mut1 (opt11)
gggagagcggcucggccauuuugucccagucaguccggaggcugcggcugcagaaguaccgccugcggaguaacugcaaagaagcuuaccauggaacuacucauccuaaaagccaacgcaaucacaaccauacuuacagcuguuaccuucugcuucgcauccggccaaaauaucaccgaagaguucuaccaaucaaccugcuccgccgucagcaaaggauaccucggcgcccuccgaaccggaugguacacuucugucaucacaaucgaacucuccaacaucaaagaaaacaaaugcaacgguaccgacgcgaaagucaaacucaucaaacaagaacuagacaaguacaaaaacgccgucaccgaacugcaacuccucaugcaauccacaccagcaacgggaucaggauccgccaucugcucaggcgucgccgucugcaaaguccugcaccuagaaggagaaguaaacaaaauuaaauccgcccuacucuccaccaacaaagcagucgucucacuauccaacggcgucuccguccucaccuuuaagguccucgaccucaaaaauuauauagacaaacaacuccuccccauccuaaacaaacaaucaugcuccauccccaacauagaaaccgucaucgaauuucaacagaaaaacaaccgacucuuagaaauuacccgcgaguucagcgucaacgccggagucaccacacccgucucaaccuacaugcucaccaacucagaacuccucucacuaaucaaugauaugcccaucacaaacgaccaaaagaaacucauguccaacaacguacaaaucguucgccaacaaagcuacuccaucauguguaucauuaaagaagaaguccucgccuacgucguccaacuuccgcucuacggcguaaucgacacccccugcuggaaacuucacaccucgccccucugcaccacaaacaccaaagaaggcuccaacaucugccuaacccgcaccgaccgcggcugguacugcgacaacgccggcuccgucucauuuuucccccaggcggagaccugcaaaguccaauccaaccgcgucuucugcgacaccaugaacucucuuacccucccaucagaaguaaaccucugcaacgucgacaucuuuaaccccaaauacgauugcaagauaaugaccuccaaaacagacgucucaucguccgucaucaccucccuaggagcuaucgucuccugcuacggcaagaccaaaugcaccgcuuccaacaaaaaccgcggcaucaucaaaaccuucuccaacgggugcgacuacgucucuaacaaaggcguggacacaguauccguaggaaacacacuguacugcguaaacaaacaagagggccaaucgcuuuacgucaaaggcgagccaauuaucaacuucuacgacccgcucgucuucccaucagacgaguucgacgcauccaucucccaagucaacgagaaaaucaaucagucccucgccuucauacgcaaauccgacgaacuccuacauaacguaaacgccggcaaaucuaccacaaacaucaugaucacaaccaucaucaucguaaucaucgucauccuucucucgcucaucgccguaggacugcuacuuuacugcaaggcccgcuaaggacuagugaagggaacacccaaauuuaauucagccuuaagcacaauuaauuaagagugaaacguaauuguacaagcaguuggucacccaccauagggcaugaucaacaccgcaaccuuuccuuuuucccccagugauucugaaaaaccccucuucccuucagcuugcuuagauguuccaaauuuaguaagcuuaaggcggccuacagaagaaaaagaaaaaaaaggccacaaaaguucccucucacuuucaguaaauaaaauaaaagcagcaacagaaauaaagaaauaaaugaaauucaaaaugaaauaaauauuguguugugcagcauuaaaaaaucaauaaaaauuaaaaaugagcaagaucuaaaaaaaaaaaaaaaaaaaaaaaaaaaaaaaaaaaaaaaaaaaaaaaaaaaaaaaaaaaaaaaaugcaucccccccccccccccccccccccccccccccaaaggcucuuuucagagccaccagaauu

SEQ ID NO: 2230 - RNA, 1910 nt, Artificial Sequence
  mRNA product Design f-2 comprising derived and/or modified sequence from HRSV(A2)__F-del_DSCav1_mut1 (opt1)
gggagagcggcucggccauuuugucccagucaguccggaggcugcggcugcagaaguaccgccugcggaguaacugcaaagaagcuuaccauggagcugcucauccugaaggccaacgccaucaccaccauccugacggcggugaccuucugcuucgccagcggccagaacaucaccgaggaguucuaccaguccacgugcagcgccgucuccaagggguaccucggcgcccugcggaccggcugguacaccuccgugaucaccaucgagcugagcaacaucaaggagaacaagugcaacgggaccgacgccaaggugaagcucaucaagcaggagcuggacaaguacaagaacgcggucacggagcugcagcuccugaugcaguccaccccggcaaccggcuccggcuccgccaucugcagcggcgucgccgugugcaaggugcugcaccucgagggggaggucaacaagaucaagagcgcccugcuguccaccaacaaggccguggugagccucuccaacggcgucagcgugcugaccuucaaggugcuggaccucaagaacuacaucgacaagcagcugcugcccauccugaacaagcagagcugcuccauccccaacaucgagacggugaucgaguuccagcagaagaacaaccggcuccuggagaucacccgcgaguucagcgugaacgccggggucaccacccccguguccacguacaugcugaccaacagcgagcuccugucccugaucaacgacaugccgaucaccaacgaccagaagaagcucaugagcaacaacgugcagaucguccggcagcaguccuacagcaucaugugcaucaucaaggaggaggugcuggcguacgugguccagcugccccucuacggcgugaucgacacccccugcuggaagcugcacacgagcccccugugcaccaccaacaccaaggagggguccaacaucugccucacgcgcaccgaccggggcugguacugcgacaacgccggcagcgucuccuucuucccgcaggccgagaccugcaaggugcagagcaaccgcguguucugcgacaccaugaacucccugacgcugcccagcgagguaaaccucugcaacgucgacaucuucaaccccaaguacgacugcaagaucaugaccuccaagaccgacgugagcuccagcgugaucaccucccugggggccaucgucagcugcuacggcaagacgaagugcaccgccagcaacaagaaccgggggaucaucaagaccuucuccaacggcugcgacuacgugagcaacaagggcguggacaccguguccgucgggaacacccuguacugcgugaacaagcaggagggccagagccucuacgugaagggggagcccaucaucaacuucuacgacccgcuggucuuccccuccgacgaguucgacgcgagcaucucccaggugaacgagaagaucaaccagagccuggccuucauccgcaaguccgacgagcugcuccacaacgugaacgccggcaagagcacgaccaacaucaugaucaccaccaucaucaucgucaucaucgugauccugcugucccucaucgccguggggcugcugcucuacugcaaggcccggugaggacuaguggaagcauuuuccuggcugauuaaaagaaauuacucagcuauggucaucuguuccuguuagaaggcuaugcagcauauuauauacuaugcgcauguuaugaaaugcauaauaaaaaauuuuaaaaaaucuaaaagaucuaaaaaaaaaaaaaaaaaaaaaaaaaaaaaaaaaaaaaaaaaaaaaaaaaaaaaaaaaaaaaaaaugcaucccccccccccccccccccccccccccccccaaaggcucuuuucagagccaccagaauu

SEQ ID NO: 2231 - RNA, 1910 nt, Artificial Sequence
  mRNA product Design f-2 comprising derived and/or modified sequence from HRSV(A2)__F-del_DSCav1_mut1 (opt1)
gggagagcggcucggccauuuugucccagucaguccggaggcugcggcugcagaaguaccgccugcggaguaacugcaaagaagcuuaccauggagcugcucauccugaaggccaacgccaucaccaccauccugacggcggugaccuucugcuucgccagcggccagaacaucaccgaggaguucuaccaguccacgugcagcgccgucuccaagggguaccucggcgcccugcgcaccgggugguacaccagcgugaucaccaucgagcuguccaacaucaaggagaacaagugcaacggcaccgacgccaaggugaagcucaucaagcaggagcuggacaaguacaagaacgcggucacggagcugcagcuccugaugcagagcacccccgccaccggguccggcagcgccaucugcuccggcguggccgugugcaagguccugcaccucgagggggaggugaacaagaucaagagcgcgcugcuguccaccaacaaggccguggucagccucuccaacggcgugagcgugcugacguucaagguccuggaccucaagaacuacaucgacaagcagcugcugccgauccucaacaagcaguccugcagcauccccaacaucgagaccgugaucgaguuccagcagaagaacaaccggcugcuggagaucacccgcgaguucuccgugaacgccggggucaccacgcccgugagcaccuacaugcucaccaacuccgagcugcugagccucaucaacgacaugcccaucaccaacgaccagaagaagcugaugagcaacaacgugcagaucguccggcagcaguccuacagcaucaugugcaucaucaaggaggaggugcuggccuacgugguccagcucccgcuguacggcgugaucgacacgcccugcuggaagcugcacaccagcccccucugcaccaccaacacgaaggagggguccaacaucugccugacccgcaccgaccggggcugguacugcgacaacgccggcuccgugagcuucuucccccaggcggagaccugcaagguccaguccaaccgcguguucugcgacacgaugaacagccugacccucccguccgaggucaaccugugcaacguggacaucuucaaccccaaguacgacugcaagaucaugaccagcaagaccgacguguccagcuccgucaucacgagccugggggccaucguguccugcuacggcaagaccaagugcaccgccagcaacaagaaccgggggaucaucaagaccuucuccaacggcugcgacuacgugagcaacaagggcgucgacacgguguccguggggaacacccucuacugcgucaacaagcaggagggccagagccuguacgugaagggggagcccaucaucaacuucuacgacccccugguguucccgagcgacgaguucgacgccuccaucagccaggucaacgagaagaucaaccagucccucgccuucauccgcaagagcgacgagcugcugcacaacgugaacgcgggcaaguccaccaccaacaucaugaucaccacgaucaucaucgugaucaucgucauccuccugagccugaucgccguggggcuccugcuguacugcaaggcccggugaggacuaguggaagcauuuuccuggcugauuaaaagaaauuacucagcuauggucaucuguuccuguuagaaggcuaugcagcauauuauauacuaugcgcauguuaugaaaugcauaauaaaaaauuuuaaaaaaucuaaaagaucuaaaaaaaaaaaaaaaaaaaaaaaaaaaaaaaaaaaaaaaaaaaaaaaaaaaaaaaaaaaaaaaaugcaucccccccccccccccccccccccccccccccaaaggcucuuuucagagccaccagaauu

SEQ ID NO: 2232 - RNA, 1910 nt, Artificial Sequence
  mRNA product Design f-2 comprising derived and/or modified sequence from HRSV(A2)__F-del_DSCav1_mut1 (opt2)
gggagagcggcucggccauuuugucccagucaguccggaggcugcggcugcagaaguaccgccugcggaguaacugcaaagaagcuuaccauggagcuccucauccucaaggccaacgccaucaccaccauccucaccgccgucaccuucugcuucgccuccggccagaacaucaccgaggaguucuaccaguccaccugcuccgccgucuccaagggcuaccucggcgcccuccgcaccggcugguacaccuccgucaucaccaucgagcucuccaacaucaaggagaacaagugcaacggcaccgacgccaaggucaagcucaucaagcaggagcucgacaaguacaagaacgccgucaccgagcuccagcuccucaugcaguccacccccgccaccggcuccggcuccgccaucugcuccggcgucgccgucugcaagguccuccaccucgagggcgaggucaacaagaucaaguccgcccuccucuccaccaacaaggccgucgucucccucuccaacggcgucuccguccucaccuucaagguccucgaccucaagaacuacaucgacaagcagcuccuccccauccucaacaagcaguccugcuccauccccaacaucgagaccgucaucgaguuccagcagaagaacaaccgccuccucgagaucacccgcgaguucuccgucaacgccggcgucaccacccccgucuccaccuacaugcucaccaacuccgagcuccucucccucaucaacgacaugcccaucaccaacgaccagaagaagcucauguccaacaacguccagaucguccgccagcaguccuacuccaucaugugcaucaucaaggaggagguccucgccuacgucguccagcucccccucuacggcgucaucgacacccccugcuggaagcuccacaccuccccccucugcaccaccaacaccaaggagggcuccaacaucugccucacccgcaccgaccgcggcugguacugcgacaacgccggcuccgucuccuucuucccccaggccgagaccugcaagguccaguccaaccgcgucuucugcgacaccaugaacucccucacccuccccuccgaggucaaccucugcaacgucgacaucuucaaccccaaguacgacugcaagaucaugaccuccaagaccgacgucuccuccuccgucaucaccucccucggcgccaucgucuccugcuacggcaagaccaagugcaccgccuccaacaagaaccgcggcaucaucaagaccuucuccaacggcugcgacuacgucuccaacaagggcgucgacaccgucuccgucggcaacacccucuacugcgucaacaagcaggagggccagucccucuacgucaagggcgagcccaucaucaacuucuacgacccccucgucuuccccuccgacgaguucgacgccuccaucucccaggucaacgagaagaucaaccagucccucgccuucauccgcaaguccgacgagcuccuccacaacgucaacgccggcaaguccaccaccaacaucaugaucaccaccaucaucaucgucaucaucgucauccuccucucccucaucgccgucggccuccuccucuacugcaaggcccgcugaggacuaguggaagcauuuuccuggcugauuaaaagaaauuacucagcuauggucaucuguuccuguuagaaggcuaugcagcauauuauauacuaugcgcauguuaugaaaugcauaauaaaaaauuuuaaaaaaucuaaaagaucuaaaaaaaaaaaaaaaaaaaaaaaaaaaaaaaaaaaaaaaaaaaaaaaaaaaaaaaaaaaaaaaaugcaucccccccccccccccccccccccccccccccaaaggcucuuuucagagccaccagaauu

SEQ ID NO: 2233 - RNA, 1910 nt, Artificial Sequence
  mRNA product Design f-2 comprising derived and/or modified sequence from HRSV(A2)__F-del_DSCav1_mut1 (opt3)
gggagagcggcucggccauuuugucccagucaguccggaggcugcggcugcagaaguaccgccugcggaguaacugcaaagaagcuuaccauggagcugcucauccuuaaggccaacgcuauuaccacaauacugacugcagugacguucugcuuugccagcggccagaauaucaccgaagaguucuaccaauccacauguucugcggucucaaaaggguauuugggagcuuuaagaacugguugguacaccaguguuauuacaaucgaacugagcaacauuaaggagaauaaaugcaacggcaccgacgccaaggugaaacuaaucaagcaggaacucgauaaguauaaaaaugcaguaacugagcugcagcuucugaugcaguccacacccgccaccgggucuggaucggcuauauguucaggcguggcagucugcaagguguugcaccucgagggugaaguuaacaaaaucaagagcgcccugcugaguacgaauaaagcuguggucucccucucuaacggggugagcguauuaacuuuuaagguucuggaccuuaagaauuacauugauaaacaauugcugccuauccuaaacaagcaguccuguucaauuccaaauaucgagaccgugauagaguuccagcagaaaaacaauaggcuccuggaaauuacacgggaguuuagugucaacgccggagugacuaccccggugagcacauauaugcuuaccaauucugaacuguugucccucaucaacgacaugcccauuacgaacgaucaaaagaaacugaugucaaauaacguccagaucguucgccagcagagcuacaguaucaugugcauuauaaaggaggaaguguuagcguauguagugcaacugccucucuacggcgucaucgacacuccauguuggaaacuucauacaucuccccugugcaccacuaauacaaaggagggcuccaacauuuguuugacccgaacggaucgugggugguacugcgacaaugcaggaagcgugucguucuuuccucaggccgaaaccuguaagguucagucuaacagaguguucugcgauacaaugaacucccuaacucugccaucagaggucaaucucugcaauguggacaucuuuaaccccaaauaugauuguaagauaaugaccaguaaaacagacguaagcuccucuguuauuacuagccugggugcuaucgugucaugcuacggcaagaccaaauguacagccaguaauaagaacagggggaucauuaagaccuucuccaauggaugcgauuaugucagcaacaaaggcguggacacugucucuguggguaauacgcuuuacuguguuaacaagcaagaggggcagucacuguaugugaaaggagaaccuaucauuaacuuuuacgacccauugguauucccgagugaugaguuugacgcaagcauaucccaggucaaugaaaagaucaaccagucucucgcuuucauucggaaaucggaugagcuguuacacaaugugaacgccggcaagagcacaaccaauaucaugaucacuaccauuauaaucguuauuaucgugauucugcuaucccucaucgcggucggccugcuuuuguauugcaaggcccgcugaggacuaguggaagcauuuuccuggcugauuaaaagaaauuacucagcuauggucaucuguuccuguuagaaggcuaugcagcauauuauauacuaugcgcauguuaugaaaugcauaauaaaaaauuuuaaaaaaucuaaaagaucuaaaaaaaaaaaaaaaaaaaaaaaaaaaaaaaaaaaaaaaaaaaaaaaaaaaaaaaaaaaaaaaaugcaucccccccccccccccccccccccccccccccaaaggcucuuuucagagccaccagaauu

SEQ ID NO: 2234 - RNA, 1910 nt, Artificial Sequence
  mRNA product Design f-2 comprising derived and/or modified sequence from HRSV(A2)__F-del_DSCav1_mut1 (opt4)
gggagagcggcucggccauuuugucccagucaguccggaggcugcggcugcagaaguaccgccugcggaguaacugcaaagaagcuuaccauggagcugcugauccugaaggccaacgccaucaccaccauccugaccgccgugaccuucugcuucgccagcggccagaacaucaccgaggaguucuaccagagcaccugcagcgccgugagcaagggcuaccugggcgcccugagaaccggcugguacaccagcgugaucaccaucgagcugagcaacaucaaggagaacaagugcaacggcaccgacgccaaggugaagcugaucaagcaggagcuggacaaguacaagaacgccgugaccgagcugcagcugcugaugcagagcacccccgccaccggcagcggcagcgccaucugcagcggcguggccgugugcaaggugcugcaccuggagggcgaggugaacaagaucaagagcgcccugcugagcaccaacaaggccguggugagccugagcaacggcgugagcgugcugaccuucaaggugcuggaccugaagaacuacaucgacaagcagcugcugcccauccugaacaagcagagcugcagcauccccaacaucgagaccgugaucgaguuccagcagaagaacaacagacugcuggagaucaccagagaguucagcgugaacgccggcgugaccacccccgugagcaccuacaugcugaccaacagcgagcugcugagccugaucaacgacaugcccaucaccaacgaccagaagaagcugaugagcaacaacgugcagaucgugagacagcagagcuacagcaucaugugcaucaucaaggaggaggugcuggccuacguggugcagcugccccuguacggcgugaucgacacccccugcuggaagcugcacaccagcccccugugcaccaccaacaccaaggagggcagcaacaucugccugaccagaaccgacagaggcugguacugcgacaacgccggcagcgugagcuucuucccccaggccgagaccugcaaggugcagagcaacagaguguucugcgacaccaugaacagccugacccugcccagcgaggugaaccugugcaacguggacaucuucaaccccaaguacgacugcaagaucaugaccagcaagaccgacgugagcagcagcgugaucaccagccugggcgccaucgugagcugcuacggcaagaccaagugcaccgccagcaacaagaacagaggcaucaucaagaccuucagcaacggcugcgacuacgugagcaacaagggcguggacaccgugagcgugggcaacacccuguacugcgugaacaagcaggagggccagagccuguacgugaagggcgagcccaucaucaacuucuacgacccccugguguuccccagcgacgaguucgacgccagcaucagccaggugaacgagaagaucaaccagagccuggccuucaucagaaagagcgacgagcugcugcacaacgugaacgccggcaagagcaccaccaacaucaugaucaccaccaucaucaucgugaucaucgugauccugcugagccugaucgccgugggccugcugcuguacugcaaggccagaugaggacuaguggaagcauuuuccuggcugauuaaaagaaauuacucagcuauggucaucuguuccuguuagaaggcuaugcagcauauuauauacuaugcgcauguuaugaaaugcauaauaaaaaauuuuaaaaaaucuaaaagaucuaaaaaaaaaaaaaaaaaaaaaaaaaaaaaaaaaaaaaaaaaaaaaaaaaaaaaaaaaaaaaaaaugcaucccccccccccccccccccccccccccccccaaaggcucuuuucagagccaccagaauu

SEQ ID NO: 2235 - RNA, 1910 nt, Artificial Sequence
  mRNA product Design f-2 comprising derived and/or modified sequence from HRSV(A2)__F-del_DSCav1_mut1 (opt5)
gggagagcggcucggccauuuugucccagucaguccggaggcugcggcugcagaaguaccgccugcggaguaacugcaaagaagcuuaccauggagcugcucauccugaaggccaacgcuauuaccacaauccuuacggccgugaccuucugcuuugcgagcggccagaauauuacagaagaguucuaccaauccaccuguucugcugucagcaaaggguaucugggagcccucagaacaggcugguacaccuccguuaucacaauugaacugucuaacaucaaggagaauaaaugcaacgggaccgacgccaaggugaaacuuaucaagcaggaacuggauaaguauaaaaaugcugugacggagcuccagcugcugaugcagagcacccccgccacaggauccggcucugcuauuuguagcggggucgccgugugcaagguucuccaccuggagggagaagugaacaaaaucaaguccgcgcuucugagcaccaauaaagccgucgugucucucuccaacggcguuagcgugcugacauuuaagguccuugaccugaagaauuacauugauaaacaacuccugccuauccugaacaagcagucuuguuccauuccgaauaucgagaccgugauugaguuccagcagaaaaacaaucggcuccuggaaaucacgcgcgaguuuagcgugaacgcuggcgucacaacccccguuucuacauauaugcuuaccaauuccgaacugcucagccugaucaacgacaugccuauuaccaacgaucaaaagaaacuuauguccaauaacgugcagaucgugagacagcagucuuacagcauuaugugcaucauuaaggaggaaguccuggccuaugugguucaacucccccuguacggggugaucgacacaccuuguuggaaacugcauacgagcccccucugcaccacaaauaccaaggagggauccaacaucugucugacacggaccgaucgcggcugguacugcgacaaugcugggucugucuccuucuuuccucaggccgaaacguguaaggugcagagcaacagaguuuucugcgauacaaugaacucucuuacccugccgagcgaggugaaucucugcaaugucgacauuuuuaaccccaaauaugauuguaagaucaugaccuccaaaacagacgugucuagcuccgucauuaccagccugggagcgaucgugucuugcuacggcaagacaaaauguacggccuccaauaagaaccgggggauuaucaagaccuucagcaauggaugcgauuauguuucuaacaaaggcguggacacagucuccgugggcaauacccuuuacuguguuaacaagcaagaggggcagagccuguaugugaaaggagaaccuaucauuaacuuuuacgacccccucgucuucccuuccgaugaguuugacgcuucuaucagccaggugaaugaaaagauuaaccagucccuggccuucauccgcaaaucugaugagcugcuccacaaugugaacgcuggcaagagcacaaccaauauuaugaucacgaccauuaucaucguuauuaucgucauucugcuuucccugaucgccguggggcuccugcuguauugcaaggccagaugaggacuaguggaagcauuuuccuggcugauuaaaagaaauuacucagcuauggucaucuguuccuguuagaaggcuaugcagcauauuauauacuaugcgcauguuaugaaaugcauaauaaaaaauuuuaaaaaaucuaaaagaucuaaaaaaaaaaaaaaaaaaaaaaaaaaaaaaaaaaaaaaaaaaaaaaaaaaaaaaaaaaaaaaaaugcaucccccccccccccccccccccccccccccccaaaggcucuuuucagagccaccagaauu

SEQ ID NO: 2236 - RNA, 1910 nt, Artificial Sequence
  mRNA product Design f-2 comprising derived and/or modified sequence from HRSV(A2)__F-del_DSCav1_mut1 (opt6)
gggagagcggcucggccauuuugucccagucaguccggaggcugcggcugcagaaguaccgccugcggaguaacugcaaagaagcuuaccauggaacuacucaucuuaaaagcaaacgcaauaacaacuauucuaaccgcaguaacauuuuguuucgcaucaggacaaaacauaaccgaagaauuuuaccaaucaacauguuccgcaguuucaaaaggauacuuaggcgcacuaagaacaggcugguacaccuccgugauaacaauagaauuaucaaacauaaaagaaaacaaauguaauggaacugacgccaaaguaaaacuaauaaaacaagaacuagacaaauauaaaaacgcaguaacugaacuacaauuacuaaugcaauccaccccagcaacaggcucaggcucagcaauuugcuccggagucgcugucugcaaaguacuacaucuugaaggcgaagucaauaaaauaaaaucagcacuucuaucaacaaacaaagcaguagucucacuaucaaacggaguaucaguacuaacauuuaaaguauuagaucuaaaaaacuauauagauaaacaacuacuacccauacucaauaaacaauccuguucaauaccaaauauagaaaccguaauagaauuucaacaaaaaaacaaucgacuauuagaaaucacccgagaauuuucagucaaugcaggcguaacaacaccaguaucaaccuacauguuaaccaacuccgaacuacuaucccucauaaacgacaugccaauaacaaacgaucaaaaaaaacuaauguccaacaacguacaaauagucagacaacaaucuuauucaauaaugugcaucauaaaagaagaaguucuagccuacguaguucaacuuccauuauacggcguaauugauacaccaugcuggaaacuacacacauccccacuauguacaacaaacacaaaagaaggaucaaacaucugcuuaacuagaacagacagaggaugguacugcgacaacgcaggaucagucucauucuuuccacaagcagaaacaugcaagguccaaucaaacagaguauucugcgacacaaugaacuccuuaacacuaccaucugaaguaaaccuauguaauguagacauauuuaacccaaaauacgacugcaaaauaaugaccucaaaaacagacguauccucaucaguaauuacaagccucggagccauaguaucaugcuacggaaaaacaaaauguacagcaucaaacaaaaacagaggaauaauaaaaacguucuccaacggaugcgacuauguaucaaacaaaggcguagacacaguaucagucggaaauacccuuuacugcguaaacaaacaagaaggccaaagucuauacguaaaaggagagccaauaauaaacuuuuaugacccccuuguauucccaucugacgaauuugaugcaucaauaucccaagucaacgaaaaaaucaaccaaucauuagccuuuauuagaaaaagugacgaacuauuacacaacguuaaugcagggaaaucaacaacaaauauaaugauuacaaccauaauuauaguuaucauaguuauacuacucucacuaaucgcaguaggauuacuauuauacugcaaagcaagauaaggacuaguggaagcauuuuccuggcugauuaaaagaaauuacucagcuauggucaucuguuccuguuagaaggcuaugcagcauauuauauacuaugcgcauguuaugaaaugcauaauaaaaaauuuuaaaaaaucuaaaagaucuaaaaaaaaaaaaaaaaaaaaaaaaaaaaaaaaaaaaaaaaaaaaaaaaaaaaaaaaaaaaaaaaugcaucccccccccccccccccccccccccccccccaaaggcucuuuucagagccaccagaauu

SEQ ID NO: 2237 - RNA, 1910 nt, Artificial Sequence
  mRNA product Design f-2 comprising derived and/or modified sequence from HRSV(A2)__F-del_DSCav1_mut1 (opt11)
gggagagcggcucggccauuuugucccagucaguccggaggcugcggcugcagaaguaccgccugcggaguaacugcaaagaagcuuaccauggaacuacucauccuaaaagccaacgcaaucacaaccauacuuacagcuguuaccuucugcuucgcauccggccaaaauaucaccgaagaguucuaccaaucaaccugcuccgccgucagcaaaggauaccucggcgcccuccgaaccggaugguacacuucugucaucacaaucgaacucuccaacaucaaagaaaacaaaugcaacgguaccgacgcgaaagucaaacucaucaaacaagaacuagacaaguacaaaaacgccgucaccgaacugcaacuccucaugcaauccacaccagcaacgggaucaggauccgccaucugcucaggcgucgccgucugcaaaguccugcaccuagaaggagaaguaaacaaaauuaaauccgcccuacucuccaccaacaaagcagucgucucacuauccaacggcgucuccguccucaccuuuaagguccucgaccucaaaaauuauauagacaaacaacuccuccccauccuaaacaaacaaucaugcuccauccccaacauagaaaccgucaucgaauuucaacagaaaaacaaccgacucuuagaaauuacccgcgaguucagcgucaacgccggagucaccacacccgucucaaccuacaugcucaccaacucagaacuccucucacuaaucaaugauaugcccaucacaaacgaccaaaagaaacucauguccaacaacguacaaaucguucgccaacaaagcuacuccaucauguguaucauuaaagaagaaguccucgccuacgucguccaacuuccgcucuacggcguaaucgacacccccugcuggaaacuucacaccucgccccucugcaccacaaacaccaaagaaggcuccaacaucugccuaacccgcaccgaccgcggcugguacugcgacaacgccggcuccgucucauuuuucccccaggcggagaccugcaaaguccaauccaaccgcgucuucugcgacaccaugaacucucuuacccucccaucagaaguaaaccucugcaacgucgacaucuuuaaccccaaauacgauugcaagauaaugaccuccaaaacagacgucucaucguccgucaucaccucccuaggagcuaucgucuccugcuacggcaagaccaaaugcaccgcuuccaacaaaaaccgcggcaucaucaaaaccuucuccaacgggugcgacuacgucucuaacaaaggcguggacacaguauccguaggaaacacacuguacugcguaaacaaacaagagggccaaucgcuuuacgucaaaggcgagccaauuaucaacuucuacgacccgcucgucuucccaucagacgaguucgacgcauccaucucccaagucaacgagaaaaucaaucagucccucgccuucauacgcaaauccgacgaacuccuacauaacguaaacgccggcaaaucuaccacaaacaucaugaucacaaccaucaucaucguaaucaucgucauccuucucucgcucaucgccguaggacugcuacuuuacugcaaggcccgcuaaggacuaguggaagcauuuuccuggcugauuaaaagaaauuacucagcuauggucaucuguuccuguuagaaggcuaugcagcauauuauauacuaugcgcauguuaugaaaugcauaauaaaaaauuuuaaaaaaucuaaaagaucuaaaaaaaaaaaaaaaaaaaaaaaaaaaaaaaaaaaaaaaaaaaaaaaaaaaaaaaaaaaaaaaaugcaucccccccccccccccccccccccccccccccaaaggcucuuuucagagccaccagaauu

SEQ ID NO: 2238 - RNA, 1901 nt, Artificial Sequence
  mRNA product Design f-3 comprising derived and/or modified sequence from HRSV(A2)__F-del_DSCav1_mut1 (opt1)
gggagagucccgcagucggcguccagcggcucugcuuguucgugugugugucguugcaggccuuauucaagcuuaccauggagcugcucauccugaaggccaacgccaucaccaccauccugacggcggugaccuucugcuucgccagcggccagaacaucaccgaggaguucuaccaguccacgugcagcgccgucuccaagggguaccucggcgcccugcggaccggcugguacaccuccgugaucaccaucgagcugagcaacaucaaggagaacaagugcaacgggaccgacgccaaggugaagcucaucaagcaggagcuggacaaguacaagaacgcggucacggagcugcagcuccugaugcaguccaccccggcaaccggcuccggcuccgccaucugcagcggcgucgccgugugcaaggugcugcaccucgagggggaggucaacaagaucaagagcgcccugcuguccaccaacaaggccguggugagccucuccaacggcgucagcgugcugaccuucaaggugcuggaccucaagaacuacaucgacaagcagcugcugcccauccugaacaagcagagcugcuccauccccaacaucgagacggugaucgaguuccagcagaagaacaaccggcuccuggagaucacccgcgaguucagcgugaacgccggggucaccacccccguguccacguacaugcugaccaacagcgagcuccugucccugaucaacgacaugccgaucaccaacgaccagaagaagcucaugagcaacaacgugcagaucguccggcagcaguccuacagcaucaugugcaucaucaaggaggaggugcuggcguacgugguccagcugccccucuacggcgugaucgacacccccugcuggaagcugcacacgagcccccugugcaccaccaacaccaaggagggguccaacaucugccucacgcgcaccgaccggggcugguacugcgacaacgccggcagcgucuccuucuucccgcaggccgagaccugcaaggugcagagcaaccgcguguucugcgacaccaugaacucccugacgcugcccagcgagguaaaccucugcaacgucgacaucuucaaccccaaguacgacugcaagaucaugaccuccaagaccgacgugagcuccagcgugaucaccucccugggggccaucgucagcugcuacggcaagacgaagugcaccgccagcaacaagaaccgggggaucaucaagaccuucuccaacggcugcgacuacgugagcaacaagggcguggacaccguguccgucgggaacacccuguacugcgugaacaagcaggagggccagagccucuacgugaagggggagcccaucaucaacuucuacgacccgcuggucuuccccuccgacgaguucgacgcgagcaucucccaggugaacgagaagaucaaccagagccuggccuucauccgcaaguccgacgagcugcuccacaacgugaacgccggcaagagcacgaccaacaucaugaucaccaccaucaucaucgucaucaucgugauccugcugucccucaucgccguggggcugcugcucuacugcaaggcccggugaggacuaguacuggcugcaucucccuuuccucuguccuccauccuucucccaggauggugaagggggaccugguacccagugauccccaccccaggauccuaaaucaugacuuaccugcuaauaaaaacucauuggaaaagugagaagaucuaaaaaaaaaaaaaaaaaaaaaaaaaaaaaaaaaaaaaaaaaaaaaaaaaaaaaaaaaaaaaaaaugcaucccccccccccccccccccccccccccccccaaaggcucuuuucagagccaccagaauu

SEQ ID NO: 2239 - RNA, 1901 nt, Artificial Sequence
  mRNA product Design f-3 comprising derived and/or modified sequence from HRSV(A2)__F-del_DSCav1_mut1 (opt1)
gggagagucccgcagucggcguccagcggcucugcuuguucgugugugugucguugcaggccuuauucaagcuuaccauggagcugcucauccugaaggccaacgccaucaccaccauccugacggcggugaccuucugcuucgccagcggccagaacaucaccgaggaguucuaccaguccacgugcagcgccgucuccaagggguaccucggcgcccugcgcaccgggugguacaccagcgugaucaccaucgagcuguccaacaucaaggagaacaagugcaacggcaccgacgccaaggugaagcucaucaagcaggagcuggacaaguacaagaacgcggucacggagcugcagcuccugaugcagagcacccccgccaccggguccggcagcgccaucugcuccggcguggccgugugcaagguccugcaccucgagggggaggugaacaagaucaagagcgcgcugcuguccaccaacaaggccguggucagccucuccaacggcgugagcgugcugacguucaagguccuggaccucaagaacuacaucgacaagcagcugcugccgauccucaacaagcaguccugcagcauccccaacaucgagaccgugaucgaguuccagcagaagaacaaccggcugcuggagaucacccgcgaguucuccgugaacgccggggucaccacgcccgugagcaccuacaugcucaccaacuccgagcugcugagccucaucaacgacaugcccaucaccaacgaccagaagaagcugaugagcaacaacgugcagaucguccggcagcaguccuacagcaucaugugcaucaucaaggaggaggugcuggccuacgugguccagcucccgcuguacggcgugaucgacacgcccugcuggaagcugcacaccagcccccucugcaccaccaacacgaaggagggguccaacaucugccugacccgcaccgaccggggcugguacugcgacaacgccggcuccgugagcuucuucccccaggcggagaccugcaagguccaguccaaccgcguguucugcgacacgaugaacagccugacccucccguccgaggucaaccugugcaacguggacaucuucaaccccaaguacgacugcaagaucaugaccagcaagaccgacguguccagcuccgucaucacgagccugggggccaucguguccugcuacggcaagaccaagugcaccgccagcaacaagaaccgggggaucaucaagaccuucuccaacggcugcgacuacgugagcaacaagggcgucgacacgguguccguggggaacacccucuacugcgucaacaagcaggagggccagagccuguacgugaagggggagcccaucaucaacuucuacgacccccugguguucccgagcgacgaguucgacgccuccaucagccaggucaacgagaagaucaaccagucccucgccuucauccgcaagagcgacgagcugcugcacaacgugaacgcgggcaaguccaccaccaacaucaugaucaccacgaucaucaucgugaucaucgucauccuccugagccugaucgccguggggcuccugcuguacugcaaggcccggugaggacuaguacuggcugcaucucccuuuccucuguccuccauccuucucccaggauggugaagggggaccugguacccagugauccccaccccaggauccuaaaucaugacuuaccugcuaauaaaaacucauuggaaaagugagaagaucuaaaaaaaaaaaaaaaaaaaaaaaaaaaaaaaaaaaaaaaaaaaaaaaaaaaaaaaaaaaaaaaaugcaucccccccccccccccccccccccccccccccaaaggcucuuuucagagccaccagaauu

SEQ ID NO: 2240 - RNA, 1901 nt, Artificial Sequence
  mRNA product Design f-3 comprising derived and/or modified sequence from HRSV(A2)__F-del_DSCav1_mut1 (opt2)
gggagagucccgcagucggcguccagcggcucugcuuguucgugugugugucguugcaggccuuauucaagcuuaccauggagcuccucauccucaaggccaacgccaucaccaccauccucaccgccgucaccuucugcuucgccuccggccagaacaucaccgaggaguucuaccaguccaccugcuccgccgucuccaagggcuaccucggcgcccuccgcaccggcugguacaccuccgucaucaccaucgagcucuccaacaucaaggagaacaagugcaacggcaccgacgccaaggucaagcucaucaagcaggagcucgacaaguacaagaacgccgucaccgagcuccagcuccucaugcaguccacccccgccaccggcuccggcuccgccaucugcuccggcgucgccgucugcaagguccuccaccucgagggcgaggucaacaagaucaaguccgcccuccucuccaccaacaaggccgucgucucccucuccaacggcgucuccguccucaccuucaagguccucgaccucaagaacuacaucgacaagcagcuccuccccauccucaacaagcaguccugcuccauccccaacaucgagaccgucaucgaguuccagcagaagaacaaccgccuccucgagaucacccgcgaguucuccgucaacgccggcgucaccacccccgucuccaccuacaugcucaccaacuccgagcuccucucccucaucaacgacaugcccaucaccaacgaccagaagaagcucauguccaacaacguccagaucguccgccagcaguccuacuccaucaugugcaucaucaaggaggagguccucgccuacgucguccagcucccccucuacggcgucaucgacacccccugcuggaagcuccacaccuccccccucugcaccaccaacaccaaggagggcuccaacaucugccucacccgcaccgaccgcggcugguacugcgacaacgccggcuccgucuccuucuucccccaggccgagaccugcaagguccaguccaaccgcgucuucugcgacaccaugaacucccucacccuccccuccgaggucaaccucugcaacgucgacaucuucaaccccaaguacgacugcaagaucaugaccuccaagaccgacgucuccuccuccgucaucaccucccucggcgccaucgucuccugcuacggcaagaccaagugcaccgccuccaacaagaaccgcggcaucaucaagaccuucuccaacggcugcgacuacgucuccaacaagggcgucgacaccgucuccgucggcaacacccucuacugcgucaacaagcaggagggccagucccucuacgucaagggcgagcccaucaucaacuucuacgacccccucgucuuccccuccgacgaguucgacgccuccaucucccaggucaacgagaagaucaaccagucccucgccuucauccgcaaguccgacgagcuccuccacaacgucaacgccggcaaguccaccaccaacaucaugaucaccaccaucaucaucgucaucaucgucauccuccucucccucaucgccgucggccuccuccucuacugcaaggcccgcugaggacuaguacuggcugcaucucccuuuccucuguccuccauccuucucccaggauggugaagggggaccugguacccagugauccccaccccaggauccuaaaucaugacuuaccugcuaauaaaaacucauuggaaaagugagaagaucuaaaaaaaaaaaaaaaaaaaaaaaaaaaaaaaaaaaaaaaaaaaaaaaaaaaaaaaaaaaaaaaaugcaucccccccccccccccccccccccccccccccaaaggcucuuuucagagccaccagaauu

SEQ ID NO: 2241 - RNA, 1901 nt, Artificial Sequence
  mRNA product Design f-3 comprising derived and/or modified sequence from HRSV(A2)__F-del_DSCav1_mut1 (opt3)
gggagagucccgcagucggcguccagcggcucugcuuguucgugugugugucguugcaggccuuauucaagcuuaccauggagcugcucauccuuaaggccaacgcuauuaccacaauacugacugcagugacguucugcuuugccagcggccagaauaucaccgaagaguucuaccaauccacauguucugcggucucaaaaggguauuugggagcuuuaagaacugguugguacaccaguguuauuacaaucgaacugagcaacauuaaggagaauaaaugcaacggcaccgacgccaaggugaaacuaaucaagcaggaacucgauaaguauaaaaaugcaguaacugagcugcagcuucugaugcaguccacacccgccaccgggucuggaucggcuauauguucaggcguggcagucugcaagguguugcaccucgagggugaaguuaacaaaaucaagagcgcccugcugaguacgaauaaagcuguggucucccucucuaacggggugagcguauuaacuuuuaagguucuggaccuuaagaauuacauugauaaacaauugcugccuauccuaaacaagcaguccuguucaauuccaaauaucgagaccgugauagaguuccagcagaaaaacaauaggcuccuggaaauuacacgggaguuuagugucaacgccggagugacuaccccggugagcacauauaugcuuaccaauucugaacuguugucccucaucaacgacaugcccauuacgaacgaucaaaagaaacugaugucaaauaacguccagaucguucgccagcagagcuacaguaucaugugcauuauaaaggaggaaguguuagcguauguagugcaacugccucucuacggcgucaucgacacuccauguuggaaacuucauacaucuccccugugcaccacuaauacaaaggagggcuccaacauuuguuugacccgaacggaucgugggugguacugcgacaaugcaggaagcgugucguucuuuccucaggccgaaaccuguaagguucagucuaacagaguguucugcgauacaaugaacucccuaacucugccaucagaggucaaucucugcaauguggacaucuuuaaccccaaauaugauuguaagauaaugaccaguaaaacagacguaagcuccucuguuauuacuagccugggugcuaucgugucaugcuacggcaagaccaaauguacagccaguaauaagaacagggggaucauuaagaccuucuccaauggaugcgauuaugucagcaacaaaggcguggacacugucucuguggguaauacgcuuuacuguguuaacaagcaagaggggcagucacuguaugugaaaggagaaccuaucauuaacuuuuacgacccauugguauucccgagugaugaguuugacgcaagcauaucccaggucaaugaaaagaucaaccagucucucgcuuucauucggaaaucggaugagcuguuacacaaugugaacgccggcaagagcacaaccaauaucaugaucacuaccauuauaaucguuauuaucgugauucugcuaucccucaucgcggucggccugcuuuuguauugcaaggcccgcugaggacuaguacuggcugcaucucccuuuccucuguccuccauccuucucccaggauggugaagggggaccugguacccagugauccccaccccaggauccuaaaucaugacuuaccugcuaauaaaaacucauuggaaaagugagaagaucuaaaaaaaaaaaaaaaaaaaaaaaaaaaaaaaaaaaaaaaaaaaaaaaaaaaaaaaaaaaaaaaaugcaucccccccccccccccccccccccccccccccaaaggcucuuuucagagccaccagaauu

SEQ ID NO: 2242 - RNA, 1901 nt, Artificial Sequence
  mRNA product Design f-3 comprising derived and/or modified sequence from HRSV(A2)__F-del_DSCav1_mut1 (opt4)
gggagagucccgcagucggcguccagcggcucugcuuguucgugugugugucguugcaggccuuauucaagcuuaccauggagcugcugauccugaaggccaacgccaucaccaccauccugaccgccgugaccuucugcuucgccagcggccagaacaucaccgaggaguucuaccagagcaccugcagcgccgugagcaagggcuaccugggcgcccugagaaccggcugguacaccagcgugaucaccaucgagcugagcaacaucaaggagaacaagugcaacggcaccgacgccaaggugaagcugaucaagcaggagcuggacaaguacaagaacgccgugaccgagcugcagcugcugaugcagagcacccccgccaccggcagcggcagcgccaucugcagcggcguggccgugugcaaggugcugcaccuggagggcgaggugaacaagaucaagagcgcccugcugagcaccaacaaggccguggugagccugagcaacggcgugagcgugcugaccuucaaggugcuggaccugaagaacuacaucgacaagcagcugcugcccauccugaacaagcagagcugcagcauccccaacaucgagaccgugaucgaguuccagcagaagaacaacagacugcuggagaucaccagagaguucagcgugaacgccggcgugaccacccccgugagcaccuacaugcugaccaacagcgagcugcugagccugaucaacgacaugcccaucaccaacgaccagaagaagcugaugagcaacaacgugcagaucgugagacagcagagcuacagcaucaugugcaucaucaaggaggaggugcuggccuacguggugcagcugccccuguacggcgugaucgacacccccugcuggaagcugcacaccagcccccugugcaccaccaacaccaaggagggcagcaacaucugccugaccagaaccgacagaggcugguacugcgacaacgccggcagcgugagcuucuucccccaggccgagaccugcaaggugcagagcaacagaguguucugcgacaccaugaacagccugacccugcccagcgaggugaaccugugcaacguggacaucuucaaccccaaguacgacugcaagaucaugaccagcaagaccgacgugagcagcagcgugaucaccagccugggcgccaucgugagcugcuacggcaagaccaagugcaccgccagcaacaagaacagaggcaucaucaagaccuucagcaacggcugcgacuacgugagcaacaagggcguggacaccgugagcgugggcaacacccuguacugcgugaacaagcaggagggccagagccuguacgugaagggcgagcccaucaucaacuucuacgacccccugguguuccccagcgacgaguucgacgccagcaucagccaggugaacgagaagaucaaccagagccuggccuucaucagaaagagcgacgagcugcugcacaacgugaacgccggcaagagcaccaccaacaucaugaucaccaccaucaucaucgugaucaucgugauccugcugagccugaucgccgugggccugcugcuguacugcaaggccagaugaggacuaguacuggcugcaucucccuuuccucuguccuccauccuucucccaggauggugaagggggaccugguacccagugauccccaccccaggauccuaaaucaugacuuaccugcuaauaaaaacucauuggaaaagugagaagaucuaaaaaaaaaaaaaaaaaaaaaaaaaaaaaaaaaaaaaaaaaaaaaaaaaaaaaaaaaaaaaaaaugcaucccccccccccccccccccccccccccccccaaaggcucuuuucagagccaccagaauu

SEQ ID NO: 2243 - RNA, 1901 nt, Artificial Sequence
  mRNA product Design f-3 comprising derived and/or modified sequence from HRSV(A2)__F-del_DSCav1_mut1 (opt5)
gggagagucccgcagucggcguccagcggcucugcuuguucgugugugugucguugcaggccuuauucaagcuuaccauggagcugcucauccugaaggccaacgcuauuaccacaauccuuacggccgugaccuucugcuuugcgagcggccagaauauuacagaagaguucuaccaauccaccuguucugcugucagcaaaggguaucugggagcccucagaacaggcugguacaccuccguuaucacaauugaacugucuaacaucaaggagaauaaaugcaacgggaccgacgccaaggugaaacuuaucaagcaggaacuggauaaguauaaaaaugcugugacggagcuccagcugcugaugcagagcacccccgccacaggauccggcucugcuauuuguagcggggucgccgugugcaagguucuccaccuggagggagaagugaacaaaaucaaguccgcgcuucugagcaccaauaaagccgucgugucucucuccaacggcguuagcgugcugacauuuaagguccuugaccugaagaauuacauugauaaacaacuccugccuauccugaacaagcagucuuguuccauuccgaauaucgagaccgugauugaguuccagcagaaaaacaaucggcuccuggaaaucacgcgcgaguuuagcgugaacgcuggcgucacaacccccguuucuacauauaugcuuaccaauuccgaacugcucagccugaucaacgacaugccuauuaccaacgaucaaaagaaacuuauguccaauaacgugcagaucgugagacagcagucuuacagcauuaugugcaucauuaaggaggaaguccuggccuaugugguucaacucccccuguacggggugaucgacacaccuuguuggaaacugcauacgagcccccucugcaccacaaauaccaaggagggauccaacaucugucugacacggaccgaucgcggcugguacugcgacaaugcugggucugucuccuucuuuccucaggccgaaacguguaaggugcagagcaacagaguuuucugcgauacaaugaacucucuuacccugccgagcgaggugaaucucugcaaugucgacauuuuuaaccccaaauaugauuguaagaucaugaccuccaaaacagacgugucuagcuccgucauuaccagccugggagcgaucgugucuugcuacggcaagacaaaauguacggccuccaauaagaaccgggggauuaucaagaccuucagcaauggaugcgauuauguuucuaacaaaggcguggacacagucuccgugggcaauacccuuuacuguguuaacaagcaagaggggcagagccuguaugugaaaggagaaccuaucauuaacuuuuacgacccccucgucuucccuuccgaugaguuugacgcuucuaucagccaggugaaugaaaagauuaaccagucccuggccuucauccgcaaaucugaugagcugcuccacaaugugaacgcuggcaagagcacaaccaauauuaugaucacgaccauuaucaucguuauuaucgucauucugcuuucccugaucgccguggggcuccugcuguauugcaaggccagaugaggacuaguacuggcugcaucucccuuuccucuguccuccauccuucucccaggauggugaagggggaccugguacccagugauccccaccccaggauccuaaaucaugacuuaccugcuaauaaaaacucauuggaaaagugagaagaucuaaaaaaaaaaaaaaaaaaaaaaaaaaaaaaaaaaaaaaaaaaaaaaaaaaaaaaaaaaaaaaaaugcaucccccccccccccccccccccccccccccccaaaggcucuuuucagagccaccagaauu

SEQ ID NO: 2244 - RNA, 1901 nt, Artificial Sequence
  mRNA product Design f-3 comprising derived and/or modified sequence from HRSV(A2)__F-del_DSCav1_mut1 (opt6)
gggagagucccgcagucggcguccagcggcucugcuuguucgugugugugucguugcaggccuuauucaagcuuaccauggaacuacucaucuuaaaagcaaacgcaauaacaacuauucuaaccgcaguaacauuuuguuucgcaucaggacaaaacauaaccgaagaauuuuaccaaucaacauguuccgcaguuucaaaaggauacuuaggcgcacuaagaacaggcugguacaccuccgugauaacaauagaauuaucaaacauaaaagaaaacaaauguaauggaacugacgccaaaguaaaacuaauaaaacaagaacuagacaaauauaaaaacgcaguaacugaacuacaauuacuaaugcaauccaccccagcaacaggcucaggcucagcaauuugcuccggagucgcugucugcaaaguacuacaucuugaaggcgaagucaauaaaauaaaaucagcacuucuaucaacaaacaaagcaguagucucacuaucaaacggaguaucaguacuaacauuuaaaguauuagaucuaaaaaacuauauagauaaacaacuacuacccauacucaauaaacaauccuguucaauaccaaauauagaaaccguaauagaauuucaacaaaaaaacaaucgacuauuagaaaucacccgagaauuuucagucaaugcaggcguaacaacaccaguaucaaccuacauguuaaccaacuccgaacuacuaucccucauaaacgacaugccaauaacaaacgaucaaaaaaaacuaauguccaacaacguacaaauagucagacaacaaucuuauucaauaaugugcaucauaaaagaagaaguucuagccuacguaguucaacuuccauuauacggcguaauugauacaccaugcuggaaacuacacacauccccacuauguacaacaaacacaaaagaaggaucaaacaucugcuuaacuagaacagacagaggaugguacugcgacaacgcaggaucagucucauucuuuccacaagcagaaacaugcaagguccaaucaaacagaguauucugcgacacaaugaacuccuuaacacuaccaucugaaguaaaccuauguaauguagacauauuuaacccaaaauacgacugcaaaauaaugaccucaaaaacagacguauccucaucaguaauuacaagccucggagccauaguaucaugcuacggaaaaacaaaauguacagcaucaaacaaaaacagaggaauaauaaaaacguucuccaacggaugcgacuauguaucaaacaaaggcguagacacaguaucagucggaaauacccuuuacugcguaaacaaacaagaaggccaaagucuauacguaaaaggagagccaauaauaaacuuuuaugacccccuuguauucccaucugacgaauuugaugcaucaauaucccaagucaacgaaaaaaucaaccaaucauuagccuuuauuagaaaaagugacgaacuauuacacaacguuaaugcagggaaaucaacaacaaauauaaugauuacaaccauaauuauaguuaucauaguuauacuacucucacuaaucgcaguaggauuacuauuauacugcaaagcaagauaaggacuaguacuggcugcaucucccuuuccucuguccuccauccuucucccaggauggugaagggggaccugguacccagugauccccaccccaggauccuaaaucaugacuuaccugcuaauaaaaacucauuggaaaagugagaagaucuaaaaaaaaaaaaaaaaaaaaaaaaaaaaaaaaaaaaaaaaaaaaaaaaaaaaaaaaaaaaaaaaugcaucccccccccccccccccccccccccccccccaaaggcucuuuucagagccaccagaauu

SEQ ID NO: 2245 - RNA, 1901 nt, Artificial Sequence
  mRNA product Design f-3 comprising derived and/or modified sequence from HRSV(A2)__F-del_DSCav1_mut1 (opt11)
gggagagucccgcagucggcguccagcggcucugcuuguucgugugugugucguugcaggccuuauucaagcuuaccauggaacuacucauccuaaaagccaacgcaaucacaaccauacuuacagcuguuaccuucugcuucgcauccggccaaaauaucaccgaagaguucuaccaaucaaccugcuccgccgucagcaaaggauaccucggcgcccuccgaaccggaugguacacuucugucaucacaaucgaacucuccaacaucaaagaaaacaaaugcaacgguaccgacgcgaaagucaaacucaucaaacaagaacuagacaaguacaaaaacgccgucaccgaacugcaacuccucaugcaauccacaccagcaacgggaucaggauccgccaucugcucaggcgucgccgucugcaaaguccugcaccuagaaggagaaguaaacaaaauuaaauccgcccuacucuccaccaacaaagcagucgucucacuauccaacggcgucuccguccucaccuuuaagguccucgaccucaaaaauuauauagacaaacaacuccuccccauccuaaacaaacaaucaugcuccauccccaacauagaaaccgucaucgaauuucaacagaaaaacaaccgacucuuagaaauuacccgcgaguucagcgucaacgccggagucaccacacccgucucaaccuacaugcucaccaacucagaacuccucucacuaaucaaugauaugcccaucacaaacgaccaaaagaaacucauguccaacaacguacaaaucguucgccaacaaagcuacuccaucauguguaucauuaaagaagaaguccucgccuacgucguccaacuuccgcucuacggcguaaucgacacccccugcuggaaacuucacaccucgccccucugcaccacaaacaccaaagaaggcuccaacaucugccuaacccgcaccgaccgcggcugguacugcgacaacgccggcuccgucucauuuuucccccaggcggagaccugcaaaguccaauccaaccgcgucuucugcgacaccaugaacucucuuacccucccaucagaaguaaaccucugcaacgucgacaucuuuaaccccaaauacgauugcaagauaaugaccuccaaaacagacgucucaucguccgucaucaccucccuaggagcuaucgucuccugcuacggcaagaccaaaugcaccgcuuccaacaaaaaccgcggcaucaucaaaaccuucuccaacgggugcgacuacgucucuaacaaaggcguggacacaguauccguaggaaacacacuguacugcguaaacaaacaagagggccaaucgcuuuacgucaaaggcgagccaauuaucaacuucuacgacccgcucgucuucccaucagacgaguucgacgcauccaucucccaagucaacgagaaaaucaaucagucccucgccuucauacgcaaauccgacgaacuccuacauaacguaaacgccggcaaaucuaccacaaacaucaugaucacaaccaucaucaucguaaucaucgucauccuucucucgcucaucgccguaggacugcuacuuuacugcaaggcccgcuaaggacuaguacuggcugcaucucccuuuccucuguccuccauccuucucccaggauggugaagggggaccugguacccagugauccccaccccaggauccuaaaucaugacuuaccugcuaauaaaaacucauuggaaaagugagaagaucuaaaaaaaaaaaaaaaaaaaaaaaaaaaaaaaaaaaaaaaaaaaaaaaaaaaaaaaaaaaaaaaaugcaucccccccccccccccccccccccccccccccaaaggcucuuuucagagccaccagaauu

SEQ ID NO: 2246 - RNA, 2117 nt, Artificial Sequence
  mRNA product Design f-4 comprising derived and/or modified sequence from HRSV(A2)__F-del_DSCav1_mut1 (opt1)
gggagagucccgcagucggcguccagcggcucugcuuguucgugugugugucguugcaggccuuauucaagcuuaccauggagcugcucauccugaaggccaacgccaucaccaccauccugacggcggugaccuucugcuucgccagcggccagaacaucaccgaggaguucuaccaguccacgugcagcgccgucuccaagggguaccucggcgcccugcggaccggcugguacaccuccgugaucaccaucgagcugagcaacaucaaggagaacaagugcaacgggaccgacgccaaggugaagcucaucaagcaggagcuggacaaguacaagaacgcggucacggagcugcagcuccugaugcaguccaccccggcaaccggcuccggcuccgccaucugcagcggcgucgccgugugcaaggugcugcaccucgagggggaggucaacaagaucaagagcgcccugcuguccaccaacaaggccguggugagccucuccaacggcgucagcgugcugaccuucaaggugcuggaccucaagaacuacaucgacaagcagcugcugcccauccugaacaagcagagcugcuccauccccaacaucgagacggugaucgaguuccagcagaagaacaaccggcuccuggagaucacccgcgaguucagcgugaacgccggggucaccacccccguguccacguacaugcugaccaacagcgagcuccugucccugaucaacgacaugccgaucaccaacgaccagaagaagcucaugagcaacaacgugcagaucguccggcagcaguccuacagcaucaugugcaucaucaaggaggaggugcuggcguacgugguccagcugccccucuacggcgugaucgacacccccugcuggaagcugcacacgagcccccugugcaccaccaacaccaaggagggguccaacaucugccucacgcgcaccgaccggggcugguacugcgacaacgccggcagcgucuccuucuucccgcaggccgagaccugcaaggugcagagcaaccgcguguucugcgacaccaugaacucccugacgcugcccagcgagguaaaccucugcaacgucgacaucuucaaccccaaguacgacugcaagaucaugaccuccaagaccgacgugagcuccagcgugaucaccucccugggggccaucgucagcugcuacggcaagacgaagugcaccgccagcaacaagaaccgggggaucaucaagaccuucuccaacggcugcgacuacgugagcaacaagggcguggacaccguguccgucgggaacacccuguacugcgugaacaagcaggagggccagagccucuacgugaagggggagcccaucaucaacuucuacgacccgcuggucuuccccuccgacgaguucgacgcgagcaucucccaggugaacgagaagaucaaccagagccuggccuucauccgcaaguccgacgagcugcuccacaacgugaacgccggcaagagcacgaccaacaucaugaucaccaccaucaucaucgucaucaucgugauccugcugucccucaucgccguggggcugcugcucuacugcaaggcccggugaggacuagugaagggaacacccaaauuuaauucagccuuaagcacaauuaauuaagagugaaacguaauuguacaagcaguuggucacccaccauagggcaugaucaacaccgcaaccuuuccuuuuucccccagugauucugaaaaaccccucuucccuucagcuugcuuagauguuccaaauuuaguaagcuuaaggcggccuacagaagaaaaagaaaaaaaaggccacaaaaguucccucucacuuucaguaaauaaaauaaaagcagcaacagaaauaaagaaauaaaugaaauucaaaaugaaauaaauauuguguugugcagcauuaaaaaaucaauaaaaauuaaaaaugagcaagaucuaaaaaaaaaaaaaaaaaaaaaaaaaaaaaaaaaaaaaaaaaaaaaaaaaaaaaaaaaaaaaaaaugcaucccccccccccccccccccccccccccccccaaaggcucuuuucagagccaccagaauu

SEQ ID NO: 2247 - RNA, 2117 nt, Artificial Sequence
  mRNA product Design f-4 comprising derived and/or modified sequence from HRSV(A2)__F-del_DSCav1_mut1 (opt1)
gggagagucccgcagucggcguccagcggcucugcuuguucgugugugugucguugcaggccuuauucaagcuuaccauggagcugcucauccugaaggccaacgccaucaccaccauccugacggcggugaccuucugcuucgccagcggccagaacaucaccgaggaguucuaccaguccacgugcagcgccgucuccaagggguaccucggcgcccugcgcaccgggugguacaccagcgugaucaccaucgagcuguccaacaucaaggagaacaagugcaacggcaccgacgccaaggugaagcucaucaagcaggagcuggacaaguacaagaacgcggucacggagcugcagcuccugaugcagagcacccccgccaccggguccggcagcgccaucugcuccggcguggccgugugcaagguccugcaccucgagggggaggugaacaagaucaagagcgcgcugcuguccaccaacaaggccguggucagccucuccaacggcgugagcgugcugacguucaagguccuggaccucaagaacuacaucgacaagcagcugcugccgauccucaacaagcaguccugcagcauccccaacaucgagaccgugaucgaguuccagcagaagaacaaccggcugcuggagaucacccgcgaguucuccgugaacgccggggucaccacgcccgugagcaccuacaugcucaccaacuccgagcugcugagccucaucaacgacaugcccaucaccaacgaccagaagaagcugaugagcaacaacgugcagaucguccggcagcaguccuacagcaucaugugcaucaucaaggaggaggugcuggccuacgugguccagcucccgcuguacggcgugaucgacacgcccugcuggaagcugcacaccagcccccucugcaccaccaacacgaaggagggguccaacaucugccugacccgcaccgaccggggcugguacugcgacaacgccggcuccgugagcuucuucccccaggcggagaccugcaagguccaguccaaccgcguguucugcgacacgaugaacagccugacccucccguccgaggucaaccugugcaacguggacaucuucaaccccaaguacgacugcaagaucaugaccagcaagaccgacguguccagcuccgucaucacgagccugggggccaucguguccugcuacggcaagaccaagugcaccgccagcaacaagaaccgggggaucaucaagaccuucuccaacggcugcgacuacgugagcaacaagggcgucgacacgguguccguggggaacacccucuacugcgucaacaagcaggagggccagagccuguacgugaagggggagcccaucaucaacuucuacgacccccugguguucccgagcgacgaguucgacgccuccaucagccaggucaacgagaagaucaaccagucccucgccuucauccgcaagagcgacgagcugcugcacaacgugaacgcgggcaaguccaccaccaacaucaugaucaccacgaucaucaucgugaucaucgucauccuccugagccugaucgccguggggcuccugcuguacugcaaggcccggugaggacuagugaagggaacacccaaauuuaauucagccuuaagcacaauuaauuaagagugaaacguaauuguacaagcaguuggucacccaccauagggcaugaucaacaccgcaaccuuuccuuuuucccccagugauucugaaaaaccccucuucccuucagcuugcuuagauguuccaaauuuaguaagcuuaaggcggccuacagaagaaaaagaaaaaaaaggccacaaaaguucccucucacuuucaguaaauaaaauaaaagcagcaacagaaauaaagaaauaaaugaaauucaaaaugaaauaaauauuguguugugcagcauuaaaaaaucaauaaaaauuaaaaaugagcaagaucuaaaaaaaaaaaaaaaaaaaaaaaaaaaaaaaaaaaaaaaaaaaaaaaaaaaaaaaaaaaaaaaaugcaucccccccccccccccccccccccccccccccaaaggcucuuuucagagccaccagaauu

SEQ ID NO: 2248 - RNA, 2117 nt, Artificial Sequence
  mRNA product Design f-4 comprising derived and/or modified sequence from HRSV(A2)__F-del_DSCav1_mut1 (opt2)
gggagagucccgcagucggcguccagcggcucugcuuguucgugugugugucguugcaggccuuauucaagcuuaccauggagcuccucauccucaaggccaacgccaucaccaccauccucaccgccgucaccuucugcuucgccuccggccagaacaucaccgaggaguucuaccaguccaccugcuccgccgucuccaagggcuaccucggcgcccuccgcaccggcugguacaccuccgucaucaccaucgagcucuccaacaucaaggagaacaagugcaacggcaccgacgccaaggucaagcucaucaagcaggagcucgacaaguacaagaacgccgucaccgagcuccagcuccucaugcaguccacccccgccaccggcuccggcuccgccaucugcuccggcgucgccgucugcaagguccuccaccucgagggcgaggucaacaagaucaaguccgcccuccucuccaccaacaaggccgucgucucccucuccaacggcgucuccguccucaccuucaagguccucgaccucaagaacuacaucgacaagcagcuccuccccauccucaacaagcaguccugcuccauccccaacaucgagaccgucaucgaguuccagcagaagaacaaccgccuccucgagaucacccgcgaguucuccgucaacgccggcgucaccacccccgucuccaccuacaugcucaccaacuccgagcuccucucccucaucaacgacaugcccaucaccaacgaccagaagaagcucauguccaacaacguccagaucguccgccagcaguccuacuccaucaugugcaucaucaaggaggagguccucgccuacgucguccagcucccccucuacggcgucaucgacacccccugcuggaagcuccacaccuccccccucugcaccaccaacaccaaggagggcuccaacaucugccucacccgcaccgaccgcggcugguacugcgacaacgccggcuccgucuccuucuucccccaggccgagaccugcaagguccaguccaaccgcgucuucugcgacaccaugaacucccucacccuccccuccgaggucaaccucugcaacgucgacaucuucaaccccaaguacgacugcaagaucaugaccuccaagaccgacgucuccuccuccgucaucaccucccucggcgccaucgucuccugcuacggcaagaccaagugcaccgccuccaacaagaaccgcggcaucaucaagaccuucuccaacggcugcgacuacgucuccaacaagggcgucgacaccgucuccgucggcaacacccucuacugcgucaacaagcaggagggccagucccucuacgucaagggcgagcccaucaucaacuucuacgacccccucgucuuccccuccgacgaguucgacgccuccaucucccaggucaacgagaagaucaaccagucccucgccuucauccgcaaguccgacgagcuccuccacaacgucaacgccggcaaguccaccaccaacaucaugaucaccaccaucaucaucgucaucaucgucauccuccucucccucaucgccgucggccuccuccucuacugcaaggcccgcugaggacuagugaagggaacacccaaauuuaauucagccuuaagcacaauuaauuaagagugaaacguaauuguacaagcaguuggucacccaccauagggcaugaucaacaccgcaaccuuuccuuuuucccccagugauucugaaaaaccccucuucccuucagcuugcuuagauguuccaaauuuaguaagcuuaaggcggccuacagaagaaaaagaaaaaaaaggccacaaaaguucccucucacuuucaguaaauaaaauaaaagcagcaacagaaauaaagaaauaaaugaaauucaaaaugaaauaaauauuguguugugcagcauuaaaaaaucaauaaaaauuaaaaaugagcaagaucuaaaaaaaaaaaaaaaaaaaaaaaaaaaaaaaaaaaaaaaaaaaaaaaaaaaaaaaaaaaaaaaaugcaucccccccccccccccccccccccccccccccaaaggcucuuuucagagccaccagaauu

SEQ ID NO: 2249 - RNA, 2117 nt, Artificial Sequence
  mRNA product Design f-4 comprising derived and/or modified sequence from HRSV(A2)__F-del_DSCav1_mut1 (opt3)
gggagagucccgcagucggcguccagcggcucugcuuguucgugugugugucguugcaggccuuauucaagcuuaccauggagcugcucauccuuaaggccaacgcuauuaccacaauacugacugcagugacguucugcuuugccagcggccagaauaucaccgaagaguucuaccaauccacauguucugcggucucaaaaggguauuugggagcuuuaagaacugguugguacaccaguguuauuacaaucgaacugagcaacauuaaggagaauaaaugcaacggcaccgacgccaaggugaaacuaaucaagcaggaacucgauaaguauaaaaaugcaguaacugagcugcagcuucugaugcaguccacacccgccaccgggucuggaucggcuauauguucaggcguggcagucugcaagguguugcaccucgagggugaaguuaacaaaaucaagagcgcccugcugaguacgaauaaagcuguggucucccucucuaacggggugagcguauuaacuuuuaagguucuggaccuuaagaauuacauugauaaacaauugcugccuauccuaaacaagcaguccuguucaauuccaaauaucgagaccgugauagaguuccagcagaaaaacaauaggcuccuggaaauuacacgggaguuuagugucaacgccggagugacuaccccggugagcacauauaugcuuaccaauucugaacuguugucccucaucaacgacaugcccauuacgaacgaucaaaagaaacugaugucaaauaacguccagaucguucgccagcagagcuacaguaucaugugcauuauaaaggaggaaguguuagcguauguagugcaacugccucucuacggcgucaucgacacuccauguuggaaacuucauacaucuccccugugcaccacuaauacaaaggagggcuccaacauuuguuugacccgaacggaucgugggugguacugcgacaaugcaggaagcgugucguucuuuccucaggccgaaaccuguaagguucagucuaacagaguguucugcgauacaaugaacucccuaacucugccaucagaggucaaucucugcaauguggacaucuuuaaccccaaauaugauuguaagauaaugaccaguaaaacagacguaagcuccucuguuauuacuagccugggugcuaucgugucaugcuacggcaagaccaaauguacagccaguaauaagaacagggggaucauuaagaccuucuccaauggaugcgauuaugucagcaacaaaggcguggacacugucucuguggguaauacgcuuuacuguguuaacaagcaagaggggcagucacuguaugugaaaggagaaccuaucauuaacuuuuacgacccauugguauucccgagugaugaguuugacgcaagcauaucccaggucaaugaaaagaucaaccagucucucgcuuucauucggaaaucggaugagcuguuacacaaugugaacgccggcaagagcacaaccaauaucaugaucacuaccauuauaaucguuauuaucgugauucugcuaucccucaucgcggucggccugcuuuuguauugcaaggcccgcugaggacuagugaagggaacacccaaauuuaauucagccuuaagcacaauuaauuaagagugaaacguaauuguacaagcaguuggucacccaccauagggcaugaucaacaccgcaaccuuuccuuuuucccccagugauucugaaaaaccccucuucccuucagcuugcuuagauguuccaaauuuaguaagcuuaaggcggccuacagaagaaaaagaaaaaaaaggccacaaaaguucccucucacuuucaguaaauaaaauaaaagcagcaacagaaauaaagaaauaaaugaaauucaaaaugaaauaaauauuguguugugcagcauuaaaaaaucaauaaaaauuaaaaaugagcaagaucuaaaaaaaaaaaaaaaaaaaaaaaaaaaaaaaaaaaaaaaaaaaaaaaaaaaaaaaaaaaaaaaaugcaucccccccccccccccccccccccccccccccaaaggcucuuuucagagccaccagaauu

SEQ ID NO: 2250 - RNA, 2117 nt, Artificial Sequence
  mRNA product Design f-4 comprising derived and/or modified sequence from HRSV(A2)__F-del_DSCav1_mut1 (opt4)
gggagagucccgcagucggcguccagcggcucugcuuguucgugugugugucguugcaggccuuauucaagcuuaccauggagcugcugauccugaaggccaacgccaucaccaccauccugaccgccgugaccuucugcuucgccagcggccagaacaucaccgaggaguucuaccagagcaccugcagcgccgugagcaagggcuaccugggcgcccugagaaccggcugguacaccagcgugaucaccaucgagcugagcaacaucaaggagaacaagugcaacggcaccgacgccaaggugaagcugaucaagcaggagcuggacaaguacaagaacgccgugaccgagcugcagcugcugaugcagagcacccccgccaccggcagcggcagcgccaucugcagcggcguggccgugugcaaggugcugcaccuggagggcgaggugaacaagaucaagagcgcccugcugagcaccaacaaggccguggugagccugagcaacggcgugagcgugcugaccuucaaggugcuggaccugaagaacuacaucgacaagcagcugcugcccauccugaacaagcagagcugcagcauccccaacaucgagaccgugaucgaguuccagcagaagaacaacagacugcuggagaucaccagagaguucagcgugaacgccggcgugaccacccccgugagcaccuacaugcugaccaacagcgagcugcugagccugaucaacgacaugcccaucaccaacgaccagaagaagcugaugagcaacaacgugcagaucgugagacagcagagcuacagcaucaugugcaucaucaaggaggaggugcuggccuacguggugcagcugccccuguacggcgugaucgacacccccugcuggaagcugcacaccagcccccugugcaccaccaacaccaaggagggcagcaacaucugccugaccagaaccgacagaggcugguacugcgacaacgccggcagcgugagcuucuucccccaggccgagaccugcaaggugcagagcaacagaguguucugcgacaccaugaacagccugacccugcccagcgaggugaaccugugcaacguggacaucuucaaccccaaguacgacugcaagaucaugaccagcaagaccgacgugagcagcagcgugaucaccagccugggcgccaucgugagcugcuacggcaagaccaagugcaccgccagcaacaagaacagaggcaucaucaagaccuucagcaacggcugcgacuacgugagcaacaagggcguggacaccgugagcgugggcaacacccuguacugcgugaacaagcaggagggccagagccuguacgugaagggcgagcccaucaucaacuucuacgacccccugguguuccccagcgacgaguucgacgccagcaucagccaggugaacgagaagaucaaccagagccuggccuucaucagaaagagcgacgagcugcugcacaacgugaacgccggcaagagcaccaccaacaucaugaucaccaccaucaucaucgugaucaucgugauccugcugagccugaucgccgugggccugcugcuguacugcaaggccagaugaggacuagugaagggaacacccaaauuuaauucagccuuaagcacaauuaauuaagagugaaacguaauuguacaagcaguuggucacccaccauagggcaugaucaacaccgcaaccuuuccuuuuucccccagugauucugaaaaaccccucuucccuucagcuugcuuagauguuccaaauuuaguaagcuuaaggcggccuacagaagaaaaagaaaaaaaaggccacaaaaguucccucucacuuucaguaaauaaaauaaaagcagcaacagaaauaaagaaauaaaugaaauucaaaaugaaauaaauauuguguugugcagcauuaaaaaaucaauaaaaauuaaaaaugagcaagaucuaaaaaaaaaaaaaaaaaaaaaaaaaaaaaaaaaaaaaaaaaaaaaaaaaaaaaaaaaaaaaaaaugcaucccccccccccccccccccccccccccccccaaaggcucuuuucagagccaccagaauu

SEQ ID NO: 2251 - RNA, 2117 nt, Artificial Sequence
  mRNA product Design f-4 comprising derived and/or modified sequence from HRSV(A2)__F-del_DSCav1_mut1 (opt5)
gggagagucccgcagucggcguccagcggcucugcuuguucgugugugugucguugcaggccuuauucaagcuuaccauggagcugcucauccugaaggccaacgcuauuaccacaauccuuacggccgugaccuucugcuuugcgagcggccagaauauuacagaagaguucuaccaauccaccuguucugcugucagcaaaggguaucugggagcccucagaacaggcugguacaccuccguuaucacaauugaacugucuaacaucaaggagaauaaaugcaacgggaccgacgccaaggugaaacuuaucaagcaggaacuggauaaguauaaaaaugcugugacggagcuccagcugcugaugcagagcacccccgccacaggauccggcucugcuauuuguagcggggucgccgugugcaagguucuccaccuggagggagaagugaacaaaaucaaguccgcgcuucugagcaccaauaaagccgucgugucucucuccaacggcguuagcgugcugacauuuaagguccuugaccugaagaauuacauugauaaacaacuccugccuauccugaacaagcagucuuguuccauuccgaauaucgagaccgugauugaguuccagcagaaaaacaaucggcuccuggaaaucacgcgcgaguuuagcgugaacgcuggcgucacaacccccguuucuacauauaugcuuaccaauuccgaacugcucagccugaucaacgacaugccuauuaccaacgaucaaaagaaacuuauguccaauaacgugcagaucgugagacagcagucuuacagcauuaugugcaucauuaaggaggaaguccuggccuaugugguucaacucccccuguacggggugaucgacacaccuuguuggaaacugcauacgagcccccucugcaccacaaauaccaaggagggauccaacaucugucugacacggaccgaucgcggcugguacugcgacaaugcugggucugucuccuucuuuccucaggccgaaacguguaaggugcagagcaacagaguuuucugcgauacaaugaacucucuuacccugccgagcgaggugaaucucugcaaugucgacauuuuuaaccccaaauaugauuguaagaucaugaccuccaaaacagacgugucuagcuccgucauuaccagccugggagcgaucgugucuugcuacggcaagacaaaauguacggccuccaauaagaaccgggggauuaucaagaccuucagcaauggaugcgauuauguuucuaacaaaggcguggacacagucuccgugggcaauacccuuuacuguguuaacaagcaagaggggcagagccuguaugugaaaggagaaccuaucauuaacuuuuacgacccccucgucuucccuuccgaugaguuugacgcuucuaucagccaggugaaugaaaagauuaaccagucccuggccuucauccgcaaaucugaugagcugcuccacaaugugaacgcuggcaagagcacaaccaauauuaugaucacgaccauuaucaucguuauuaucgucauucugcuuucccugaucgccguggggcuccugcuguauugcaaggccagaugaggacuagugaagggaacacccaaauuuaauucagccuuaagcacaauuaauuaagagugaaacguaauuguacaagcaguuggucacccaccauagggcaugaucaacaccgcaaccuuuccuuuuucccccagugauucugaaaaaccccucuucccuucagcuugcuuagauguuccaaauuuaguaagcuuaaggcggccuacagaagaaaaagaaaaaaaaggccacaaaaguucccucucacuuucaguaaauaaaauaaaagcagcaacagaaauaaagaaauaaaugaaauucaaaaugaaauaaauauuguguugugcagcauuaaaaaaucaauaaaaauuaaaaaugagcaagaucuaaaaaaaaaaaaaaaaaaaaaaaaaaaaaaaaaaaaaaaaaaaaaaaaaaaaaaaaaaaaaaaaugcaucccccccccccccccccccccccccccccccaaaggcucuuuucagagccaccagaauu

SEQ ID NO: 2252 - RNA, 2117 nt, Artificial Sequence
  mRNA product Design f-4 comprising derived and/or modified sequence from HRSV(A2)__F-del_DSCav1_mut1 (opt6)
gggagagucccgcagucggcguccagcggcucugcuuguucgugugugugucguugcaggccuuauucaagcuuaccauggaacuacucaucuuaaaagcaaacgcaauaacaacuauucuaaccgcaguaacauuuuguuucgcaucaggacaaaacauaaccgaagaauuuuaccaaucaacauguuccgcaguuucaaaaggauacuuaggcgcacuaagaacaggcugguacaccuccgugauaacaauagaauuaucaaacauaaaagaaaacaaauguaauggaacugacgccaaaguaaaacuaauaaaacaagaacuagacaaauauaaaaacgcaguaacugaacuacaauuacuaaugcaauccaccccagcaacaggcucaggcucagcaauuugcuccggagucgcugucugcaaaguacuacaucuugaaggcgaagucaauaaaauaaaaucagcacuucuaucaacaaacaaagcaguagucucacuaucaaacggaguaucaguacuaacauuuaaaguauuagaucuaaaaaacuauauagauaaacaacuacuacccauacucaauaaacaauccuguucaauaccaaauauagaaaccguaauagaauuucaacaaaaaaacaaucgacuauuagaaaucacccgagaauuuucagucaaugcaggcguaacaacaccaguaucaaccuacauguuaaccaacuccgaacuacuaucccucauaaacgacaugccaauaacaaacgaucaaaaaaaacuaauguccaacaacguacaaauagucagacaacaaucuuauucaauaaugugcaucauaaaagaagaaguucuagccuacguaguucaacuuccauuauacggcguaauugauacaccaugcuggaaacuacacacauccccacuauguacaacaaacacaaaagaaggaucaaacaucugcuuaacuagaacagacagaggaugguacugcgacaacgcaggaucagucucauucuuuccacaagcagaaacaugcaagguccaaucaaacagaguauucugcgacacaaugaacuccuuaacacuaccaucugaaguaaaccuauguaauguagacauauuuaacccaaaauacgacugcaaaauaaugaccucaaaaacagacguauccucaucaguaauuacaagccucggagccauaguaucaugcuacggaaaaacaaaauguacagcaucaaacaaaaacagaggaauaauaaaaacguucuccaacggaugcgacuauguaucaaacaaaggcguagacacaguaucagucggaaauacccuuuacugcguaaacaaacaagaaggccaaagucuauacguaaaaggagagccaauaauaaacuuuuaugacccccuuguauucccaucugacgaauuugaugcaucaauaucccaagucaacgaaaaaaucaaccaaucauuagccuuuauuagaaaaagugacgaacuauuacacaacguuaaugcagggaaaucaacaacaaauauaaugauuacaaccauaauuauaguuaucauaguuauacuacucucacuaaucgcaguaggauuacuauuauacugcaaagcaagauaaggacuagugaagggaacacccaaauuuaauucagccuuaagcacaauuaauuaagagugaaacguaauuguacaagcaguuggucacccaccauagggcaugaucaacaccgcaaccuuuccuuuuucccccagugauucugaaaaaccccucuucccuucagcuugcuuagauguuccaaauuuaguaagcuuaaggcggccuacagaagaaaaagaaaaaaaaggccacaaaaguucccucucacuuucaguaaauaaaauaaaagcagcaacagaaauaaagaaauaaaugaaauucaaaaugaaauaaauauuguguugugcagcauuaaaaaaucaauaaaaauuaaaaaugagcaagaucuaaaaaaaaaaaaaaaaaaaaaaaaaaaaaaaaaaaaaaaaaaaaaaaaaaaaaaaaaaaaaaaaugcaucccccccccccccccccccccccccccccccaaaggcucuuuucagagccaccagaauu

SEQ ID NO: 2253 - RNA, 2117 nt, Artificial Sequence
  mRNA product Design f-4 comprising derived and/or modified sequence from HRSV(A2)__F-del_DSCav1_mut1 (opt11)
gggagagucccgcagucggcguccagcggcucugcuuguucgugugugugucguugcaggccuuauucaagcuuaccauggaacuacucauccuaaaagccaacgcaaucacaaccauacuuacagcuguuaccuucugcuucgcauccggccaaaauaucaccgaagaguucuaccaaucaaccugcuccgccgucagcaaaggauaccucggcgcccuccgaaccggaugguacacuucugucaucacaaucgaacucuccaacaucaaagaaaacaaaugcaacgguaccgacgcgaaagucaaacucaucaaacaagaacuagacaaguacaaaaacgccgucaccgaacugcaacuccucaugcaauccacaccagcaacgggaucaggauccgccaucugcucaggcgucgccgucugcaaaguccugcaccuagaaggagaaguaaacaaaauuaaauccgcccuacucuccaccaacaaagcagucgucucacuauccaacggcgucuccguccucaccuuuaagguccucgaccucaaaaauuauauagacaaacaacuccuccccauccuaaacaaacaaucaugcuccauccccaacauagaaaccgucaucgaauuucaacagaaaaacaaccgacucuuagaaauuacccgcgaguucagcgucaacgccggagucaccacacccgucucaaccuacaugcucaccaacucagaacuccucucacuaaucaaugauaugcccaucacaaacgaccaaaagaaacucauguccaacaacguacaaaucguucgccaacaaagcuacuccaucauguguaucauuaaagaagaaguccucgccuacgucguccaacuuccgcucuacggcguaaucgacacccccugcuggaaacuucacaccucgccccucugcaccacaaacaccaaagaaggcuccaacaucugccuaacccgcaccgaccgcggcugguacugcgacaacgccggcuccgucucauuuuucccccaggcggagaccugcaaaguccaauccaaccgcgucuucugcgacaccaugaacucucuuacccucccaucagaaguaaaccucugcaacgucgacaucuuuaaccccaaauacgauugcaagauaaugaccuccaaaacagacgucucaucguccgucaucaccucccuaggagcuaucgucuccugcuacggcaagaccaaaugcaccgcuuccaacaaaaaccgcggcaucaucaaaaccuucuccaacgggugcgacuacgucucuaacaaaggcguggacacaguauccguaggaaacacacuguacugcguaaacaaacaagagggccaaucgcuuuacgucaaaggcgagccaauuaucaacuucuacgacccgcucgucuucccaucagacgaguucgacgcauccaucucccaagucaacgagaaaaucaaucagucccucgccuucauacgcaaauccgacgaacuccuacauaacguaaacgccggcaaaucuaccacaaacaucaugaucacaaccaucaucaucguaaucaucgucauccuucucucgcucaucgccguaggacugcuacuuuacugcaaggcccgcuaaggacuagugaagggaacacccaaauuuaauucagccuuaagcacaauuaauuaagagugaaacguaauuguacaagcaguuggucacccaccauagggcaugaucaacaccgcaaccuuuccuuuuucccccagugauucugaaaaaccccucuucccuucagcuugcuuagauguuccaaauuuaguaagcuuaaggcggccuacagaagaaaaagaaaaaaaaggccacaaaaguucccucucacuuucaguaaauaaaauaaaagcagcaacagaaauaaagaaauaaaugaaauucaaaaugaaauaaauauuguguugugcagcauuaaaaaaucaauaaaaauuaaaaaugagcaagaucuaaaaaaaaaaaaaaaaaaaaaaaaaaaaaaaaaaaaaaaaaaaaaaaaaaaaaaaaaaaaaaaaugcaucccccccccccccccccccccccccccccccaaaggcucuuuucagagccaccagaauu

SEQ ID NO: 2254 - RNA, 1893 nt, Artificial Sequence
  mRNA product Design f-5 comprising derived and/or modified sequence from HRSV(A2)__F-del_DSCav1_mut1 (opt1)
gggagacuuucccauucuguagcagaauuugguguugccuguggucuuggucccgcggagaagcuuaccauggagcugcucauccugaaggccaacgccaucaccaccauccugacggcggugaccuucugcuucgccagcggccagaacaucaccgaggaguucuaccaguccacgugcagcgccgucuccaagggguaccucggcgcccugcggaccggcugguacaccuccgugaucaccaucgagcugagcaacaucaaggagaacaagugcaacgggaccgacgccaaggugaagcucaucaagcaggagcuggacaaguacaagaacgcggucacggagcugcagcuccugaugcaguccaccccggcaaccggcuccggcuccgccaucugcagcggcgucgccgugugcaaggugcugcaccucgagggggaggucaacaagaucaagagcgcccugcuguccaccaacaaggccguggugagccucuccaacggcgucagcgugcugaccuucaaggugcuggaccucaagaacuacaucgacaagcagcugcugcccauccugaacaagcagagcugcuccauccccaacaucgagacggugaucgaguuccagcagaagaacaaccggcuccuggagaucacccgcgaguucagcgugaacgccggggucaccacccccguguccacguacaugcugaccaacagcgagcuccugucccugaucaacgacaugccgaucaccaacgaccagaagaagcucaugagcaacaacgugcagaucguccggcagcaguccuacagcaucaugugcaucaucaaggaggaggugcuggcguacgugguccagcugccccucuacggcgugaucgacacccccugcuggaagcugcacacgagcccccugugcaccaccaacaccaaggagggguccaacaucugccucacgcgcaccgaccggggcugguacugcgacaacgccggcagcgucuccuucuucccgcaggccgagaccugcaaggugcagagcaaccgcguguucugcgacaccaugaacucccugacgcugcccagcgagguaaaccucugcaacgucgacaucuucaaccccaaguacgacugcaagaucaugaccuccaagaccgacgugagcuccagcgugaucaccucccugggggccaucgucagcugcuacggcaagacgaagugcaccgccagcaacaagaaccgggggaucaucaagaccuucuccaacggcugcgacuacgugagcaacaagggcguggacaccguguccgucgggaacacccuguacugcgugaacaagcaggagggccagagccucuacgugaagggggagcccaucaucaacuucuacgacccgcuggucuuccccuccgacgaguucgacgcgagcaucucccaggugaacgagaagaucaaccagagccuggccuucauccgcaaguccgacgagcugcuccacaacgugaacgccggcaagagcacgaccaacaucaugaucaccaccaucaucaucgucaucaucgugauccugcugucccucaucgccguggggcugcugcucuacugcaaggcccggugaggacuaguacuggcugcaucucccuuuccucuguccuccauccuucucccaggauggugaagggggaccugguacccagugauccccaccccaggauccuaaaucaugacuuaccugcuaauaaaaacucauuggaaaagugagaagaucuaaaaaaaaaaaaaaaaaaaaaaaaaaaaaaaaaaaaaaaaaaaaaaaaaaaaaaaaaaaaaaaaugcaucccccccccccccccccccccccccccccccaaaggcucuuuucagagccaccagaauu

SEQ ID NO: 2255 - RNA, 1893 nt, Artificial Sequence
  mRNA product Design f-5 comprising derived and/or modified sequence from HRSV(A2)__F-del_DSCav1_mut1 (opt1)
gggagacuuucccauucuguagcagaauuugguguugccuguggucuuggucccgcggagaagcuuaccauggagcugcucauccugaaggccaacgccaucaccaccauccugacggcggugaccuucugcuucgccagcggccagaacaucaccgaggaguucuaccaguccacgugcagcgccgucuccaagggguaccucggcgcccugcgcaccgggugguacaccagcgugaucaccaucgagcuguccaacaucaaggagaacaagugcaacggcaccgacgccaaggugaagcucaucaagcaggagcuggacaaguacaagaacgcggucacggagcugcagcuccugaugcagagcacccccgccaccggguccggcagcgccaucugcuccggcguggccgugugcaagguccugcaccucgagggggaggugaacaagaucaagagcgcgcugcuguccaccaacaaggccguggucagccucuccaacggcgugagcgugcugacguucaagguccuggaccucaagaacuacaucgacaagcagcugcugccgauccucaacaagcaguccugcagcauccccaacaucgagaccgugaucgaguuccagcagaagaacaaccggcugcuggagaucacccgcgaguucuccgugaacgccggggucaccacgcccgugagcaccuacaugcucaccaacuccgagcugcugagccucaucaacgacaugcccaucaccaacgaccagaagaagcugaugagcaacaacgugcagaucguccggcagcaguccuacagcaucaugugcaucaucaaggaggaggugcuggccuacgugguccagcucccgcuguacggcgugaucgacacgcccugcuggaagcugcacaccagcccccucugcaccaccaacacgaaggagggguccaacaucugccugacccgcaccgaccggggcugguacugcgacaacgccggcuccgugagcuucuucccccaggcggagaccugcaagguccaguccaaccgcguguucugcgacacgaugaacagccugacccucccguccgaggucaaccugugcaacguggacaucuucaaccccaaguacgacugcaagaucaugaccagcaagaccgacguguccagcuccgucaucacgagccugggggccaucguguccugcuacggcaagaccaagugcaccgccagcaacaagaaccgggggaucaucaagaccuucuccaacggcugcgacuacgugagcaacaagggcgucgacacgguguccguggggaacacccucuacugcgucaacaagcaggagggccagagccuguacgugaagggggagcccaucaucaacuucuacgacccccugguguucccgagcgacgaguucgacgccuccaucagccaggucaacgagaagaucaaccagucccucgccuucauccgcaagagcgacgagcugcugcacaacgugaacgcgggcaaguccaccaccaacaucaugaucaccacgaucaucaucgugaucaucgucauccuccugagccugaucgccguggggcuccugcuguacugcaaggcccggugaggacuaguacuggcugcaucucccuuuccucuguccuccauccuucucccaggauggugaagggggaccugguacccagugauccccaccccaggauccuaaaucaugacuuaccugcuaauaaaaacucauuggaaaagugagaagaucuaaaaaaaaaaaaaaaaaaaaaaaaaaaaaaaaaaaaaaaaaaaaaaaaaaaaaaaaaaaaaaaaugcaucccccccccccccccccccccccccccccccaaaggcucuuuucagagccaccagaauu

SEQ ID NO: 2256 - RNA, 1893 nt, Artificial Sequence
  mRNA product Design f-5 comprising derived and/or modified sequence from HRSV(A2)__F-del_DSCav1_mut1 (opt2)
gggagacuuucccauucuguagcagaauuugguguugccuguggucuuggucccgcggagaagcuuaccauggagcuccucauccucaaggccaacgccaucaccaccauccucaccgccgucaccuucugcuucgccuccggccagaacaucaccgaggaguucuaccaguccaccugcuccgccgucuccaagggcuaccucggcgcccuccgcaccggcugguacaccuccgucaucaccaucgagcucuccaacaucaaggagaacaagugcaacggcaccgacgccaaggucaagcucaucaagcaggagcucgacaaguacaagaacgccgucaccgagcuccagcuccucaugcaguccacccccgccaccggcuccggcuccgccaucugcuccggcgucgccgucugcaagguccuccaccucgagggcgaggucaacaagaucaaguccgcccuccucuccaccaacaaggccgucgucucccucuccaacggcgucuccguccucaccuucaagguccucgaccucaagaacuacaucgacaagcagcuccuccccauccucaacaagcaguccugcuccauccccaacaucgagaccgucaucgaguuccagcagaagaacaaccgccuccucgagaucacccgcgaguucuccgucaacgccggcgucaccacccccgucuccaccuacaugcucaccaacuccgagcuccucucccucaucaacgacaugcccaucaccaacgaccagaagaagcucauguccaacaacguccagaucguccgccagcaguccuacuccaucaugugcaucaucaaggaggagguccucgccuacgucguccagcucccccucuacggcgucaucgacacccccugcuggaagcuccacaccuccccccucugcaccaccaacaccaaggagggcuccaacaucugccucacccgcaccgaccgcggcugguacugcgacaacgccggcuccgucuccuucuucccccaggccgagaccugcaagguccaguccaaccgcgucuucugcgacaccaugaacucccucacccuccccuccgaggucaaccucugcaacgucgacaucuucaaccccaaguacgacugcaagaucaugaccuccaagaccgacgucuccuccuccgucaucaccucccucggcgccaucgucuccugcuacggcaagaccaagugcaccgccuccaacaagaaccgcggcaucaucaagaccuucuccaacggcugcgacuacgucuccaacaagggcgucgacaccgucuccgucggcaacacccucuacugcgucaacaagcaggagggccagucccucuacgucaagggcgagcccaucaucaacuucuacgacccccucgucuuccccuccgacgaguucgacgccuccaucucccaggucaacgagaagaucaaccagucccucgccuucauccgcaaguccgacgagcuccuccacaacgucaacgccggcaaguccaccaccaacaucaugaucaccaccaucaucaucgucaucaucgucauccuccucucccucaucgccgucggccuccuccucuacugcaaggcccgcugaggacuaguacuggcugcaucucccuuuccucuguccuccauccuucucccaggauggugaagggggaccugguacccagugauccccaccccaggauccuaaaucaugacuuaccugcuaauaaaaacucauuggaaaagugagaagaucuaaaaaaaaaaaaaaaaaaaaaaaaaaaaaaaaaaaaaaaaaaaaaaaaaaaaaaaaaaaaaaaaugcaucccccccccccccccccccccccccccccccaaaggcucuuuucagagccaccagaauu

SEQ ID NO: 2257 - RNA, 1893 nt, Artificial Sequence
  mRNA product Design f-5 comprising derived and/or modified sequence from HRSV(A2)__F-del_DSCav1_mut1 (opt3)
gggagacuuucccauucuguagcagaauuugguguugccuguggucuuggucccgcggagaagcuuaccauggagcugcucauccuuaaggccaacgcuauuaccacaauacugacugcagugacguucugcuuugccagcggccagaauaucaccgaagaguucuaccaauccacauguucugcggucucaaaaggguauuugggagcuuuaagaacugguugguacaccaguguuauuacaaucgaacugagcaacauuaaggagaauaaaugcaacggcaccgacgccaaggugaaacuaaucaagcaggaacucgauaaguauaaaaaugcaguaacugagcugcagcuucugaugcaguccacacccgccaccgggucuggaucggcuauauguucaggcguggcagucugcaagguguugcaccucgagggugaaguuaacaaaaucaagagcgcccugcugaguacgaauaaagcuguggucucccucucuaacggggugagcguauuaacuuuuaagguucuggaccuuaagaauuacauugauaaacaauugcugccuauccuaaacaagcaguccuguucaauuccaaauaucgagaccgugauagaguuccagcagaaaaacaauaggcuccuggaaauuacacgggaguuuagugucaacgccggagugacuaccccggugagcacauauaugcuuaccaauucugaacuguugucccucaucaacgacaugcccauuacgaacgaucaaaagaaacugaugucaaauaacguccagaucguucgccagcagagcuacaguaucaugugcauuauaaaggaggaaguguuagcguauguagugcaacugccucucuacggcgucaucgacacuccauguuggaaacuucauacaucuccccugugcaccacuaauacaaaggagggcuccaacauuuguuugacccgaacggaucgugggugguacugcgacaaugcaggaagcgugucguucuuuccucaggccgaaaccuguaagguucagucuaacagaguguucugcgauacaaugaacucccuaacucugccaucagaggucaaucucugcaauguggacaucuuuaaccccaaauaugauuguaagauaaugaccaguaaaacagacguaagcuccucuguuauuacuagccugggugcuaucgugucaugcuacggcaagaccaaauguacagccaguaauaagaacagggggaucauuaagaccuucuccaauggaugcgauuaugucagcaacaaaggcguggacacugucucuguggguaauacgcuuuacuguguuaacaagcaagaggggcagucacuguaugugaaaggagaaccuaucauuaacuuuuacgacccauugguauucccgagugaugaguuugacgcaagcauaucccaggucaaugaaaagaucaaccagucucucgcuuucauucggaaaucggaugagcuguuacacaaugugaacgccggcaagagcacaaccaauaucaugaucacuaccauuauaaucguuauuaucgugauucugcuaucccucaucgcggucggccugcuuuuguauugcaaggcccgcugaggacuaguacuggcugcaucucccuuuccucuguccuccauccuucucccaggauggugaagggggaccugguacccagugauccccaccccaggauccuaaaucaugacuuaccugcuaauaaaaacucauuggaaaagugagaagaucuaaaaaaaaaaaaaaaaaaaaaaaaaaaaaaaaaaaaaaaaaaaaaaaaaaaaaaaaaaaaaaaaugcaucccccccccccccccccccccccccccccccaaaggcucuuuucagagccaccagaauu

SEQ ID NO: 2258 - RNA, 1893 nt, Artificial Sequence
  mRNA product Design f-5 comprising derived and/or modified sequence from HRSV(A2)__F-del_DSCav1_mut1 (opt4)
gggagacuuucccauucuguagcagaauuugguguugccuguggucuuggucccgcggagaagcuuaccauggagcugcugauccugaaggccaacgccaucaccaccauccugaccgccgugaccuucugcuucgccagcggccagaacaucaccgaggaguucuaccagagcaccugcagcgccgugagcaagggcuaccugggcgcccugagaaccggcugguacaccagcgugaucaccaucgagcugagcaacaucaaggagaacaagugcaacggcaccgacgccaaggugaagcugaucaagcaggagcuggacaaguacaagaacgccgugaccgagcugcagcugcugaugcagagcacccccgccaccggcagcggcagcgccaucugcagcggcguggccgugugcaaggugcugcaccuggagggcgaggugaacaagaucaagagcgcccugcugagcaccaacaaggccguggugagccugagcaacggcgugagcgugcugaccuucaaggugcuggaccugaagaacuacaucgacaagcagcugcugcccauccugaacaagcagagcugcagcauccccaacaucgagaccgugaucgaguuccagcagaagaacaacagacugcuggagaucaccagagaguucagcgugaacgccggcgugaccacccccgugagcaccuacaugcugaccaacagcgagcugcugagccugaucaacgacaugcccaucaccaacgaccagaagaagcugaugagcaacaacgugcagaucgugagacagcagagcuacagcaucaugugcaucaucaaggaggaggugcuggccuacguggugcagcugccccuguacggcgugaucgacacccccugcuggaagcugcacaccagcccccugugcaccaccaacaccaaggagggcagcaacaucugccugaccagaaccgacagaggcugguacugcgacaacgccggcagcgugagcuucuucccccaggccgagaccugcaaggugcagagcaacagaguguucugcgacaccaugaacagccugacccugcccagcgaggugaaccugugcaacguggacaucuucaaccccaaguacgacugcaagaucaugaccagcaagaccgacgugagcagcagcgugaucaccagccugggcgccaucgugagcugcuacggcaagaccaagugcaccgccagcaacaagaacagaggcaucaucaagaccuucagcaacggcugcgacuacgugagcaacaagggcguggacaccgugagcgugggcaacacccuguacugcgugaacaagcaggagggccagagccuguacgugaagggcgagcccaucaucaacuucuacgacccccugguguuccccagcgacgaguucgacgccagcaucagccaggugaacgagaagaucaaccagagccuggccuucaucagaaagagcgacgagcugcugcacaacgugaacgccggcaagagcaccaccaacaucaugaucaccaccaucaucaucgugaucaucgugauccugcugagccugaucgccgugggccugcugcuguacugcaaggccagaugaggacuaguacuggcugcaucucccuuuccucuguccuccauccuucucccaggauggugaagggggaccugguacccagugauccccaccccaggauccuaaaucaugacuuaccugcuaauaaaaacucauuggaaaagugagaagaucuaaaaaaaaaaaaaaaaaaaaaaaaaaaaaaaaaaaaaaaaaaaaaaaaaaaaaaaaaaaaaaaaugcaucccccccccccccccccccccccccccccccaaaggcucuuuucagagccaccagaauu

SEQ ID NO: 2259 - RNA, 1893 nt, Artificial Sequence
  mRNA product Design f-5 comprising derived and/or modified sequence from HRSV(A2)__F-del_DSCav1_mut1 (opt5)
gggagacuuucccauucuguagcagaauuugguguugccuguggucuuggucccgcggagaagcuuaccauggagcugcucauccugaaggccaacgcuauuaccacaauccuuacggccgugaccuucugcuuugcgagcggccagaauauuacagaagaguucuaccaauccaccuguucugcugucagcaaaggguaucugggagcccucagaacaggcugguacaccuccguuaucacaauugaacugucuaacaucaaggagaauaaaugcaacgggaccgacgccaaggugaaacuuaucaagcaggaacuggauaaguauaaaaaugcugugacggagcuccagcugcugaugcagagcacccccgccacaggauccggcucugcuauuuguagcggggucgccgugugcaagguucuccaccuggagggagaagugaacaaaaucaaguccgcgcuucugagcaccaauaaagccgucgugucucucuccaacggcguuagcgugcugacauuuaagguccuugaccugaagaauuacauugauaaacaacuccugccuauccugaacaagcagucuuguuccauuccgaauaucgagaccgugauugaguuccagcagaaaaacaaucggcuccuggaaaucacgcgcgaguuuagcgugaacgcuggcgucacaacccccguuucuacauauaugcuuaccaauuccgaacugcucagccugaucaacgacaugccuauuaccaacgaucaaaagaaacuuauguccaauaacgugcagaucgugagacagcagucuuacagcauuaugugcaucauuaaggaggaaguccuggccuaugugguucaacucccccuguacggggugaucgacacaccuuguuggaaacugcauacgagcccccucugcaccacaaauaccaaggagggauccaacaucugucugacacggaccgaucgcggcugguacugcgacaaugcugggucugucuccuucuuuccucaggccgaaacguguaaggugcagagcaacagaguuuucugcgauacaaugaacucucuuacccugccgagcgaggugaaucucugcaaugucgacauuuuuaaccccaaauaugauuguaagaucaugaccuccaaaacagacgugucuagcuccgucauuaccagccugggagcgaucgugucuugcuacggcaagacaaaauguacggccuccaauaagaaccgggggauuaucaagaccuucagcaauggaugcgauuauguuucuaacaaaggcguggacacagucuccgugggcaauacccuuuacuguguuaacaagcaagaggggcagagccuguaugugaaaggagaaccuaucauuaacuuuuacgacccccucgucuucccuuccgaugaguuugacgcuucuaucagccaggugaaugaaaagauuaaccagucccuggccuucauccgcaaaucugaugagcugcuccacaaugugaacgcuggcaagagcacaaccaauauuaugaucacgaccauuaucaucguuauuaucgucauucugcuuucccugaucgccguggggcuccugcuguauugcaaggccagaugaggacuaguacuggcugcaucucccuuuccucuguccuccauccuucucccaggauggugaagggggaccugguacccagugauccccaccccaggauccuaaaucaugacuuaccugcuaauaaaaacucauuggaaaagugagaagaucuaaaaaaaaaaaaaaaaaaaaaaaaaaaaaaaaaaaaaaaaaaaaaaaaaaaaaaaaaaaaaaaaugcaucccccccccccccccccccccccccccccccaaaggcucuuuucagagccaccagaauu

SEQ ID NO: 2260 - RNA, 1893 nt, Artificial Sequence
  mRNA product Design f-5 comprising derived and/or modified sequence from HRSV(A2)__F-del_DSCav1_mut1 (opt6)
gggagacuuucccauucuguagcagaauuugguguugccuguggucuuggucccgcggagaagcuuaccauggaacuacucaucuuaaaagcaaacgcaauaacaacuauucuaaccgcaguaacauuuuguuucgcaucaggacaaaacauaaccgaagaauuuuaccaaucaacauguuccgcaguuucaaaaggauacuuaggcgcacuaagaacaggcugguacaccuccgugauaacaauagaauuaucaaacauaaaagaaaacaaauguaauggaacugacgccaaaguaaaacuaauaaaacaagaacuagacaaauauaaaaacgcaguaacugaacuacaauuacuaaugcaauccaccccagcaacaggcucaggcucagcaauuugcuccggagucgcugucugcaaaguacuacaucuugaaggcgaagucaauaaaauaaaaucagcacuucuaucaacaaacaaagcaguagucucacuaucaaacggaguaucaguacuaacauuuaaaguauuagaucuaaaaaacuauauagauaaacaacuacuacccauacucaauaaacaauccuguucaauaccaaauauagaaaccguaauagaauuucaacaaaaaaacaaucgacuauuagaaaucacccgagaauuuucagucaaugcaggcguaacaacaccaguaucaaccuacauguuaaccaacuccgaacuacuaucccucauaaacgacaugccaauaacaaacgaucaaaaaaaacuaauguccaacaacguacaaauagucagacaacaaucuuauucaauaaugugcaucauaaaagaagaaguucuagccuacguaguucaacuuccauuauacggcguaauugauacaccaugcuggaaacuacacacauccccacuauguacaacaaacacaaaagaaggaucaaacaucugcuuaacuagaacagacagaggaugguacugcgacaacgcaggaucagucucauucuuuccacaagcagaaacaugcaagguccaaucaaacagaguauucugcgacacaaugaacuccuuaacacuaccaucugaaguaaaccuauguaauguagacauauuuaacccaaaauacgacugcaaaauaaugaccucaaaaacagacguauccucaucaguaauuacaagccucggagccauaguaucaugcuacggaaaaacaaaauguacagcaucaaacaaaaacagaggaauaauaaaaacguucuccaacggaugcgacuauguaucaaacaaaggcguagacacaguaucagucggaaauacccuuuacugcguaaacaaacaagaaggccaaagucuauacguaaaaggagagccaauaauaaacuuuuaugacccccuuguauucccaucugacgaauuugaugcaucaauaucccaagucaacgaaaaaaucaaccaaucauuagccuuuauuagaaaaagugacgaacuauuacacaacguuaaugcagggaaaucaacaacaaauauaaugauuacaaccauaauuauaguuaucauaguuauacuacucucacuaaucgcaguaggauuacuauuauacugcaaagcaagauaaggacuaguacuggcugcaucucccuuuccucuguccuccauccuucucccaggauggugaagggggaccugguacccagugauccccaccccaggauccuaaaucaugacuuaccugcuaauaaaaacucauuggaaaagugagaagaucuaaaaaaaaaaaaaaaaaaaaaaaaaaaaaaaaaaaaaaaaaaaaaaaaaaaaaaaaaaaaaaaaugcaucccccccccccccccccccccccccccccccaaaggcucuuuucagagccaccagaauu

SEQ ID NO: 2261 - RNA, 1893 nt, Artificial Sequence
  mRNA product Design f-5 comprising derived and/or modified sequence from HRSV(A2)__F-del_DSCav1_mut1 (opt11)
gggagacuuucccauucuguagcagaauuugguguugccuguggucuuggucccgcggagaagcuuaccauggaacuacucauccuaaaagccaacgcaaucacaaccauacuuacagcuguuaccuucugcuucgcauccggccaaaauaucaccgaagaguucuaccaaucaaccugcuccgccgucagcaaaggauaccucggcgcccuccgaaccggaugguacacuucugucaucacaaucgaacucuccaacaucaaagaaaacaaaugcaacgguaccgacgcgaaagucaaacucaucaaacaagaacuagacaaguacaaaaacgccgucaccgaacugcaacuccucaugcaauccacaccagcaacgggaucaggauccgccaucugcucaggcgucgccgucugcaaaguccugcaccuagaaggagaaguaaacaaaauuaaauccgcccuacucuccaccaacaaagcagucgucucacuauccaacggcgucuccguccucaccuuuaagguccucgaccucaaaaauuauauagacaaacaacuccuccccauccuaaacaaacaaucaugcuccauccccaacauagaaaccgucaucgaauuucaacagaaaaacaaccgacucuuagaaauuacccgcgaguucagcgucaacgccggagucaccacacccgucucaaccuacaugcucaccaacucagaacuccucucacuaaucaaugauaugcccaucacaaacgaccaaaagaaacucauguccaacaacguacaaaucguucgccaacaaagcuacuccaucauguguaucauuaaagaagaaguccucgccuacgucguccaacuuccgcucuacggcguaaucgacacccccugcuggaaacuucacaccucgccccucugcaccacaaacaccaaagaaggcuccaacaucugccuaacccgcaccgaccgcggcugguacugcgacaacgccggcuccgucucauuuuucccccaggcggagaccugcaaaguccaauccaaccgcgucuucugcgacaccaugaacucucuuacccucccaucagaaguaaaccucugcaacgucgacaucuuuaaccccaaauacgauugcaagauaaugaccuccaaaacagacgucucaucguccgucaucaccucccuaggagcuaucgucuccugcuacggcaagaccaaaugcaccgcuuccaacaaaaaccgcggcaucaucaaaaccuucuccaacgggugcgacuacgucucuaacaaaggcguggacacaguauccguaggaaacacacuguacugcguaaacaaacaagagggccaaucgcuuuacgucaaaggcgagccaauuaucaacuucuacgacccgcucgucuucccaucagacgaguucgacgcauccaucucccaagucaacgagaaaaucaaucagucccucgccuucauacgcaaauccgacgaacuccuacauaacguaaacgccggcaaaucuaccacaaacaucaugaucacaaccaucaucaucguaaucaucgucauccuucucucgcucaucgccguaggacugcuacuuuacugcaaggcccgcuaaggacuaguacuggcugcaucucccuuuccucuguccuccauccuucucccaggauggugaagggggaccugguacccagugauccccaccccaggauccuaaaucaugacuuaccugcuaauaaaaacucauuggaaaagugagaagaucuaaaaaaaaaaaaaaaaaaaaaaaaaaaaaaaaaaaaaaaaaaaaaaaaaaaaaaaaaaaaaaaaugcaucccccccccccccccccccccccccccccccaaaggcucuuuucagagccaccagaauu

SEQ ID NO: 2262 - RNA, 1889 nt, Artificial Sequence
  mRNA product Design g-1 comprising derived and/or modified sequence from HRSV(A2)__F-del_DSCav1_mut1 (opt1)
gggagacuuucccauucuguagcagaauuugguguugccuguggucuuggucccgcggagaagcuuaccauggagcugcucauccugaaggccaacgccaucaccaccauccugacggcggugaccuucugcuucgccagcggccagaacaucaccgaggaguucuaccaguccacgugcagcgccgucuccaagggguaccucggcgcccugcggaccggcugguacaccuccgugaucaccaucgagcugagcaacaucaaggagaacaagugcaacgggaccgacgccaaggugaagcucaucaagcaggagcuggacaaguacaagaacgcggucacggagcugcagcuccugaugcaguccaccccggcaaccggcuccggcuccgccaucugcagcggcgucgccgugugcaaggugcugcaccucgagggggaggucaacaagaucaagagcgcccugcuguccaccaacaaggccguggugagccucuccaacggcgucagcgugcugaccuucaaggugcuggaccucaagaacuacaucgacaagcagcugcugcccauccugaacaagcagagcugcuccauccccaacaucgagacggugaucgaguuccagcagaagaacaaccggcuccuggagaucacccgcgaguucagcgugaacgccggggucaccacccccguguccacguacaugcugaccaacagcgagcuccugucccugaucaacgacaugccgaucaccaacgaccagaagaagcucaugagcaacaacgugcagaucguccggcagcaguccuacagcaucaugugcaucaucaaggaggaggugcuggcguacgugguccagcugccccucuacggcgugaucgacacccccugcuggaagcugcacacgagcccccugugcaccaccaacaccaaggagggguccaacaucugccucacgcgcaccgaccggggcugguacugcgacaacgccggcagcgucuccuucuucccgcaggccgagaccugcaaggugcagagcaaccgcguguucugcgacaccaugaacucccugacgcugcccagcgagguaaaccucugcaacgucgacaucuucaaccccaaguacgacugcaagaucaugaccuccaagaccgacgugagcuccagcgugaucaccucccugggggccaucgucagcugcuacggcaagacgaagugcaccgccagcaacaagaaccgggggaucaucaagaccuucuccaacggcugcgacuacgugagcaacaagggcguggacaccguguccgucgggaacacccuguacugcgugaacaagcaggagggccagagccucuacgugaagggggagcccaucaucaacuucuacgacccgcuggucuuccccuccgacgaguucgacgcgagcaucucccaggugaacgagaagaucaaccagagccuggccuucauccgcaaguccgacgagcugcuccacaacgugaacgccggcaagagcacgaccaacaucaugaucaccaccaucaucaucgucaucaucgugauccugcugucccucaucgccguggggcugcugcucuacugcaaggcccggugaggacuaguggaagcauuuuccuggcugauuaaaagaaauuacucagcuauggucaucuguuccuguuagaaggcuaugcagcauauuauauacuaugcgcauguuaugaaaugcauaauaaaaaauuuuaaaaaaucuaaaagaucuaaaaaaaaaaaaaaaaaaaaaaaaaaaaaaaaaaaaaaaaaaaaaaaaaaaaaaaaaaaaaaaaugcaucccccccccccccccccccccccccccccccaaaggcucuuuucagagccaccagaauu

SEQ ID NO: 2263 - RNA, 1889 nt, Artificial Sequence
  mRNA product Design g-1 comprising derived and/or modified sequence from HRSV(A2)__F-del_DSCav1_mut1 (opt1)
gggagacuuucccauucuguagcagaauuugguguugccuguggucuuggucccgcggagaagcuuaccauggagcugcucauccugaaggccaacgccaucaccaccauccugacggcggugaccuucugcuucgccagcggccagaacaucaccgaggaguucuaccaguccacgugcagcgccgucuccaagggguaccucggcgcccugcgcaccgggugguacaccagcgugaucaccaucgagcuguccaacaucaaggagaacaagugcaacggcaccgacgccaaggugaagcucaucaagcaggagcuggacaaguacaagaacgcggucacggagcugcagcuccugaugcagagcacccccgccaccggguccggcagcgccaucugcuccggcguggccgugugcaagguccugcaccucgagggggaggugaacaagaucaagagcgcgcugcuguccaccaacaaggccguggucagccucuccaacggcgugagcgugcugacguucaagguccuggaccucaagaacuacaucgacaagcagcugcugccgauccucaacaagcaguccugcagcauccccaacaucgagaccgugaucgaguuccagcagaagaacaaccggcugcuggagaucacccgcgaguucuccgugaacgccggggucaccacgcccgugagcaccuacaugcucaccaacuccgagcugcugagccucaucaacgacaugcccaucaccaacgaccagaagaagcugaugagcaacaacgugcagaucguccggcagcaguccuacagcaucaugugcaucaucaaggaggaggugcuggccuacgugguccagcucccgcuguacggcgugaucgacacgcccugcuggaagcugcacaccagcccccucugcaccaccaacacgaaggagggguccaacaucugccugacccgcaccgaccggggcugguacugcgacaacgccggcuccgugagcuucuucccccaggcggagaccugcaagguccaguccaaccgcguguucugcgacacgaugaacagccugacccucccguccgaggucaaccugugcaacguggacaucuucaaccccaaguacgacugcaagaucaugaccagcaagaccgacguguccagcuccgucaucacgagccugggggccaucguguccugcuacggcaagaccaagugcaccgccagcaacaagaaccgggggaucaucaagaccuucuccaacggcugcgacuacgugagcaacaagggcgucgacacgguguccguggggaacacccucuacugcgucaacaagcaggagggccagagccuguacgugaagggggagcccaucaucaacuucuacgacccccugguguucccgagcgacgaguucgacgccuccaucagccaggucaacgagaagaucaaccagucccucgccuucauccgcaagagcgacgagcugcugcacaacgugaacgcgggcaaguccaccaccaacaucaugaucaccacgaucaucaucgugaucaucgucauccuccugagccugaucgccguggggcuccugcuguacugcaaggcccggugaggacuaguggaagcauuuuccuggcugauuaaaagaaauuacucagcuauggucaucuguuccuguuagaaggcuaugcagcauauuauauacuaugcgcauguuaugaaaugcauaauaaaaaauuuuaaaaaaucuaaaagaucuaaaaaaaaaaaaaaaaaaaaaaaaaaaaaaaaaaaaaaaaaaaaaaaaaaaaaaaaaaaaaaaaugcaucccccccccccccccccccccccccccccccaaaggcucuuuucagagccaccagaauu

SEQ ID NO: 2264 - RNA, 1889 nt, Artificial Sequence
  mRNA product Design g-1 comprising derived and/or modified sequence from HRSV(A2)__F-del_DSCav1_mut1 (opt2)
gggagacuuucccauucuguagcagaauuugguguugccuguggucuuggucccgcggagaagcuuaccauggagcuccucauccucaaggccaacgccaucaccaccauccucaccgccgucaccuucugcuucgccuccggccagaacaucaccgaggaguucuaccaguccaccugcuccgccgucuccaagggcuaccucggcgcccuccgcaccggcugguacaccuccgucaucaccaucgagcucuccaacaucaaggagaacaagugcaacggcaccgacgccaaggucaagcucaucaagcaggagcucgacaaguacaagaacgccgucaccgagcuccagcuccucaugcaguccacccccgccaccggcuccggcuccgccaucugcuccggcgucgccgucugcaagguccuccaccucgagggcgaggucaacaagaucaaguccgcccuccucuccaccaacaaggccgucgucucccucuccaacggcgucuccguccucaccuucaagguccucgaccucaagaacuacaucgacaagcagcuccuccccauccucaacaagcaguccugcuccauccccaacaucgagaccgucaucgaguuccagcagaagaacaaccgccuccucgagaucacccgcgaguucuccgucaacgccggcgucaccacccccgucuccaccuacaugcucaccaacuccgagcuccucucccucaucaacgacaugcccaucaccaacgaccagaagaagcucauguccaacaacguccagaucguccgccagcaguccuacuccaucaugugcaucaucaaggaggagguccucgccuacgucguccagcucccccucuacggcgucaucgacacccccugcuggaagcuccacaccuccccccucugcaccaccaacaccaaggagggcuccaacaucugccucacccgcaccgaccgcggcugguacugcgacaacgccggcuccgucuccuucuucccccaggccgagaccugcaagguccaguccaaccgcgucuucugcgacaccaugaacucccucacccuccccuccgaggucaaccucugcaacgucgacaucuucaaccccaaguacgacugcaagaucaugaccuccaagaccgacgucuccuccuccgucaucaccucccucggcgccaucgucuccugcuacggcaagaccaagugcaccgccuccaacaagaaccgcggcaucaucaagaccuucuccaacggcugcgacuacgucuccaacaagggcgucgacaccgucuccgucggcaacacccucuacugcgucaacaagcaggagggccagucccucuacgucaagggcgagcccaucaucaacuucuacgacccccucgucuuccccuccgacgaguucgacgccuccaucucccaggucaacgagaagaucaaccagucccucgccuucauccgcaaguccgacgagcuccuccacaacgucaacgccggcaaguccaccaccaacaucaugaucaccaccaucaucaucgucaucaucgucauccuccucucccucaucgccgucggccuccuccucuacugcaaggcccgcugaggacuaguggaagcauuuuccuggcugauuaaaagaaauuacucagcuauggucaucuguuccuguuagaaggcuaugcagcauauuauauacuaugcgcauguuaugaaaugcauaauaaaaaauuuuaaaaaaucuaaaagaucuaaaaaaaaaaaaaaaaaaaaaaaaaaaaaaaaaaaaaaaaaaaaaaaaaaaaaaaaaaaaaaaaugcaucccccccccccccccccccccccccccccccaaaggcucuuuucagagccaccagaauu

SEQ ID NO: 2265 - RNA, 1889 nt, Artificial Sequence
  mRNA product Design g-1 comprising derived and/or modified sequence from HRSV(A2)__F-del_DSCav1_mut1 (opt3)
gggagacuuucccauucuguagcagaauuugguguugccuguggucuuggucccgcggagaagcuuaccauggagcugcucauccuuaaggccaacgcuauuaccacaauacugacugcagugacguucugcuuugccagcggccagaauaucaccgaagaguucuaccaauccacauguucugcggucucaaaaggguauuugggagcuuuaagaacugguugguacaccaguguuauuacaaucgaacugagcaacauuaaggagaauaaaugcaacggcaccgacgccaaggugaaacuaaucaagcaggaacucgauaaguauaaaaaugcaguaacugagcugcagcuucugaugcaguccacacccgccaccgggucuggaucggcuauauguucaggcguggcagucugcaagguguugcaccucgagggugaaguuaacaaaaucaagagcgcccugcugaguacgaauaaagcuguggucucccucucuaacggggugagcguauuaacuuuuaagguucuggaccuuaagaauuacauugauaaacaauugcugccuauccuaaacaagcaguccuguucaauuccaaauaucgagaccgugauagaguuccagcagaaaaacaauaggcuccuggaaauuacacgggaguuuagugucaacgccggagugacuaccccggugagcacauauaugcuuaccaauucugaacuguugucccucaucaacgacaugcccauuacgaacgaucaaaagaaacugaugucaaauaacguccagaucguucgccagcagagcuacaguaucaugugcauuauaaaggaggaaguguuagcguauguagugcaacugccucucuacggcgucaucgacacuccauguuggaaacuucauacaucuccccugugcaccacuaauacaaaggagggcuccaacauuuguuugacccgaacggaucgugggugguacugcgacaaugcaggaagcgugucguucuuuccucaggccgaaaccuguaagguucagucuaacagaguguucugcgauacaaugaacucccuaacucugccaucagaggucaaucucugcaauguggacaucuuuaaccccaaauaugauuguaagauaaugaccaguaaaacagacguaagcuccucuguuauuacuagccugggugcuaucgugucaugcuacggcaagaccaaauguacagccaguaauaagaacagggggaucauuaagaccuucuccaauggaugcgauuaugucagcaacaaaggcguggacacugucucuguggguaauacgcuuuacuguguuaacaagcaagaggggcagucacuguaugugaaaggagaaccuaucauuaacuuuuacgacccauugguauucccgagugaugaguuugacgcaagcauaucccaggucaaugaaaagaucaaccagucucucgcuuucauucggaaaucggaugagcuguuacacaaugugaacgccggcaagagcacaaccaauaucaugaucacuaccauuauaaucguuauuaucgugauucugcuaucccucaucgcggucggccugcuuuuguauugcaaggcccgcugaggacuaguggaagcauuuuccuggcugauuaaaagaaauuacucagcuauggucaucuguuccuguuagaaggcuaugcagcauauuauauacuaugcgcauguuaugaaaugcauaauaaaaaauuuuaaaaaaucuaaaagaucuaaaaaaaaaaaaaaaaaaaaaaaaaaaaaaaaaaaaaaaaaaaaaaaaaaaaaaaaaaaaaaaaugcaucccccccccccccccccccccccccccccccaaaggcucuuuucagagccaccagaauu

SEQ ID NO: 2266 - RNA, 1889 nt, Artificial Sequence
  mRNA product Design g-1 comprising derived and/or modified sequence from HRSV(A2)__F-del_DSCav1_mut1 (opt4)
gggagacuuucccauucuguagcagaauuugguguugccuguggucuuggucccgcggagaagcuuaccauggagcugcugauccugaaggccaacgccaucaccaccauccugaccgccgugaccuucugcuucgccagcggccagaacaucaccgaggaguucuaccagagcaccugcagcgccgugagcaagggcuaccugggcgcccugagaaccggcugguacaccagcgugaucaccaucgagcugagcaacaucaaggagaacaagugcaacggcaccgacgccaaggugaagcugaucaagcaggagcuggacaaguacaagaacgccgugaccgagcugcagcugcugaugcagagcacccccgccaccggcagcggcagcgccaucugcagcggcguggccgugugcaaggugcugcaccuggagggcgaggugaacaagaucaagagcgcccugcugagcaccaacaaggccguggugagccugagcaacggcgugagcgugcugaccuucaaggugcuggaccugaagaacuacaucgacaagcagcugcugcccauccugaacaagcagagcugcagcauccccaacaucgagaccgugaucgaguuccagcagaagaacaacagacugcuggagaucaccagagaguucagcgugaacgccggcgugaccacccccgugagcaccuacaugcugaccaacagcgagcugcugagccugaucaacgacaugcccaucaccaacgaccagaagaagcugaugagcaacaacgugcagaucgugagacagcagagcuacagcaucaugugcaucaucaaggaggaggugcuggccuacguggugcagcugccccuguacggcgugaucgacacccccugcuggaagcugcacaccagcccccugugcaccaccaacaccaaggagggcagcaacaucugccugaccagaaccgacagaggcugguacugcgacaacgccggcagcgugagcuucuucccccaggccgagaccugcaaggugcagagcaacagaguguucugcgacaccaugaacagccugacccugcccagcgaggugaaccugugcaacguggacaucuucaaccccaaguacgacugcaagaucaugaccagcaagaccgacgugagcagcagcgugaucaccagccugggcgccaucgugagcugcuacggcaagaccaagugcaccgccagcaacaagaacagaggcaucaucaagaccuucagcaacggcugcgacuacgugagcaacaagggcguggacaccgugagcgugggcaacacccuguacugcgugaacaagcaggagggccagagccuguacgugaagggcgagcccaucaucaacuucuacgacccccugguguuccccagcgacgaguucgacgccagcaucagccaggugaacgagaagaucaaccagagccuggccuucaucagaaagagcgacgagcugcugcacaacgugaacgccggcaagagcaccaccaacaucaugaucaccaccaucaucaucgugaucaucgugauccugcugagccugaucgccgugggccugcugcuguacugcaaggccagaugaggacuaguggaagcauuuuccuggcugauuaaaagaaauuacucagcuauggucaucuguuccuguuagaaggcuaugcagcauauuauauacuaugcgcauguuaugaaaugcauaauaaaaaauuuuaaaaaaucuaaaagaucuaaaaaaaaaaaaaaaaaaaaaaaaaaaaaaaaaaaaaaaaaaaaaaaaaaaaaaaaaaaaaaaaugcaucccccccccccccccccccccccccccccccaaaggcucuuuucagagccaccagaauu

SEQ ID NO: 2267 - RNA, 1889 nt, Artificial Sequence
  mRNA product Design g-1 comprising derived and/or modified sequence from HRSV(A2)__F-del_DSCav1_mut1 (opt5)
gggagacuuucccauucuguagcagaauuugguguugccuguggucuuggucccgcggagaagcuuaccauggagcugcucauccugaaggccaacgcuauuaccacaauccuuacggccgugaccuucugcuuugcgagcggccagaauauuacagaagaguucuaccaauccaccuguucugcugucagcaaaggguaucugggagcccucagaacaggcugguacaccuccguuaucacaauugaacugucuaacaucaaggagaauaaaugcaacgggaccgacgccaaggugaaacuuaucaagcaggaacuggauaaguauaaaaaugcugugacggagcuccagcugcugaugcagagcacccccgccacaggauccggcucugcuauuuguagcggggucgccgugugcaagguucuccaccuggagggagaagugaacaaaaucaaguccgcgcuucugagcaccaauaaagccgucgugucucucuccaacggcguuagcgugcugacauuuaagguccuugaccugaagaauuacauugauaaacaacuccugccuauccugaacaagcagucuuguuccauuccgaauaucgagaccgugauugaguuccagcagaaaaacaaucggcuccuggaaaucacgcgcgaguuuagcgugaacgcuggcgucacaacccccguuucuacauauaugcuuaccaauuccgaacugcucagccugaucaacgacaugccuauuaccaacgaucaaaagaaacuuauguccaauaacgugcagaucgugagacagcagucuuacagcauuaugugcaucauuaaggaggaaguccuggccuaugugguucaacucccccuguacggggugaucgacacaccuuguuggaaacugcauacgagcccccucugcaccacaaauaccaaggagggauccaacaucugucugacacggaccgaucgcggcugguacugcgacaaugcugggucugucuccuucuuuccucaggccgaaacguguaaggugcagagcaacagaguuuucugcgauacaaugaacucucuuacccugccgagcgaggugaaucucugcaaugucgacauuuuuaaccccaaauaugauuguaagaucaugaccuccaaaacagacgugucuagcuccgucauuaccagccugggagcgaucgugucuugcuacggcaagacaaaauguacggccuccaauaagaaccgggggauuaucaagaccuucagcaauggaugcgauuauguuucuaacaaaggcguggacacagucuccgugggcaauacccuuuacuguguuaacaagcaagaggggcagagccuguaugugaaaggagaaccuaucauuaacuuuuacgacccccucgucuucccuuccgaugaguuugacgcuucuaucagccaggugaaugaaaagauuaaccagucccuggccuucauccgcaaaucugaugagcugcuccacaaugugaacgcuggcaagagcacaaccaauauuaugaucacgaccauuaucaucguuauuaucgucauucugcuuucccugaucgccguggggcuccugcuguauugcaaggccagaugaggacuaguggaagcauuuuccuggcugauuaaaagaaauuacucagcuauggucaucuguuccuguuagaaggcuaugcagcauauuauauacuaugcgcauguuaugaaaugcauaauaaaaaauuuuaaaaaaucuaaaagaucuaaaaaaaaaaaaaaaaaaaaaaaaaaaaaaaaaaaaaaaaaaaaaaaaaaaaaaaaaaaaaaaaugcaucccccccccccccccccccccccccccccccaaaggcucuuuucagagccaccagaauu

SEQ ID NO: 2268 - RNA, 1889 nt, Artificial Sequence
  mRNA product Design g-1 comprising derived and/or modified sequence from HRSV(A2)__F-del_DSCav1_mut1 (opt6)
gggagacuuucccauucuguagcagaauuugguguugccuguggucuuggucccgcggagaagcuuaccauggaacuacucaucuuaaaagcaaacgcaauaacaacuauucuaaccgcaguaacauuuuguuucgcaucaggacaaaacauaaccgaagaauuuuaccaaucaacauguuccgcaguuucaaaaggauacuuaggcgcacuaagaacaggcugguacaccuccgugauaacaauagaauuaucaaacauaaaagaaaacaaauguaauggaacugacgccaaaguaaaacuaauaaaacaagaacuagacaaauauaaaaacgcaguaacugaacuacaauuacuaaugcaauccaccccagcaacaggcucaggcucagcaauuugcuccggagucgcugucugcaaaguacuacaucuugaaggcgaagucaauaaaauaaaaucagcacuucuaucaacaaacaaagcaguagucucacuaucaaacggaguaucaguacuaacauuuaaaguauuagaucuaaaaaacuauauagauaaacaacuacuacccauacucaauaaacaauccuguucaauaccaaauauagaaaccguaauagaauuucaacaaaaaaacaaucgacuauuagaaaucacccgagaauuuucagucaaugcaggcguaacaacaccaguaucaaccuacauguuaaccaacuccgaacuacuaucccucauaaacgacaugccaauaacaaacgaucaaaaaaaacuaauguccaacaacguacaaauagucagacaacaaucuuauucaauaaugugcaucauaaaagaagaaguucuagccuacguaguucaacuuccauuauacggcguaauugauacaccaugcuggaaacuacacacauccccacuauguacaacaaacacaaaagaaggaucaaacaucugcuuaacuagaacagacagaggaugguacugcgacaacgcaggaucagucucauucuuuccacaagcagaaacaugcaagguccaaucaaacagaguauucugcgacacaaugaacuccuuaacacuaccaucugaaguaaaccuauguaauguagacauauuuaacccaaaauacgacugcaaaauaaugaccucaaaaacagacguauccucaucaguaauuacaagccucggagccauaguaucaugcuacggaaaaacaaaauguacagcaucaaacaaaaacagaggaauaauaaaaacguucuccaacggaugcgacuauguaucaaacaaaggcguagacacaguaucagucggaaauacccuuuacugcguaaacaaacaagaaggccaaagucuauacguaaaaggagagccaauaauaaacuuuuaugacccccuuguauucccaucugacgaauuugaugcaucaauaucccaagucaacgaaaaaaucaaccaaucauuagccuuuauuagaaaaagugacgaacuauuacacaacguuaaugcagggaaaucaacaacaaauauaaugauuacaaccauaauuauaguuaucauaguuauacuacucucacuaaucgcaguaggauuacuauuauacugcaaagcaagauaaggacuaguggaagcauuuuccuggcugauuaaaagaaauuacucagcuauggucaucuguuccuguuagaaggcuaugcagcauauuauauacuaugcgcauguuaugaaaugcauaauaaaaaauuuuaaaaaaucuaaaagaucuaaaaaaaaaaaaaaaaaaaaaaaaaaaaaaaaaaaaaaaaaaaaaaaaaaaaaaaaaaaaaaaaugcaucccccccccccccccccccccccccccccccaaaggcucuuuucagagccaccagaauu

SEQ ID NO: 2269 - RNA, 1889 nt, Artificial Sequence
  mRNA product Design g-1 comprising derived and/or modified sequence from HRSV(A2)__F-del_DSCav1_mut1 (opt11)
gggagacuuucccauucuguagcagaauuugguguugccuguggucuuggucccgcggagaagcuuaccauggaacuacucauccuaaaagccaacgcaaucacaaccauacuuacagcuguuaccuucugcuucgcauccggccaaaauaucaccgaagaguucuaccaaucaaccugcuccgccgucagcaaaggauaccucggcgcccuccgaaccggaugguacacuucugucaucacaaucgaacucuccaacaucaaagaaaacaaaugcaacgguaccgacgcgaaagucaaacucaucaaacaagaacuagacaaguacaaaaacgccgucaccgaacugcaacuccucaugcaauccacaccagcaacgggaucaggauccgccaucugcucaggcgucgccgucugcaaaguccugcaccuagaaggagaaguaaacaaaauuaaauccgcccuacucuccaccaacaaagcagucgucucacuauccaacggcgucuccguccucaccuuuaagguccucgaccucaaaaauuauauagacaaacaacuccuccccauccuaaacaaacaaucaugcuccauccccaacauagaaaccgucaucgaauuucaacagaaaaacaaccgacucuuagaaauuacccgcgaguucagcgucaacgccggagucaccacacccgucucaaccuacaugcucaccaacucagaacuccucucacuaaucaaugauaugcccaucacaaacgaccaaaagaaacucauguccaacaacguacaaaucguucgccaacaaagcuacuccaucauguguaucauuaaagaagaaguccucgccuacgucguccaacuuccgcucuacggcguaaucgacacccccugcuggaaacuucacaccucgccccucugcaccacaaacaccaaagaaggcuccaacaucugccuaacccgcaccgaccgcggcugguacugcgacaacgccggcuccgucucauuuuucccccaggcggagaccugcaaaguccaauccaaccgcgucuucugcgacaccaugaacucucuuacccucccaucagaaguaaaccucugcaacgucgacaucuuuaaccccaaauacgauugcaagauaaugaccuccaaaacagacgucucaucguccgucaucaccucccuaggagcuaucgucuccugcuacggcaagaccaaaugcaccgcuuccaacaaaaaccgcggcaucaucaaaaccuucuccaacgggugcgacuacgucucuaacaaaggcguggacacaguauccguaggaaacacacuguacugcguaaacaaacaagagggccaaucgcuuuacgucaaaggcgagccaauuaucaacuucuacgacccgcucgucuucccaucagacgaguucgacgcauccaucucccaagucaacgagaaaaucaaucagucccucgccuucauacgcaaauccgacgaacuccuacauaacguaaacgccggcaaaucuaccacaaacaucaugaucacaaccaucaucaucguaaucaucgucauccuucucucgcucaucgccguaggacugcuacuuuacugcaaggcccgcuaaggacuaguggaagcauuuuccuggcugauuaaaagaaauuacucagcuauggucaucuguuccuguuagaaggcuaugcagcauauuauauacuaugcgcauguuaugaaaugcauaauaaaaaauuuuaaaaaaucuaaaagaucuaaaaaaaaaaaaaaaaaaaaaaaaaaaaaaaaaaaaaaaaaaaaaaaaaaaaaaaaaaaaaaaaugcaucccccccccccccccccccccccccccccccaaaggcucuuuucagagccaccagaauu

SEQ ID NO: 2270 - RNA, 1904 nt, Artificial Sequence
  mRNA product Design g-2 comprising derived and/or modified sequence from HRSV(A2)__F-del_DSCav1_mut1 (opt1)
gggagaguccgcucagccagguugcagaagcggcuuagcguguguccuaaucuucucucugcguguagguaggccugugccgcaaacaagcuuaccauggagcugcucauccugaaggccaacgccaucaccaccauccugacggcggugaccuucugcuucgccagcggccagaacaucaccgaggaguucuaccaguccacgugcagcgccgucuccaagggguaccucggcgcccugcggaccggcugguacaccuccgugaucaccaucgagcugagcaacaucaaggagaacaagugcaacgggaccgacgccaaggugaagcucaucaagcaggagcuggacaaguacaagaacgcggucacggagcugcagcuccugaugcaguccaccccggcaaccggcuccggcuccgccaucugcagcggcgucgccgugugcaaggugcugcaccucgagggggaggucaacaagaucaagagcgcccugcuguccaccaacaaggccguggugagccucuccaacggcgucagcgugcugaccuucaaggugcuggaccucaagaacuacaucgacaagcagcugcugcccauccugaacaagcagagcugcuccauccccaacaucgagacggugaucgaguuccagcagaagaacaaccggcuccuggagaucacccgcgaguucagcgugaacgccggggucaccacccccguguccacguacaugcugaccaacagcgagcuccugucccugaucaacgacaugccgaucaccaacgaccagaagaagcucaugagcaacaacgugcagaucguccggcagcaguccuacagcaucaugugcaucaucaaggaggaggugcuggcguacgugguccagcugccccucuacggcgugaucgacacccccugcuggaagcugcacacgagcccccugugcaccaccaacaccaaggagggguccaacaucugccucacgcgcaccgaccggggcugguacugcgacaacgccggcagcgucuccuucuucccgcaggccgagaccugcaaggugcagagcaaccgcguguucugcgacaccaugaacucccugacgcugcccagcgagguaaaccucugcaacgucgacaucuucaaccccaaguacgacugcaagaucaugaccuccaagaccgacgugagcuccagcgugaucaccucccugggggccaucgucagcugcuacggcaagacgaagugcaccgccagcaacaagaaccgggggaucaucaagaccuucuccaacggcugcgacuacgugagcaacaagggcguggacaccguguccgucgggaacacccuguacugcgugaacaagcaggagggccagagccucuacgugaagggggagcccaucaucaacuucuacgacccgcuggucuuccccuccgacgaguucgacgcgagcaucucccaggugaacgagaagaucaaccagagccuggccuucauccgcaaguccgacgagcugcuccacaacgugaacgccggcaagagcacgaccaacaucaugaucaccaccaucaucaucgucaucaucgugauccugcugucccucaucgccguggggcugcugcucuacugcaaggcccggugaggacuaguaauaaggaaacuguaugaaugucugugggcaggaagugaagagauccuucuguaaagguuuuuggaauuaugucugcugaauaauaaacuuuuuugaaauaauaaaucugguagaaaaaugagaucuaaaaaaaaaaaaaaaaaaaaaaaaaaaaaaaaaaaaaaaaaaaaaaaaaaaaaaaaaaaaaaaaugcaucccccccccccccccccccccccccccccccaaaggcucuuuucagagccaccagaauu

SEQ ID NO: 2271 - RNA, 1904 nt, Artificial Sequence
  mRNA product Design g-2 comprising derived and/or modified sequence from HRSV(A2)__F-del_DSCav1_mut1 (opt1)
gggagaguccgcucagccagguugcagaagcggcuuagcguguguccuaaucuucucucugcguguagguaggccugugccgcaaacaagcuuaccauggagcugcucauccugaaggccaacgccaucaccaccauccugacggcggugaccuucugcuucgccagcggccagaacaucaccgaggaguucuaccaguccacgugcagcgccgucuccaagggguaccucggcgcccugcgcaccgggugguacaccagcgugaucaccaucgagcuguccaacaucaaggagaacaagugcaacggcaccgacgccaaggugaagcucaucaagcaggagcuggacaaguacaagaacgcggucacggagcugcagcuccugaugcagagcacccccgccaccggguccggcagcgccaucugcuccggcguggccgugugcaagguccugcaccucgagggggaggugaacaagaucaagagcgcgcugcuguccaccaacaaggccguggucagccucuccaacggcgugagcgugcugacguucaagguccuggaccucaagaacuacaucgacaagcagcugcugccgauccucaacaagcaguccugcagcauccccaacaucgagaccgugaucgaguuccagcagaagaacaaccggcugcuggagaucacccgcgaguucuccgugaacgccggggucaccacgcccgugagcaccuacaugcucaccaacuccgagcugcugagccucaucaacgacaugcccaucaccaacgaccagaagaagcugaugagcaacaacgugcagaucguccggcagcaguccuacagcaucaugugcaucaucaaggaggaggugcuggccuacgugguccagcucccgcuguacggcgugaucgacacgcccugcuggaagcugcacaccagcccccucugcaccaccaacacgaaggagggguccaacaucugccugacccgcaccgaccggggcugguacugcgacaacgccggcuccgugagcuucuucccccaggcggagaccugcaagguccaguccaaccgcguguucugcgacacgaugaacagccugacccucccguccgaggucaaccugugcaacguggacaucuucaaccccaaguacgacugcaagaucaugaccagcaagaccgacguguccagcuccgucaucacgagccugggggccaucguguccugcuacggcaagaccaagugcaccgccagcaacaagaaccgggggaucaucaagaccuucuccaacggcugcgacuacgugagcaacaagggcgucgacacgguguccguggggaacacccucuacugcgucaacaagcaggagggccagagccuguacgugaagggggagcccaucaucaacuucuacgacccccugguguucccgagcgacgaguucgacgccuccaucagccaggucaacgagaagaucaaccagucccucgccuucauccgcaagagcgacgagcugcugcacaacgugaacgcgggcaaguccaccaccaacaucaugaucaccacgaucaucaucgugaucaucgucauccuccugagccugaucgccguggggcuccugcuguacugcaaggcccggugaggacuaguaauaaggaaacuguaugaaugucugugggcaggaagugaagagauccuucuguaaagguuuuuggaauuaugucugcugaauaauaaacuuuuuugaaauaauaaaucugguagaaaaaugagaucuaaaaaaaaaaaaaaaaaaaaaaaaaaaaaaaaaaaaaaaaaaaaaaaaaaaaaaaaaaaaaaaaugcaucccccccccccccccccccccccccccccccaaaggcucuuuucagagccaccagaauu

SEQ ID NO: 2272 - RNA, 1904 nt, Artificial Sequence
  mRNA product Design g-2 comprising derived and/or modified sequence from HRSV(A2)__F-del_DSCav1_mut1 (opt2)
gggagaguccgcucagccagguugcagaagcggcuuagcguguguccuaaucuucucucugcguguagguaggccugugccgcaaacaagcuuaccauggagcuccucauccucaaggccaacgccaucaccaccauccucaccgccgucaccuucugcuucgccuccggccagaacaucaccgaggaguucuaccaguccaccugcuccgccgucuccaagggcuaccucggcgcccuccgcaccggcugguacaccuccgucaucaccaucgagcucuccaacaucaaggagaacaagugcaacggcaccgacgccaaggucaagcucaucaagcaggagcucgacaaguacaagaacgccgucaccgagcuccagcuccucaugcaguccacccccgccaccggcuccggcuccgccaucugcuccggcgucgccgucugcaagguccuccaccucgagggcgaggucaacaagaucaaguccgcccuccucuccaccaacaaggccgucgucucccucuccaacggcgucuccguccucaccuucaagguccucgaccucaagaacuacaucgacaagcagcuccuccccauccucaacaagcaguccugcuccauccccaacaucgagaccgucaucgaguuccagcagaagaacaaccgccuccucgagaucacccgcgaguucuccgucaacgccggcgucaccacccccgucuccaccuacaugcucaccaacuccgagcuccucucccucaucaacgacaugcccaucaccaacgaccagaagaagcucauguccaacaacguccagaucguccgccagcaguccuacuccaucaugugcaucaucaaggaggagguccucgccuacgucguccagcucccccucuacggcgucaucgacacccccugcuggaagcuccacaccuccccccucugcaccaccaacaccaaggagggcuccaacaucugccucacccgcaccgaccgcggcugguacugcgacaacgccggcuccgucuccuucuucccccaggccgagaccugcaagguccaguccaaccgcgucuucugcgacaccaugaacucccucacccuccccuccgaggucaaccucugcaacgucgacaucuucaaccccaaguacgacugcaagaucaugaccuccaagaccgacgucuccuccuccgucaucaccucccucggcgccaucgucuccugcuacggcaagaccaagugcaccgccuccaacaagaaccgcggcaucaucaagaccuucuccaacggcugcgacuacgucuccaacaagggcgucgacaccgucuccgucggcaacacccucuacugcgucaacaagcaggagggccagucccucuacgucaagggcgagcccaucaucaacuucuacgacccccucgucuuccccuccgacgaguucgacgccuccaucucccaggucaacgagaagaucaaccagucccucgccuucauccgcaaguccgacgagcuccuccacaacgucaacgccggcaaguccaccaccaacaucaugaucaccaccaucaucaucgucaucaucgucauccuccucucccucaucgccgucggccuccuccucuacugcaaggcccgcugaggacuaguaauaaggaaacuguaugaaugucugugggcaggaagugaagagauccuucuguaaagguuuuuggaauuaugucugcugaauaauaaacuuuuuugaaauaauaaaucugguagaaaaaugagaucuaaaaaaaaaaaaaaaaaaaaaaaaaaaaaaaaaaaaaaaaaaaaaaaaaaaaaaaaaaaaaaaaugcaucccccccccccccccccccccccccccccccaaaggcucuuuucagagccaccagaauu

SEQ ID NO: 2273 - RNA, 1904 nt, Artificial Sequence
  mRNA product Design g-2 comprising derived and/or modified sequence from HRSV(A2)__F-del_DSCav1_mut1 (opt3)
gggagaguccgcucagccagguugcagaagcggcuuagcguguguccuaaucuucucucugcguguagguaggccugugccgcaaacaagcuuaccauggagcugcucauccuuaaggccaacgcuauuaccacaauacugacugcagugacguucugcuuugccagcggccagaauaucaccgaagaguucuaccaauccacauguucugcggucucaaaaggguauuugggagcuuuaagaacugguugguacaccaguguuauuacaaucgaacugagcaacauuaaggagaauaaaugcaacggcaccgacgccaaggugaaacuaaucaagcaggaacucgauaaguauaaaaaugcaguaacugagcugcagcuucugaugcaguccacacccgccaccgggucuggaucggcuauauguucaggcguggcagucugcaagguguugcaccucgagggugaaguuaacaaaaucaagagcgcccugcugaguacgaauaaagcuguggucucccucucuaacggggugagcguauuaacuuuuaagguucuggaccuuaagaauuacauugauaaacaauugcugccuauccuaaacaagcaguccuguucaauuccaaauaucgagaccgugauagaguuccagcagaaaaacaauaggcuccuggaaauuacacgggaguuuagugucaacgccggagugacuaccccggugagcacauauaugcuuaccaauucugaacuguugucccucaucaacgacaugcccauuacgaacgaucaaaagaaacugaugucaaauaacguccagaucguucgccagcagagcuacaguaucaugugcauuauaaaggaggaaguguuagcguauguagugcaacugccucucuacggcgucaucgacacuccauguuggaaacuucauacaucuccccugugcaccacuaauacaaaggagggcuccaacauuuguuugacccgaacggaucgugggugguacugcgacaaugcaggaagcgugucguucuuuccucaggccgaaaccuguaagguucagucuaacagaguguucugcgauacaaugaacucccuaacucugccaucagaggucaaucucugcaauguggacaucuuuaaccccaaauaugauuguaagauaaugaccaguaaaacagacguaagcuccucuguuauuacuagccugggugcuaucgugucaugcuacggcaagaccaaauguacagccaguaauaagaacagggggaucauuaagaccuucuccaauggaugcgauuaugucagcaacaaaggcguggacacugucucuguggguaauacgcuuuacuguguuaacaagcaagaggggcagucacuguaugugaaaggagaaccuaucauuaacuuuuacgacccauugguauucccgagugaugaguuugacgcaagcauaucccaggucaaugaaaagaucaaccagucucucgcuuucauucggaaaucggaugagcuguuacacaaugugaacgccggcaagagcacaaccaauaucaugaucacuaccauuauaaucguuauuaucgugauucugcuaucccucaucgcggucggccugcuuuuguauugcaaggcccgcugaggacuaguaauaaggaaacuguaugaaugucugugggcaggaagugaagagauccuucuguaaagguuuuuggaauuaugucugcugaauaauaaacuuuuuugaaauaauaaaucugguagaaaaaugagaucuaaaaaaaaaaaaaaaaaaaaaaaaaaaaaaaaaaaaaaaaaaaaaaaaaaaaaaaaaaaaaaaaugcaucccccccccccccccccccccccccccccccaaaggcucuuuucagagccaccagaauu

SEQ ID NO: 2274 - RNA, 1904 nt, Artificial Sequence
  mRNA product Design g-2 comprising derived and/or modified sequence from HRSV(A2)__F-del_DSCav1_mut1 (opt4)
gggagaguccgcucagccagguugcagaagcggcuuagcguguguccuaaucuucucucugcguguagguaggccugugccgcaaacaagcuuaccauggagcugcugauccugaaggccaacgccaucaccaccauccugaccgccgugaccuucugcuucgccagcggccagaacaucaccgaggaguucuaccagagcaccugcagcgccgugagcaagggcuaccugggcgcccugagaaccggcugguacaccagcgugaucaccaucgagcugagcaacaucaaggagaacaagugcaacggcaccgacgccaaggugaagcugaucaagcaggagcuggacaaguacaagaacgccgugaccgagcugcagcugcugaugcagagcacccccgccaccggcagcggcagcgccaucugcagcggcguggccgugugcaaggugcugcaccuggagggcgaggugaacaagaucaagagcgcccugcugagcaccaacaaggccguggugagccugagcaacggcgugagcgugcugaccuucaaggugcuggaccugaagaacuacaucgacaagcagcugcugcccauccugaacaagcagagcugcagcauccccaacaucgagaccgugaucgaguuccagcagaagaacaacagacugcuggagaucaccagagaguucagcgugaacgccggcgugaccacccccgugagcaccuacaugcugaccaacagcgagcugcugagccugaucaacgacaugcccaucaccaacgaccagaagaagcugaugagcaacaacgugcagaucgugagacagcagagcuacagcaucaugugcaucaucaaggaggaggugcuggccuacguggugcagcugccccuguacggcgugaucgacacccccugcuggaagcugcacaccagcccccugugcaccaccaacaccaaggagggcagcaacaucugccugaccagaaccgacagaggcugguacugcgacaacgccggcagcgugagcuucuucccccaggccgagaccugcaaggugcagagcaacagaguguucugcgacaccaugaacagccugacccugcccagcgaggugaaccugugcaacguggacaucuucaaccccaaguacgacugcaagaucaugaccagcaagaccgacgugagcagcagcgugaucaccagccugggcgccaucgugagcugcuacggcaagaccaagugcaccgccagcaacaagaacagaggcaucaucaagaccuucagcaacggcugcgacuacgugagcaacaagggcguggacaccgugagcgugggcaacacccuguacugcgugaacaagcaggagggccagagccuguacgugaagggcgagcccaucaucaacuucuacgacccccugguguuccccagcgacgaguucgacgccagcaucagccaggugaacgagaagaucaaccagagccuggccuucaucagaaagagcgacgagcugcugcacaacgugaacgccggcaagagcaccaccaacaucaugaucaccaccaucaucaucgugaucaucgugauccugcugagccugaucgccgugggccugcugcuguacugcaaggccagaugaggacuaguaauaaggaaacuguaugaaugucugugggcaggaagugaagagauccuucuguaaagguuuuuggaauuaugucugcugaauaauaaacuuuuuugaaauaauaaaucugguagaaaaaugagaucuaaaaaaaaaaaaaaaaaaaaaaaaaaaaaaaaaaaaaaaaaaaaaaaaaaaaaaaaaaaaaaaaugcaucccccccccccccccccccccccccccccccaaaggcucuuuucagagccaccagaauu

SEQ ID NO: 2275 - RNA, 1904 nt, Artificial Sequence
  mRNA product Design g-2 comprising derived and/or modified sequence from HRSV(A2)__F-del_DSCav1_mut1 (opt5)
gggagaguccgcucagccagguugcagaagcggcuuagcguguguccuaaucuucucucugcguguagguaggccugugccgcaaacaagcuuaccauggagcugcucauccugaaggccaacgcuauuaccacaauccuuacggccgugaccuucugcuuugcgagcggccagaauauuacagaagaguucuaccaauccaccuguucugcugucagcaaaggguaucugggagcccucagaacaggcugguacaccuccguuaucacaauugaacugucuaacaucaaggagaauaaaugcaacgggaccgacgccaaggugaaacuuaucaagcaggaacuggauaaguauaaaaaugcugugacggagcuccagcugcugaugcagagcacccccgccacaggauccggcucugcuauuuguagcggggucgccgugugcaagguucuccaccuggagggagaagugaacaaaaucaaguccgcgcuucugagcaccaauaaagccgucgugucucucuccaacggcguuagcgugcugacauuuaagguccuugaccugaagaauuacauugauaaacaacuccugccuauccugaacaagcagucuuguuccauuccgaauaucgagaccgugauugaguuccagcagaaaaacaaucggcuccuggaaaucacgcgcgaguuuagcgugaacgcuggcgucacaacccccguuucuacauauaugcuuaccaauuccgaacugcucagccugaucaacgacaugccuauuaccaacgaucaaaagaaacuuauguccaauaacgugcagaucgugagacagcagucuuacagcauuaugugcaucauuaaggaggaaguccuggccuaugugguucaacucccccuguacggggugaucgacacaccuuguuggaaacugcauacgagcccccucugcaccacaaauaccaaggagggauccaacaucugucugacacggaccgaucgcggcugguacugcgacaaugcugggucugucuccuucuuuccucaggccgaaacguguaaggugcagagcaacagaguuuucugcgauacaaugaacucucuuacccugccgagcgaggugaaucucugcaaugucgacauuuuuaaccccaaauaugauuguaagaucaugaccuccaaaacagacgugucuagcuccgucauuaccagccugggagcgaucgugucuugcuacggcaagacaaaauguacggccuccaauaagaaccgggggauuaucaagaccuucagcaauggaugcgauuauguuucuaacaaaggcguggacacagucuccgugggcaauacccuuuacuguguuaacaagcaagaggggcagagccuguaugugaaaggagaaccuaucauuaacuuuuacgacccccucgucuucccuuccgaugaguuugacgcuucuaucagccaggugaaugaaaagauuaaccagucccuggccuucauccgcaaaucugaugagcugcuccacaaugugaacgcuggcaagagcacaaccaauauuaugaucacgaccauuaucaucguuauuaucgucauucugcuuucccugaucgccguggggcuccugcuguauugcaaggccagaugaggacuaguaauaaggaaacuguaugaaugucugugggcaggaagugaagagauccuucuguaaagguuuuuggaauuaugucugcugaauaauaaacuuuuuugaaauaauaaaucugguagaaaaaugagaucuaaaaaaaaaaaaaaaaaaaaaaaaaaaaaaaaaaaaaaaaaaaaaaaaaaaaaaaaaaaaaaaaugcaucccccccccccccccccccccccccccccccaaaggcucuuuucagagccaccagaauu

SEQ ID NO: 2276 - RNA, 1904 nt, Artificial Sequence
  mRNA product Design g-2 comprising derived and/or modified sequence from HRSV(A2)__F-del_DSCav1_mut1 (opt6)
gggagaguccgcucagccagguugcagaagcggcuuagcguguguccuaaucuucucucugcguguagguaggccugugccgcaaacaagcuuaccauggaacuacucaucuuaaaagcaaacgcaauaacaacuauucuaaccgcaguaacauuuuguuucgcaucaggacaaaacauaaccgaagaauuuuaccaaucaacauguuccgcaguuucaaaaggauacuuaggcgcacuaagaacaggcugguacaccuccgugauaacaauagaauuaucaaacauaaaagaaaacaaauguaauggaacugacgccaaaguaaaacuaauaaaacaagaacuagacaaauauaaaaacgcaguaacugaacuacaauuacuaaugcaauccaccccagcaacaggcucaggcucagcaauuugcuccggagucgcugucugcaaaguacuacaucuugaaggcgaagucaauaaaauaaaaucagcacuucuaucaacaaacaaagcaguagucucacuaucaaacggaguaucaguacuaacauuuaaaguauuagaucuaaaaaacuauauagauaaacaacuacuacccauacucaauaaacaauccuguucaauaccaaauauagaaaccguaauagaauuucaacaaaaaaacaaucgacuauuagaaaucacccgagaauuuucagucaaugcaggcguaacaacaccaguaucaaccuacauguuaaccaacuccgaacuacuaucccucauaaacgacaugccaauaacaaacgaucaaaaaaaacuaauguccaacaacguacaaauagucagacaacaaucuuauucaauaaugugcaucauaaaagaagaaguucuagccuacguaguucaacuuccauuauacggcguaauugauacaccaugcuggaaacuacacacauccccacuauguacaacaaacacaaaagaaggaucaaacaucugcuuaacuagaacagacagaggaugguacugcgacaacgcaggaucagucucauucuuuccacaagcagaaacaugcaagguccaaucaaacagaguauucugcgacacaaugaacuccuuaacacuaccaucugaaguaaaccuauguaauguagacauauuuaacccaaaauacgacugcaaaauaaugaccucaaaaacagacguauccucaucaguaauuacaagccucggagccauaguaucaugcuacggaaaaacaaaauguacagcaucaaacaaaaacagaggaauaauaaaaacguucuccaacggaugcgacuauguaucaaacaaaggcguagacacaguaucagucggaaauacccuuuacugcguaaacaaacaagaaggccaaagucuauacguaaaaggagagccaauaauaaacuuuuaugacccccuuguauucccaucugacgaauuugaugcaucaauaucccaagucaacgaaaaaaucaaccaaucauuagccuuuauuagaaaaagugacgaacuauuacacaacguuaaugcagggaaaucaacaacaaauauaaugauuacaaccauaauuauaguuaucauaguuauacuacucucacuaaucgcaguaggauuacuauuauacugcaaagcaagauaaggacuaguaauaaggaaacuguaugaaugucugugggcaggaagugaagagauccuucuguaaagguuuuuggaauuaugucugcugaauaauaaacuuuuuugaaauaauaaaucugguagaaaaaugagaucuaaaaaaaaaaaaaaaaaaaaaaaaaaaaaaaaaaaaaaaaaaaaaaaaaaaaaaaaaaaaaaaaugcaucccccccccccccccccccccccccccccccaaaggcucuuuucagagccaccagaauu

SEQ ID NO: 2277 - RNA, 1904 nt, Artificial Sequence
  mRNA product Design g-2 comprising derived and/or modified sequence from HRSV(A2)__F-del_DSCav1_mut1 (opt11)
gggagaguccgcucagccagguugcagaagcggcuuagcguguguccuaaucuucucucugcguguagguaggccugugccgcaaacaagcuuaccauggaacuacucauccuaaaagccaacgcaaucacaaccauacuuacagcuguuaccuucugcuucgcauccggccaaaauaucaccgaagaguucuaccaaucaaccugcuccgccgucagcaaaggauaccucggcgcccuccgaaccggaugguacacuucugucaucacaaucgaacucuccaacaucaaagaaaacaaaugcaacgguaccgacgcgaaagucaaacucaucaaacaagaacuagacaaguacaaaaacgccgucaccgaacugcaacuccucaugcaauccacaccagcaacgggaucaggauccgccaucugcucaggcgucgccgucugcaaaguccugcaccuagaaggagaaguaaacaaaauuaaauccgcccuacucuccaccaacaaagcagucgucucacuauccaacggcgucuccguccucaccuuuaagguccucgaccucaaaaauuauauagacaaacaacuccuccccauccuaaacaaacaaucaugcuccauccccaacauagaaaccgucaucgaauuucaacagaaaaacaaccgacucuuagaaauuacccgcgaguucagcgucaacgccggagucaccacacccgucucaaccuacaugcucaccaacucagaacuccucucacuaaucaaugauaugcccaucacaaacgaccaaaagaaacucauguccaacaacguacaaaucguucgccaacaaagcuacuccaucauguguaucauuaaagaagaaguccucgccuacgucguccaacuuccgcucuacggcguaaucgacacccccugcuggaaacuucacaccucgccccucugcaccacaaacaccaaagaaggcuccaacaucugccuaacccgcaccgaccgcggcugguacugcgacaacgccggcuccgucucauuuuucccccaggcggagaccugcaaaguccaauccaaccgcgucuucugcgacaccaugaacucucuuacccucccaucagaaguaaaccucugcaacgucgacaucuuuaaccccaaauacgauugcaagauaaugaccuccaaaacagacgucucaucguccgucaucaccucccuaggagcuaucgucuccugcuacggcaagaccaaaugcaccgcuuccaacaaaaaccgcggcaucaucaaaaccuucuccaacgggugcgacuacgucucuaacaaaggcguggacacaguauccguaggaaacacacuguacugcguaaacaaacaagagggccaaucgcuuuacgucaaaggcgagccaauuaucaacuucuacgacccgcucgucuucccaucagacgaguucgacgcauccaucucccaagucaacgagaaaaucaaucagucccucgccuucauacgcaaauccgacgaacuccuacauaacguaaacgccggcaaaucuaccacaaacaucaugaucacaaccaucaucaucguaaucaucgucauccuucucucgcucaucgccguaggacugcuacuuuacugcaaggcccgcuaaggacuaguaauaaggaaacuguaugaaugucugugggcaggaagugaagagauccuucuguaaagguuuuuggaauuaugucugcugaauaauaaacuuuuuugaaauaauaaaucugguagaaaaaugagaucuaaaaaaaaaaaaaaaaaaaaaaaaaaaaaaaaaaaaaaaaaaaaaaaaaaaaaaaaaaaaaaaaugcaucccccccccccccccccccccccccccccccaaaggcucuuuucagagccaccagaauu

SEQ ID NO: 2278 - RNA, 2136 nt, Artificial Sequence
  mRNA product Design g-3 comprising derived and/or modified sequence from HRSV(A2)__F-del_DSCav1_mut1 (opt1)
gggagaguccgcucagccagguugcagaagcggcuuagcguguguccuaaucuucucucugcguguagguaggccugugccgcaaacaagcuuaccauggagcugcucauccugaaggccaacgccaucaccaccauccugacggcggugaccuucugcuucgccagcggccagaacaucaccgaggaguucuaccaguccacgugcagcgccgucuccaagggguaccucggcgcccugcggaccggcugguacaccuccgugaucaccaucgagcugagcaacaucaaggagaacaagugcaacgggaccgacgccaaggugaagcucaucaagcaggagcuggacaaguacaagaacgcggucacggagcugcagcuccugaugcaguccaccccggcaaccggcuccggcuccgccaucugcagcggcgucgccgugugcaaggugcugcaccucgagggggaggucaacaagaucaagagcgcccugcuguccaccaacaaggccguggugagccucuccaacggcgucagcgugcugaccuucaaggugcuggaccucaagaacuacaucgacaagcagcugcugcccauccugaacaagcagagcugcuccauccccaacaucgagacggugaucgaguuccagcagaagaacaaccggcuccuggagaucacccgcgaguucagcgugaacgccggggucaccacccccguguccacguacaugcugaccaacagcgagcuccugucccugaucaacgacaugccgaucaccaacgaccagaagaagcucaugagcaacaacgugcagaucguccggcagcaguccuacagcaucaugugcaucaucaaggaggaggugcuggcguacgugguccagcugccccucuacggcgugaucgacacccccugcuggaagcugcacacgagcccccugugcaccaccaacaccaaggagggguccaacaucugccucacgcgcaccgaccggggcugguacugcgacaacgccggcagcgucuccuucuucccgcaggccgagaccugcaaggugcagagcaaccgcguguucugcgacaccaugaacucccugacgcugcccagcgagguaaaccucugcaacgucgacaucuucaaccccaaguacgacugcaagaucaugaccuccaagaccgacgugagcuccagcgugaucaccucccugggggccaucgucagcugcuacggcaagacgaagugcaccgccagcaacaagaaccgggggaucaucaagaccuucuccaacggcugcgacuacgugagcaacaagggcguggacaccguguccgucgggaacacccuguacugcgugaacaagcaggagggccagagccucuacgugaagggggagcccaucaucaacuucuacgacccgcuggucuuccccuccgacgaguucgacgcgagcaucucccaggugaacgagaagaucaaccagagccuggccuucauccgcaaguccgacgagcugcuccacaacgugaacgccggcaagagcacgaccaacaucaugaucaccaccaucaucaucgucaucaucgugauccugcugucccucaucgccguggggcugcugcucuacugcaaggcccggugaggacuagugaagggaacacccaaauuuaauucagccuuaagcacaauuaauuaagagugaaacguaauuguacaagcaguuggucacccaccauagggcaugaucaacaccgcaaccuuuccuuuuucccccagugauucugaaaaaccccucuucccuucagcuugcuuagauguuccaaauuuaguaagcuuaaggcggccuacagaagaaaaagaaaaaaaaggccacaaaaguucccucucacuuucaguaaauaaaauaaaagcagcaacagaaauaaagaaauaaaugaaauucaaaaugaaauaaauauuguguugugcagcauuaaaaaaucaauaaaaauuaaaaaugagcaagaucuaaaaaaaaaaaaaaaaaaaaaaaaaaaaaaaaaaaaaaaaaaaaaaaaaaaaaaaaaaaaaaaaugcaucccccccccccccccccccccccccccccccaaaggcucuuuucagagccaccagaauu

SEQ ID NO: 2279 - RNA, 2136 nt, Artificial Sequence
  mRNA product Design g-3 comprising derived and/or modified sequence from HRSV(A2)__F-del_DSCav1_mut1 (opt1)
gggagaguccgcucagccagguugcagaagcggcuuagcguguguccuaaucuucucucugcguguagguaggccugugccgcaaacaagcuuaccauggagcugcucauccugaaggccaacgccaucaccaccauccugacggcggugaccuucugcuucgccagcggccagaacaucaccgaggaguucuaccaguccacgugcagcgccgucuccaagggguaccucggcgcccugcgcaccgggugguacaccagcgugaucaccaucgagcuguccaacaucaaggagaacaagugcaacggcaccgacgccaaggugaagcucaucaagcaggagcuggacaaguacaagaacgcggucacggagcugcagcuccugaugcagagcacccccgccaccggguccggcagcgccaucugcuccggcguggccgugugcaagguccugcaccucgagggggaggugaacaagaucaagagcgcgcugcuguccaccaacaaggccguggucagccucuccaacggcgugagcgugcugacguucaagguccuggaccucaagaacuacaucgacaagcagcugcugccgauccucaacaagcaguccugcagcauccccaacaucgagaccgugaucgaguuccagcagaagaacaaccggcugcuggagaucacccgcgaguucuccgugaacgccggggucaccacgcccgugagcaccuacaugcucaccaacuccgagcugcugagccucaucaacgacaugcccaucaccaacgaccagaagaagcugaugagcaacaacgugcagaucguccggcagcaguccuacagcaucaugugcaucaucaaggaggaggugcuggccuacgugguccagcucccgcuguacggcgugaucgacacgcccugcuggaagcugcacaccagcccccucugcaccaccaacacgaaggagggguccaacaucugccugacccgcaccgaccggggcugguacugcgacaacgccggcuccgugagcuucuucccccaggcggagaccugcaagguccaguccaaccgcguguucugcgacacgaugaacagccugacccucccguccgaggucaaccugugcaacguggacaucuucaaccccaaguacgacugcaagaucaugaccagcaagaccgacguguccagcuccgucaucacgagccugggggccaucguguccugcuacggcaagaccaagugcaccgccagcaacaagaaccgggggaucaucaagaccuucuccaacggcugcgacuacgugagcaacaagggcgucgacacgguguccguggggaacacccucuacugcgucaacaagcaggagggccagagccuguacgugaagggggagcccaucaucaacuucuacgacccccugguguucccgagcgacgaguucgacgccuccaucagccaggucaacgagaagaucaaccagucccucgccuucauccgcaagagcgacgagcugcugcacaacgugaacgcgggcaaguccaccaccaacaucaugaucaccacgaucaucaucgugaucaucgucauccuccugagccugaucgccguggggcuccugcuguacugcaaggcccggugaggacuagugaagggaacacccaaauuuaauucagccuuaagcacaauuaauuaagagugaaacguaauuguacaagcaguuggucacccaccauagggcaugaucaacaccgcaaccuuuccuuuuucccccagugauucugaaaaaccccucuucccuucagcuugcuuagauguuccaaauuuaguaagcuuaaggcggccuacagaagaaaaagaaaaaaaaggccacaaaaguucccucucacuuucaguaaauaaaauaaaagcagcaacagaaauaaagaaauaaaugaaauucaaaaugaaauaaauauuguguugugcagcauuaaaaaaucaauaaaaauuaaaaaugagcaagaucuaaaaaaaaaaaaaaaaaaaaaaaaaaaaaaaaaaaaaaaaaaaaaaaaaaaaaaaaaaaaaaaaugcaucccccccccccccccccccccccccccccccaaaggcucuuuucagagccaccagaauu

SEQ ID NO: 2280 - RNA, 2136 nt, Artificial Sequence
  mRNA product Design g-3 comprising derived and/or modified sequence from HRSV(A2)__F-del_DSCav1_mut1 (opt2)
gggagaguccgcucagccagguugcagaagcggcuuagcguguguccuaaucuucucucugcguguagguaggccugugccgcaaacaagcuuaccauggagcuccucauccucaaggccaacgccaucaccaccauccucaccgccgucaccuucugcuucgccuccggccagaacaucaccgaggaguucuaccaguccaccugcuccgccgucuccaagggcuaccucggcgcccuccgcaccggcugguacaccuccgucaucaccaucgagcucuccaacaucaaggagaacaagugcaacggcaccgacgccaaggucaagcucaucaagcaggagcucgacaaguacaagaacgccgucaccgagcuccagcuccucaugcaguccacccccgccaccggcuccggcuccgccaucugcuccggcgucgccgucugcaagguccuccaccucgagggcgaggucaacaagaucaaguccgcccuccucuccaccaacaaggccgucgucucccucuccaacggcgucuccguccucaccuucaagguccucgaccucaagaacuacaucgacaagcagcuccuccccauccucaacaagcaguccugcuccauccccaacaucgagaccgucaucgaguuccagcagaagaacaaccgccuccucgagaucacccgcgaguucuccgucaacgccggcgucaccacccccgucuccaccuacaugcucaccaacuccgagcuccucucccucaucaacgacaugcccaucaccaacgaccagaagaagcucauguccaacaacguccagaucguccgccagcaguccuacuccaucaugugcaucaucaaggaggagguccucgccuacgucguccagcucccccucuacggcgucaucgacacccccugcuggaagcuccacaccuccccccucugcaccaccaacaccaaggagggcuccaacaucugccucacccgcaccgaccgcggcugguacugcgacaacgccggcuccgucuccuucuucccccaggccgagaccugcaagguccaguccaaccgcgucuucugcgacaccaugaacucccucacccuccccuccgaggucaaccucugcaacgucgacaucuucaaccccaaguacgacugcaagaucaugaccuccaagaccgacgucuccuccuccgucaucaccucccucggcgccaucgucuccugcuacggcaagaccaagugcaccgccuccaacaagaaccgcggcaucaucaagaccuucuccaacggcugcgacuacgucuccaacaagggcgucgacaccgucuccgucggcaacacccucuacugcgucaacaagcaggagggccagucccucuacgucaagggcgagcccaucaucaacuucuacgacccccucgucuuccccuccgacgaguucgacgccuccaucucccaggucaacgagaagaucaaccagucccucgccuucauccgcaaguccgacgagcuccuccacaacgucaacgccggcaaguccaccaccaacaucaugaucaccaccaucaucaucgucaucaucgucauccuccucucccucaucgccgucggccuccuccucuacugcaaggcccgcugaggacuagugaagggaacacccaaauuuaauucagccuuaagcacaauuaauuaagagugaaacguaauuguacaagcaguuggucacccaccauagggcaugaucaacaccgcaaccuuuccuuuuucccccagugauucugaaaaaccccucuucccuucagcuugcuuagauguuccaaauuuaguaagcuuaaggcggccuacagaagaaaaagaaaaaaaaggccacaaaaguucccucucacuuucaguaaauaaaauaaaagcagcaacagaaauaaagaaauaaaugaaauucaaaaugaaauaaauauuguguugugcagcauuaaaaaaucaauaaaaauuaaaaaugagcaagaucuaaaaaaaaaaaaaaaaaaaaaaaaaaaaaaaaaaaaaaaaaaaaaaaaaaaaaaaaaaaaaaaaugcaucccccccccccccccccccccccccccccccaaaggcucuuuucagagccaccagaauu

SEQ ID NO: 2281 - RNA, 2136 nt, Artificial Sequence
  mRNA product Design g-3 comprising derived and/or modified sequence from HRSV(A2)__F-del_DSCav1_mut1 (opt3)
gggagaguccgcucagccagguugcagaagcggcuuagcguguguccuaaucuucucucugcguguagguaggccugugccgcaaacaagcuuaccauggagcugcucauccuuaaggccaacgcuauuaccacaauacugacugcagugacguucugcuuugccagcggccagaauaucaccgaagaguucuaccaauccacauguucugcggucucaaaaggguauuugggagcuuuaagaacugguugguacaccaguguuauuacaaucgaacugagcaacauuaaggagaauaaaugcaacggcaccgacgccaaggugaaacuaaucaagcaggaacucgauaaguauaaaaaugcaguaacugagcugcagcuucugaugcaguccacacccgccaccgggucuggaucggcuauauguucaggcguggcagucugcaagguguugcaccucgagggugaaguuaacaaaaucaagagcgcccugcugaguacgaauaaagcuguggucucccucucuaacggggugagcguauuaacuuuuaagguucuggaccuuaagaauuacauugauaaacaauugcugccuauccuaaacaagcaguccuguucaauuccaaauaucgagaccgugauagaguuccagcagaaaaacaauaggcuccuggaaauuacacgggaguuuagugucaacgccggagugacuaccccggugagcacauauaugcuuaccaauucugaacuguugucccucaucaacgacaugcccauuacgaacgaucaaaagaaacugaugucaaauaacguccagaucguucgccagcagagcuacaguaucaugugcauuauaaaggaggaaguguuagcguauguagugcaacugccucucuacggcgucaucgacacuccauguuggaaacuucauacaucuccccugugcaccacuaauacaaaggagggcuccaacauuuguuugacccgaacggaucgugggugguacugcgacaaugcaggaagcgugucguucuuuccucaggccgaaaccuguaagguucagucuaacagaguguucugcgauacaaugaacucccuaacucugccaucagaggucaaucucugcaauguggacaucuuuaaccccaaauaugauuguaagauaaugaccaguaaaacagacguaagcuccucuguuauuacuagccugggugcuaucgugucaugcuacggcaagaccaaauguacagccaguaauaagaacagggggaucauuaagaccuucuccaauggaugcgauuaugucagcaacaaaggcguggacacugucucuguggguaauacgcuuuacuguguuaacaagcaagaggggcagucacuguaugugaaaggagaaccuaucauuaacuuuuacgacccauugguauucccgagugaugaguuugacgcaagcauaucccaggucaaugaaaagaucaaccagucucucgcuuucauucggaaaucggaugagcuguuacacaaugugaacgccggcaagagcacaaccaauaucaugaucacuaccauuauaaucguuauuaucgugauucugcuaucccucaucgcggucggccugcuuuuguauugcaaggcccgcugaggacuagugaagggaacacccaaauuuaauucagccuuaagcacaauuaauuaagagugaaacguaauuguacaagcaguuggucacccaccauagggcaugaucaacaccgcaaccuuuccuuuuucccccagugauucugaaaaaccccucuucccuucagcuugcuuagauguuccaaauuuaguaagcuuaaggcggccuacagaagaaaaagaaaaaaaaggccacaaaaguucccucucacuuucaguaaauaaaauaaaagcagcaacagaaauaaagaaauaaaugaaauucaaaaugaaauaaauauuguguugugcagcauuaaaaaaucaauaaaaauuaaaaaugagcaagaucuaaaaaaaaaaaaaaaaaaaaaaaaaaaaaaaaaaaaaaaaaaaaaaaaaaaaaaaaaaaaaaaaugcaucccccccccccccccccccccccccccccccaaaggcucuuuucagagccaccagaauu

SEQ ID NO: 2282 - RNA, 2136 nt, Artificial Sequence
  mRNA product Design g-3 comprising derived and/or modified sequence from HRSV(A2)__F-del_DSCav1_mut1 (opt4)
gggagaguccgcucagccagguugcagaagcggcuuagcguguguccuaaucuucucucugcguguagguaggccugugccgcaaacaagcuuaccauggagcugcugauccugaaggccaacgccaucaccaccauccugaccgccgugaccuucugcuucgccagcggccagaacaucaccgaggaguucuaccagagcaccugcagcgccgugagcaagggcuaccugggcgcccugagaaccggcugguacaccagcgugaucaccaucgagcugagcaacaucaaggagaacaagugcaacggcaccgacgccaaggugaagcugaucaagcaggagcuggacaaguacaagaacgccgugaccgagcugcagcugcugaugcagagcacccccgccaccggcagcggcagcgccaucugcagcggcguggccgugugcaaggugcugcaccuggagggcgaggugaacaagaucaagagcgcccugcugagcaccaacaaggccguggugagccugagcaacggcgugagcgugcugaccuucaaggugcuggaccugaagaacuacaucgacaagcagcugcugcccauccugaacaagcagagcugcagcauccccaacaucgagaccgugaucgaguuccagcagaagaacaacagacugcuggagaucaccagagaguucagcgugaacgccggcgugaccacccccgugagcaccuacaugcugaccaacagcgagcugcugagccugaucaacgacaugcccaucaccaacgaccagaagaagcugaugagcaacaacgugcagaucgugagacagcagagcuacagcaucaugugcaucaucaaggaggaggugcuggccuacguggugcagcugccccuguacggcgugaucgacacccccugcuggaagcugcacaccagcccccugugcaccaccaacaccaaggagggcagcaacaucugccugaccagaaccgacagaggcugguacugcgacaacgccggcagcgugagcuucuucccccaggccgagaccugcaaggugcagagcaacagaguguucugcgacaccaugaacagccugacccugcccagcgaggugaaccugugcaacguggacaucuucaaccccaaguacgacugcaagaucaugaccagcaagaccgacgugagcagcagcgugaucaccagccugggcgccaucgugagcugcuacggcaagaccaagugcaccgccagcaacaagaacagaggcaucaucaagaccuucagcaacggcugcgacuacgugagcaacaagggcguggacaccgugagcgugggcaacacccuguacugcgugaacaagcaggagggccagagccuguacgugaagggcgagcccaucaucaacuucuacgacccccugguguuccccagcgacgaguucgacgccagcaucagccaggugaacgagaagaucaaccagagccuggccuucaucagaaagagcgacgagcugcugcacaacgugaacgccggcaagagcaccaccaacaucaugaucaccaccaucaucaucgugaucaucgugauccugcugagccugaucgccgugggccugcugcuguacugcaaggccagaugaggacuagugaagggaacacccaaauuuaauucagccuuaagcacaauuaauuaagagugaaacguaauuguacaagcaguuggucacccaccauagggcaugaucaacaccgcaaccuuuccuuuuucccccagugauucugaaaaaccccucuucccuucagcuugcuuagauguuccaaauuuaguaagcuuaaggcggccuacagaagaaaaagaaaaaaaaggccacaaaaguucccucucacuuucaguaaauaaaauaaaagcagcaacagaaauaaagaaauaaaugaaauucaaaaugaaauaaauauuguguugugcagcauuaaaaaaucaauaaaaauuaaaaaugagcaagaucuaaaaaaaaaaaaaaaaaaaaaaaaaaaaaaaaaaaaaaaaaaaaaaaaaaaaaaaaaaaaaaaaugcaucccccccccccccccccccccccccccccccaaaggcucuuuucagagccaccagaauu

SEQ ID NO: 2283 - RNA, 2136 nt, Artificial Sequence
  mRNA product Design g-3 comprising derived and/or modified sequence from HRSV(A2)__F-del_DSCav1_mut1 (opt5)
gggagaguccgcucagccagguugcagaagcggcuuagcguguguccuaaucuucucucugcguguagguaggccugugccgcaaacaagcuuaccauggagcugcucauccugaaggccaacgcuauuaccacaauccuuacggccgugaccuucugcuuugcgagcggccagaauauuacagaagaguucuaccaauccaccuguucugcugucagcaaaggguaucugggagcccucagaacaggcugguacaccuccguuaucacaauugaacugucuaacaucaaggagaauaaaugcaacgggaccgacgccaaggugaaacuuaucaagcaggaacuggauaaguauaaaaaugcugugacggagcuccagcugcugaugcagagcacccccgccacaggauccggcucugcuauuuguagcggggucgccgugugcaagguucuccaccuggagggagaagugaacaaaaucaaguccgcgcuucugagcaccaauaaagccgucgugucucucuccaacggcguuagcgugcugacauuuaagguccuugaccugaagaauuacauugauaaacaacuccugccuauccugaacaagcagucuuguuccauuccgaauaucgagaccgugauugaguuccagcagaaaaacaaucggcuccuggaaaucacgcgcgaguuuagcgugaacgcuggcgucacaacccccguuucuacauauaugcuuaccaauuccgaacugcucagccugaucaacgacaugccuauuaccaacgaucaaaagaaacuuauguccaauaacgugcagaucgugagacagcagucuuacagcauuaugugcaucauuaaggaggaaguccuggccuaugugguucaacucccccuguacggggugaucgacacaccuuguuggaaacugcauacgagcccccucugcaccacaaauaccaaggagggauccaacaucugucugacacggaccgaucgcggcugguacugcgacaaugcugggucugucuccuucuuuccucaggccgaaacguguaaggugcagagcaacagaguuuucugcgauacaaugaacucucuuacccugccgagcgaggugaaucucugcaaugucgacauuuuuaaccccaaauaugauuguaagaucaugaccuccaaaacagacgugucuagcuccgucauuaccagccugggagcgaucgugucuugcuacggcaagacaaaauguacggccuccaauaagaaccgggggauuaucaagaccuucagcaauggaugcgauuauguuucuaacaaaggcguggacacagucuccgugggcaauacccuuuacuguguuaacaagcaagaggggcagagccuguaugugaaaggagaaccuaucauuaacuuuuacgacccccucgucuucccuuccgaugaguuugacgcuucuaucagccaggugaaugaaaagauuaaccagucccuggccuucauccgcaaaucugaugagcugcuccacaaugugaacgcuggcaagagcacaaccaauauuaugaucacgaccauuaucaucguuauuaucgucauucugcuuucccugaucgccguggggcuccugcuguauugcaaggccagaugaggacuagugaagggaacacccaaauuuaauucagccuuaagcacaauuaauuaagagugaaacguaauuguacaagcaguuggucacccaccauagggcaugaucaacaccgcaaccuuuccuuuuucccccagugauucugaaaaaccccucuucccuucagcuugcuuagauguuccaaauuuaguaagcuuaaggcggccuacagaagaaaaagaaaaaaaaggccacaaaaguucccucucacuuucaguaaauaaaauaaaagcagcaacagaaauaaagaaauaaaugaaauucaaaaugaaauaaauauuguguugugcagcauuaaaaaaucaauaaaaauuaaaaaugagcaagaucuaaaaaaaaaaaaaaaaaaaaaaaaaaaaaaaaaaaaaaaaaaaaaaaaaaaaaaaaaaaaaaaaugcaucccccccccccccccccccccccccccccccaaaggcucuuuucagagccaccagaauu

SEQ ID NO: 2284 - RNA, 2136 nt, Artificial Sequence
  mRNA product Design g-3 comprising derived and/or modified sequence from HRSV(A2)__F-del_DSCav1_mut1 (opt6)
gggagaguccgcucagccagguugcagaagcggcuuagcguguguccuaaucuucucucugcguguagguaggccugugccgcaaacaagcuuaccauggaacuacucaucuuaaaagcaaacgcaauaacaacuauucuaaccgcaguaacauuuuguuucgcaucaggacaaaacauaaccgaagaauuuuaccaaucaacauguuccgcaguuucaaaaggauacuuaggcgcacuaagaacaggcugguacaccuccgugauaacaauagaauuaucaaacauaaaagaaaacaaauguaauggaacugacgccaaaguaaaacuaauaaaacaagaacuagacaaauauaaaaacgcaguaacugaacuacaauuacuaaugcaauccaccccagcaacaggcucaggcucagcaauuugcuccggagucgcugucugcaaaguacuacaucuugaaggcgaagucaauaaaauaaaaucagcacuucuaucaacaaacaaagcaguagucucacuaucaaacggaguaucaguacuaacauuuaaaguauuagaucuaaaaaacuauauagauaaacaacuacuacccauacucaauaaacaauccuguucaauaccaaauauagaaaccguaauagaauuucaacaaaaaaacaaucgacuauuagaaaucacccgagaauuuucagucaaugcaggcguaacaacaccaguaucaaccuacauguuaaccaacuccgaacuacuaucccucauaaacgacaugccaauaacaaacgaucaaaaaaaacuaauguccaacaacguacaaauagucagacaacaaucuuauucaauaaugugcaucauaaaagaagaaguucuagccuacguaguucaacuuccauuauacggcguaauugauacaccaugcuggaaacuacacacauccccacuauguacaacaaacacaaaagaaggaucaaacaucugcuuaacuagaacagacagaggaugguacugcgacaacgcaggaucagucucauucuuuccacaagcagaaacaugcaagguccaaucaaacagaguauucugcgacacaaugaacuccuuaacacuaccaucugaaguaaaccuauguaauguagacauauuuaacccaaaauacgacugcaaaauaaugaccucaaaaacagacguauccucaucaguaauuacaagccucggagccauaguaucaugcuacggaaaaacaaaauguacagcaucaaacaaaaacagaggaauaauaaaaacguucuccaacggaugcgacuauguaucaaacaaaggcguagacacaguaucagucggaaauacccuuuacugcguaaacaaacaagaaggccaaagucuauacguaaaaggagagccaauaauaaacuuuuaugacccccuuguauucccaucugacgaauuugaugcaucaauaucccaagucaacgaaaaaaucaaccaaucauuagccuuuauuagaaaaagugacgaacuauuacacaacguuaaugcagggaaaucaacaacaaauauaaugauuacaaccauaauuauaguuaucauaguuauacuacucucacuaaucgcaguaggauuacuauuauacugcaaagcaagauaaggacuagugaagggaacacccaaauuuaauucagccuuaagcacaauuaauuaagagugaaacguaauuguacaagcaguuggucacccaccauagggcaugaucaacaccgcaaccuuuccuuuuucccccagugauucugaaaaaccccucuucccuucagcuugcuuagauguuccaaauuuaguaagcuuaaggcggccuacagaagaaaaagaaaaaaaaggccacaaaaguucccucucacuuucaguaaauaaaauaaaagcagcaacagaaauaaagaaauaaaugaaauucaaaaugaaauaaauauuguguugugcagcauuaaaaaaucaauaaaaauuaaaaaugagcaagaucuaaaaaaaaaaaaaaaaaaaaaaaaaaaaaaaaaaaaaaaaaaaaaaaaaaaaaaaaaaaaaaaaugcaucccccccccccccccccccccccccccccccaaaggcucuuuucagagccaccagaauu

SEQ ID NO: 2285 - RNA, 2136 nt, Artificial Sequence
  mRNA product Design g-3 comprising derived and/or modified sequence from HRSV(A2)__F-del_DSCav1_mut1 (opt11)
gggagaguccgcucagccagguugcagaagcggcuuagcguguguccuaaucuucucucugcguguagguaggccugugccgcaaacaagcuuaccauggaacuacucauccuaaaagccaacgcaaucacaaccauacuuacagcuguuaccuucugcuucgcauccggccaaaauaucaccgaagaguucuaccaaucaaccugcuccgccgucagcaaaggauaccucggcgcccuccgaaccggaugguacacuucugucaucacaaucgaacucuccaacaucaaagaaaacaaaugcaacgguaccgacgcgaaagucaaacucaucaaacaagaacuagacaaguacaaaaacgccgucaccgaacugcaacuccucaugcaauccacaccagcaacgggaucaggauccgccaucugcucaggcgucgccgucugcaaaguccugcaccuagaaggagaaguaaacaaaauuaaauccgcccuacucuccaccaacaaagcagucgucucacuauccaacggcgucuccguccucaccuuuaagguccucgaccucaaaaauuauauagacaaacaacuccuccccauccuaaacaaacaaucaugcuccauccccaacauagaaaccgucaucgaauuucaacagaaaaacaaccgacucuuagaaauuacccgcgaguucagcgucaacgccggagucaccacacccgucucaaccuacaugcucaccaacucagaacuccucucacuaaucaaugauaugcccaucacaaacgaccaaaagaaacucauguccaacaacguacaaaucguucgccaacaaagcuacuccaucauguguaucauuaaagaagaaguccucgccuacgucguccaacuuccgcucuacggcguaaucgacacccccugcuggaaacuucacaccucgccccucugcaccacaaacaccaaagaaggcuccaacaucugccuaacccgcaccgaccgcggcugguacugcgacaacgccggcuccgucucauuuuucccccaggcggagaccugcaaaguccaauccaaccgcgucuucugcgacaccaugaacucucuuacccucccaucagaaguaaaccucugcaacgucgacaucuuuaaccccaaauacgauugcaagauaaugaccuccaaaacagacgucucaucguccgucaucaccucccuaggagcuaucgucuccugcuacggcaagaccaaaugcaccgcuuccaacaaaaaccgcggcaucaucaaaaccuucuccaacgggugcgacuacgucucuaacaaaggcguggacacaguauccguaggaaacacacuguacugcguaaacaaacaagagggccaaucgcuuuacgucaaaggcgagccaauuaucaacuucuacgacccgcucgucuucccaucagacgaguucgacgcauccaucucccaagucaacgagaaaaucaaucagucccucgccuucauacgcaaauccgacgaacuccuacauaacguaaacgccggcaaaucuaccacaaacaucaugaucacaaccaucaucaucguaaucaucgucauccuucucucgcucaucgccguaggacugcuacuuuacugcaaggcccgcuaaggacuagugaagggaacacccaaauuuaauucagccuuaagcacaauuaauuaagagugaaacguaauuguacaagcaguuggucacccaccauagggcaugaucaacaccgcaaccuuuccuuuuucccccagugauucugaaaaaccccucuucccuucagcuugcuuagauguuccaaauuuaguaagcuuaaggcggccuacagaagaaaaagaaaaaaaaggccacaaaaguucccucucacuuucaguaaauaaaauaaaagcagcaacagaaauaaagaaauaaaugaaauucaaaaugaaauaaauauuguguugugcagcauuaaaaaaucaauaaaaauuaaaaaugagcaagaucuaaaaaaaaaaaaaaaaaaaaaaaaaaaaaaaaaaaaaaaaaaaaaaaaaaaaaaaaaaaaaaaaugcaucccccccccccccccccccccccccccccccaaaggcucuuuucagagccaccagaauu

SEQ ID NO: 2286 - RNA, 1931 nt, Artificial Sequence
  mRNA product Design g-4 comprising derived and/or modified sequence from HRSV(A2)__F-del_DSCav1_mut1 (opt1)
gggagacuccugucgggcggaaguaggaggaguagaguuuaaaaacaguacucuuuuuccgguucgggacguaguugaagcaacgacaagccggauaaccgcucuugagacaggaagcuuaccauggagcugcucauccugaaggccaacgccaucaccaccauccugacggcggugaccuucugcuucgccagcggccagaacaucaccgaggaguucuaccaguccacgugcagcgccgucuccaagggguaccucggcgcccugcggaccggcugguacaccuccgugaucaccaucgagcugagcaacaucaaggagaacaagugcaacgggaccgacgccaaggugaagcucaucaagcaggagcuggacaaguacaagaacgcggucacggagcugcagcuccugaugcaguccaccccggcaaccggcuccggcuccgccaucugcagcggcgucgccgugugcaaggugcugcaccucgagggggaggucaacaagaucaagagcgcccugcuguccaccaacaaggccguggugagccucuccaacggcgucagcgugcugaccuucaaggugcuggaccucaagaacuacaucgacaagcagcugcugcccauccugaacaagcagagcugcuccauccccaacaucgagacggugaucgaguuccagcagaagaacaaccggcuccuggagaucacccgcgaguucagcgugaacgccggggucaccacccccguguccacguacaugcugaccaacagcgagcuccugucccugaucaacgacaugccgaucaccaacgaccagaagaagcucaugagcaacaacgugcagaucguccggcagcaguccuacagcaucaugugcaucaucaaggaggaggugcuggcguacgugguccagcugccccucuacggcgugaucgacacccccugcuggaagcugcacacgagcccccugugcaccaccaacaccaaggagggguccaacaucugccucacgcgcaccgaccggggcugguacugcgacaacgccggcagcgucuccuucuucccgcaggccgagaccugcaaggugcagagcaaccgcguguucugcgacaccaugaacucccugacgcugcccagcgagguaaaccucugcaacgucgacaucuucaaccccaaguacgacugcaagaucaugaccuccaagaccgacgugagcuccagcgugaucaccucccugggggccaucgucagcugcuacggcaagacgaagugcaccgccagcaacaagaaccgggggaucaucaagaccuucuccaacggcugcgacuacgugagcaacaagggcguggacaccguguccgucgggaacacccuguacugcgugaacaagcaggagggccagagccucuacgugaagggggagcccaucaucaacuucuacgacccgcuggucuuccccuccgacgaguucgacgcgagcaucucccaggugaacgagaagaucaaccagagccuggccuucauccgcaaguccgacgagcugcuccacaacgugaacgccggcaagagcacgaccaacaucaugaucaccaccaucaucaucgucaucaucgugauccugcugucccucaucgccguggggcugcugcucuacugcaaggcccggugaggacuaguaauaaggaaacuguaugaaugucugugggcaggaagugaagagauccuucuguaaagguuuuuggaauuaugucugcugaauaauaaacuuuuuugaaauaauaaaucugguagaaaaaugagaucuaaaaaaaaaaaaaaaaaaaaaaaaaaaaaaaaaaaaaaaaaaaaaaaaaaaaaaaaaaaaaaaaugcaucccccccccccccccccccccccccccccccaaaggcucuuuucagagccaccagaauu

SEQ ID NO: 2287 - RNA, 1931 nt, Artificial Sequence
  mRNA product Design g-4 comprising derived and/or modified sequence from HRSV(A2)__F-del_DSCav1_mut1 (opt1)
gggagacuccugucgggcggaaguaggaggaguagaguuuaaaaacaguacucuuuuuccgguucgggacguaguugaagcaacgacaagccggauaaccgcucuugagacaggaagcuuaccauggagcugcucauccugaaggccaacgccaucaccaccauccugacggcggugaccuucugcuucgccagcggccagaacaucaccgaggaguucuaccaguccacgugcagcgccgucuccaagggguaccucggcgcccugcgcaccgggugguacaccagcgugaucaccaucgagcuguccaacaucaaggagaacaagugcaacggcaccgacgccaaggugaagcucaucaagcaggagcuggacaaguacaagaacgcggucacggagcugcagcuccugaugcagagcacccccgccaccggguccggcagcgccaucugcuccggcguggccgugugcaagguccugcaccucgagggggaggugaacaagaucaagagcgcgcugcuguccaccaacaaggccguggucagccucuccaacggcgugagcgugcugacguucaagguccuggaccucaagaacuacaucgacaagcagcugcugccgauccucaacaagcaguccugcagcauccccaacaucgagaccgugaucgaguuccagcagaagaacaaccggcugcuggagaucacccgcgaguucuccgugaacgccggggucaccacgcccgugagcaccuacaugcucaccaacuccgagcugcugagccucaucaacgacaugcccaucaccaacgaccagaagaagcugaugagcaacaacgugcagaucguccggcagcaguccuacagcaucaugugcaucaucaaggaggaggugcuggccuacgugguccagcucccgcuguacggcgugaucgacacgcccugcuggaagcugcacaccagcccccucugcaccaccaacacgaaggagggguccaacaucugccugacccgcaccgaccggggcugguacugcgacaacgccggcuccgugagcuucuucccccaggcggagaccugcaagguccaguccaaccgcguguucugcgacacgaugaacagccugacccucccguccgaggucaaccugugcaacguggacaucuucaaccccaaguacgacugcaagaucaugaccagcaagaccgacguguccagcuccgucaucacgagccugggggccaucguguccugcuacggcaagaccaagugcaccgccagcaacaagaaccgggggaucaucaagaccuucuccaacggcugcgacuacgugagcaacaagggcgucgacacgguguccguggggaacacccucuacugcgucaacaagcaggagggccagagccuguacgugaagggggagcccaucaucaacuucuacgacccccugguguucccgagcgacgaguucgacgccuccaucagccaggucaacgagaagaucaaccagucccucgccuucauccgcaagagcgacgagcugcugcacaacgugaacgcgggcaaguccaccaccaacaucaugaucaccacgaucaucaucgugaucaucgucauccuccugagccugaucgccguggggcuccugcuguacugcaaggcccggugaggacuaguaauaaggaaacuguaugaaugucugugggcaggaagugaagagauccuucuguaaagguuuuuggaauuaugucugcugaauaauaaacuuuuuugaaauaauaaaucugguagaaaaaugagaucuaaaaaaaaaaaaaaaaaaaaaaaaaaaaaaaaaaaaaaaaaaaaaaaaaaaaaaaaaaaaaaaaugcaucccccccccccccccccccccccccccccccaaaggcucuuuucagagccaccagaauu

SEQ ID NO: 2288 - RNA, 1931 nt, Artificial Sequence
  mRNA product Design g-4 comprising derived and/or modified sequence from HRSV(A2)__F-del_DSCav1_mut1 (opt2)
gggagacuccugucgggcggaaguaggaggaguagaguuuaaaaacaguacucuuuuuccgguucgggacguaguugaagcaacgacaagccggauaaccgcucuugagacaggaagcuuaccauggagcuccucauccucaaggccaacgccaucaccaccauccucaccgccgucaccuucugcuucgccuccggccagaacaucaccgaggaguucuaccaguccaccugcuccgccgucuccaagggcuaccucggcgcccuccgcaccggcugguacaccuccgucaucaccaucgagcucuccaacaucaaggagaacaagugcaacggcaccgacgccaaggucaagcucaucaagcaggagcucgacaaguacaagaacgccgucaccgagcuccagcuccucaugcaguccacccccgccaccggcuccggcuccgccaucugcuccggcgucgccgucugcaagguccuccaccucgagggcgaggucaacaagaucaaguccgcccuccucuccaccaacaaggccgucgucucccucuccaacggcgucuccguccucaccuucaagguccucgaccucaagaacuacaucgacaagcagcuccuccccauccucaacaagcaguccugcuccauccccaacaucgagaccgucaucgaguuccagcagaagaacaaccgccuccucgagaucacccgcgaguucuccgucaacgccggcgucaccacccccgucuccaccuacaugcucaccaacuccgagcuccucucccucaucaacgacaugcccaucaccaacgaccagaagaagcucauguccaacaacguccagaucguccgccagcaguccuacuccaucaugugcaucaucaaggaggagguccucgccuacgucguccagcucccccucuacggcgucaucgacacccccugcuggaagcuccacaccuccccccucugcaccaccaacaccaaggagggcuccaacaucugccucacccgcaccgaccgcggcugguacugcgacaacgccggcuccgucuccuucuucccccaggccgagaccugcaagguccaguccaaccgcgucuucugcgacaccaugaacucccucacccuccccuccgaggucaaccucugcaacgucgacaucuucaaccccaaguacgacugcaagaucaugaccuccaagaccgacgucuccuccuccgucaucaccucccucggcgccaucgucuccugcuacggcaagaccaagugcaccgccuccaacaagaaccgcggcaucaucaagaccuucuccaacggcugcgacuacgucuccaacaagggcgucgacaccgucuccgucggcaacacccucuacugcgucaacaagcaggagggccagucccucuacgucaagggcgagcccaucaucaacuucuacgacccccucgucuuccccuccgacgaguucgacgccuccaucucccaggucaacgagaagaucaaccagucccucgccuucauccgcaaguccgacgagcuccuccacaacgucaacgccggcaaguccaccaccaacaucaugaucaccaccaucaucaucgucaucaucgucauccuccucucccucaucgccgucggccuccuccucuacugcaaggcccgcugaggacuaguaauaaggaaacuguaugaaugucugugggcaggaagugaagagauccuucuguaaagguuuuuggaauuaugucugcugaauaauaaacuuuuuugaaauaauaaaucugguagaaaaaugagaucuaaaaaaaaaaaaaaaaaaaaaaaaaaaaaaaaaaaaaaaaaaaaaaaaaaaaaaaaaaaaaaaaugcaucccccccccccccccccccccccccccccccaaaggcucuuuucagagccaccagaauu

SEQ ID NO: 2289 - RNA, 1931 nt, Artificial Sequence
  mRNA product Design g-4 comprising derived and/or modified sequence from HRSV(A2)__F-del_DSCav1_mut1 (opt3)
gggagacuccugucgggcggaaguaggaggaguagaguuuaaaaacaguacucuuuuuccgguucgggacguaguugaagcaacgacaagccggauaaccgcucuugagacaggaagcuuaccauggagcugcucauccuuaaggccaacgcuauuaccacaauacugacugcagugacguucugcuuugccagcggccagaauaucaccgaagaguucuaccaauccacauguucugcggucucaaaaggguauuugggagcuuuaagaacugguugguacaccaguguuauuacaaucgaacugagcaacauuaaggagaauaaaugcaacggcaccgacgccaaggugaaacuaaucaagcaggaacucgauaaguauaaaaaugcaguaacugagcugcagcuucugaugcaguccacacccgccaccgggucuggaucggcuauauguucaggcguggcagucugcaagguguugcaccucgagggugaaguuaacaaaaucaagagcgcccugcugaguacgaauaaagcuguggucucccucucuaacggggugagcguauuaacuuuuaagguucuggaccuuaagaauuacauugauaaacaauugcugccuauccuaaacaagcaguccuguucaauuccaaauaucgagaccgugauagaguuccagcagaaaaacaauaggcuccuggaaauuacacgggaguuuagugucaacgccggagugacuaccccggugagcacauauaugcuuaccaauucugaacuguugucccucaucaacgacaugcccauuacgaacgaucaaaagaaacugaugucaaauaacguccagaucguucgccagcagagcuacaguaucaugugcauuauaaaggaggaaguguuagcguauguagugcaacugccucucuacggcgucaucgacacuccauguuggaaacuucauacaucuccccugugcaccacuaauacaaaggagggcuccaacauuuguuugacccgaacggaucgugggugguacugcgacaaugcaggaagcgugucguucuuuccucaggccgaaaccuguaagguucagucuaacagaguguucugcgauacaaugaacucccuaacucugccaucagaggucaaucucugcaauguggacaucuuuaaccccaaauaugauuguaagauaaugaccaguaaaacagacguaagcuccucuguuauuacuagccugggugcuaucgugucaugcuacggcaagaccaaauguacagccaguaauaagaacagggggaucauuaagaccuucuccaauggaugcgauuaugucagcaacaaaggcguggacacugucucuguggguaauacgcuuuacuguguuaacaagcaagaggggcagucacuguaugugaaaggagaaccuaucauuaacuuuuacgacccauugguauucccgagugaugaguuugacgcaagcauaucccaggucaaugaaaagaucaaccagucucucgcuuucauucggaaaucggaugagcuguuacacaaugugaacgccggcaagagcacaaccaauaucaugaucacuaccauuauaaucguuauuaucgugauucugcuaucccucaucgcggucggccugcuuuuguauugcaaggcccgcugaggacuaguaauaaggaaacuguaugaaugucugugggcaggaagugaagagauccuucuguaaagguuuuuggaauuaugucugcugaauaauaaacuuuuuugaaauaauaaaucugguagaaaaaugagaucuaaaaaaaaaaaaaaaaaaaaaaaaaaaaaaaaaaaaaaaaaaaaaaaaaaaaaaaaaaaaaaaaugcaucccccccccccccccccccccccccccccccaaaggcucuuuucagagccaccagaauu

SEQ ID NO: 2290 - RNA, 1931 nt, Artificial Sequence
  mRNA product Design g-4 comprising derived and/or modified sequence from HRSV(A2)__F-del_DSCav1_mut1 (opt4)
gggagacuccugucgggcggaaguaggaggaguagaguuuaaaaacaguacucuuuuuccgguucgggacguaguugaagcaacgacaagccggauaaccgcucuugagacaggaagcuuaccauggagcugcugauccugaaggccaacgccaucaccaccauccugaccgccgugaccuucugcuucgccagcggccagaacaucaccgaggaguucuaccagagcaccugcagcgccgugagcaagggcuaccugggcgcccugagaaccggcugguacaccagcgugaucaccaucgagcugagcaacaucaaggagaacaagugcaacggcaccgacgccaaggugaagcugaucaagcaggagcuggacaaguacaagaacgccgugaccgagcugcagcugcugaugcagagcacccccgccaccggcagcggcagcgccaucugcagcggcguggccgugugcaaggugcugcaccuggagggcgaggugaacaagaucaagagcgcccugcugagcaccaacaaggccguggugagccugagcaacggcgugagcgugcugaccuucaaggugcuggaccugaagaacuacaucgacaagcagcugcugcccauccugaacaagcagagcugcagcauccccaacaucgagaccgugaucgaguuccagcagaagaacaacagacugcuggagaucaccagagaguucagcgugaacgccggcgugaccacccccgugagcaccuacaugcugaccaacagcgagcugcugagccugaucaacgacaugcccaucaccaacgaccagaagaagcugaugagcaacaacgugcagaucgugagacagcagagcuacagcaucaugugcaucaucaaggaggaggugcuggccuacguggugcagcugccccuguacggcgugaucgacacccccugcuggaagcugcacaccagcccccugugcaccaccaacaccaaggagggcagcaacaucugccugaccagaaccgacagaggcugguacugcgacaacgccggcagcgugagcuucuucccccaggccgagaccugcaaggugcagagcaacagaguguucugcgacaccaugaacagccugacccugcccagcgaggugaaccugugcaacguggacaucuucaaccccaaguacgacugcaagaucaugaccagcaagaccgacgugagcagcagcgugaucaccagccugggcgccaucgugagcugcuacggcaagaccaagugcaccgccagcaacaagaacagaggcaucaucaagaccuucagcaacggcugcgacuacgugagcaacaagggcguggacaccgugagcgugggcaacacccuguacugcgugaacaagcaggagggccagagccuguacgugaagggcgagcccaucaucaacuucuacgacccccugguguuccccagcgacgaguucgacgccagcaucagccaggugaacgagaagaucaaccagagccuggccuucaucagaaagagcgacgagcugcugcacaacgugaacgccggcaagagcaccaccaacaucaugaucaccaccaucaucaucgugaucaucgugauccugcugagccugaucgccgugggccugcugcuguacugcaaggccagaugaggacuaguaauaaggaaacuguaugaaugucugugggcaggaagugaagagauccuucuguaaagguuuuuggaauuaugucugcugaauaauaaacuuuuuugaaauaauaaaucugguagaaaaaugagaucuaaaaaaaaaaaaaaaaaaaaaaaaaaaaaaaaaaaaaaaaaaaaaaaaaaaaaaaaaaaaaaaaugcaucccccccccccccccccccccccccccccccaaaggcucuuuucagagccaccagaauu

SEQ ID NO: 2291 - RNA, 1931 nt, Artificial Sequence
  mRNA product Design g-4 comprising derived and/or modified sequence from HRSV(A2)__F-del_DSCav1_mut1 (opt5)
gggagacuccugucgggcggaaguaggaggaguagaguuuaaaaacaguacucuuuuuccgguucgggacguaguugaagcaacgacaagccggauaaccgcucuugagacaggaagcuuaccauggagcugcucauccugaaggccaacgcuauuaccacaauccuuacggccgugaccuucugcuuugcgagcggccagaauauuacagaagaguucuaccaauccaccuguucugcugucagcaaaggguaucugggagcccucagaacaggcugguacaccuccguuaucacaauugaacugucuaacaucaaggagaauaaaugcaacgggaccgacgccaaggugaaacuuaucaagcaggaacuggauaaguauaaaaaugcugugacggagcuccagcugcugaugcagagcacccccgccacaggauccggcucugcuauuuguagcggggucgccgugugcaagguucuccaccuggagggagaagugaacaaaaucaaguccgcgcuucugagcaccaauaaagccgucgugucucucuccaacggcguuagcgugcugacauuuaagguccuugaccugaagaauuacauugauaaacaacuccugccuauccugaacaagcagucuuguuccauuccgaauaucgagaccgugauugaguuccagcagaaaaacaaucggcuccuggaaaucacgcgcgaguuuagcgugaacgcuggcgucacaacccccguuucuacauauaugcuuaccaauuccgaacugcucagccugaucaacgacaugccuauuaccaacgaucaaaagaaacuuauguccaauaacgugcagaucgugagacagcagucuuacagcauuaugugcaucauuaaggaggaaguccuggccuaugugguucaacucccccuguacggggugaucgacacaccuuguuggaaacugcauacgagcccccucugcaccacaaauaccaaggagggauccaacaucugucugacacggaccgaucgcggcugguacugcgacaaugcugggucugucuccuucuuuccucaggccgaaacguguaaggugcagagcaacagaguuuucugcgauacaaugaacucucuuacccugccgagcgaggugaaucucugcaaugucgacauuuuuaaccccaaauaugauuguaagaucaugaccuccaaaacagacgugucuagcuccgucauuaccagccugggagcgaucgugucuugcuacggcaagacaaaauguacggccuccaauaagaaccgggggauuaucaagaccuucagcaauggaugcgauuauguuucuaacaaaggcguggacacagucuccgugggcaauacccuuuacuguguuaacaagcaagaggggcagagccuguaugugaaaggagaaccuaucauuaacuuuuacgacccccucgucuucccuuccgaugaguuugacgcuucuaucagccaggugaaugaaaagauuaaccagucccuggccuucauccgcaaaucugaugagcugcuccacaaugugaacgcuggcaagagcacaaccaauauuaugaucacgaccauuaucaucguuauuaucgucauucugcuuucccugaucgccguggggcuccugcuguauugcaaggccagaugaggacuaguaauaaggaaacuguaugaaugucugugggcaggaagugaagagauccuucuguaaagguuuuuggaauuaugucugcugaauaauaaacuuuuuugaaauaauaaaucugguagaaaaaugagaucuaaaaaaaaaaaaaaaaaaaaaaaaaaaaaaaaaaaaaaaaaaaaaaaaaaaaaaaaaaaaaaaaugcaucccccccccccccccccccccccccccccccaaaggcucuuuucagagccaccagaauu

SEQ ID NO: 2292 - RNA, 1931 nt, Artificial Sequence
  mRNA product Design g-4 comprising derived and/or modified sequence from HRSV(A2)__F-del_DSCav1_mut1 (opt6)
gggagacuccugucgggcggaaguaggaggaguagaguuuaaaaacaguacucuuuuuccgguucgggacguaguugaagcaacgacaagccggauaaccgcucuugagacaggaagcuuaccauggaacuacucaucuuaaaagcaaacgcaauaacaacuauucuaaccgcaguaacauuuuguuucgcaucaggacaaaacauaaccgaagaauuuuaccaaucaacauguuccgcaguuucaaaaggauacuuaggcgcacuaagaacaggcugguacaccuccgugauaacaauagaauuaucaaacauaaaagaaaacaaauguaauggaacugacgccaaaguaaaacuaauaaaacaagaacuagacaaauauaaaaacgcaguaacugaacuacaauuacuaaugcaauccaccccagcaacaggcucaggcucagcaauuugcuccggagucgcugucugcaaaguacuacaucuugaaggcgaagucaauaaaauaaaaucagcacuucuaucaacaaacaaagcaguagucucacuaucaaacggaguaucaguacuaacauuuaaaguauuagaucuaaaaaacuauauagauaaacaacuacuacccauacucaauaaacaauccuguucaauaccaaauauagaaaccguaauagaauuucaacaaaaaaacaaucgacuauuagaaaucacccgagaauuuucagucaaugcaggcguaacaacaccaguaucaaccuacauguuaaccaacuccgaacuacuaucccucauaaacgacaugccaauaacaaacgaucaaaaaaaacuaauguccaacaacguacaaauagucagacaacaaucuuauucaauaaugugcaucauaaaagaagaaguucuagccuacguaguucaacuuccauuauacggcguaauugauacaccaugcuggaaacuacacacauccccacuauguacaacaaacacaaaagaaggaucaaacaucugcuuaacuagaacagacagaggaugguacugcgacaacgcaggaucagucucauucuuuccacaagcagaaacaugcaagguccaaucaaacagaguauucugcgacacaaugaacuccuuaacacuaccaucugaaguaaaccuauguaauguagacauauuuaacccaaaauacgacugcaaaauaaugaccucaaaaacagacguauccucaucaguaauuacaagccucggagccauaguaucaugcuacggaaaaacaaaauguacagcaucaaacaaaaacagaggaauaauaaaaacguucuccaacggaugcgacuauguaucaaacaaaggcguagacacaguaucagucggaaauacccuuuacugcguaaacaaacaagaaggccaaagucuauacguaaaaggagagccaauaauaaacuuuuaugacccccuuguauucccaucugacgaauuugaugcaucaauaucccaagucaacgaaaaaaucaaccaaucauuagccuuuauuagaaaaagugacgaacuauuacacaacguuaaugcagggaaaucaacaacaaauauaaugauuacaaccauaauuauaguuaucauaguuauacuacucucacuaaucgcaguaggauuacuauuauacugcaaagcaagauaaggacuaguaauaaggaaacuguaugaaugucugugggcaggaagugaagagauccuucuguaaagguuuuuggaauuaugucugcugaauaauaaacuuuuuugaaauaauaaaucugguagaaaaaugagaucuaaaaaaaaaaaaaaaaaaaaaaaaaaaaaaaaaaaaaaaaaaaaaaaaaaaaaaaaaaaaaaaaugcaucccccccccccccccccccccccccccccccaaaggcucuuuucagagccaccagaauu

SEQ ID NO: 2293 - RNA, 1931 nt, Artificial Sequence
  mRNA product Design g-4 comprising derived and/or modified sequence from HRSV(A2)__F-del_DSCav1_mut1 (opt11)
gggagacuccugucgggcggaaguaggaggaguagaguuuaaaaacaguacucuuuuuccgguucgggacguaguugaagcaacgacaagccggauaaccgcucuugagacaggaagcuuaccauggaacuacucauccuaaaagccaacgcaaucacaaccauacuuacagcuguuaccuucugcuucgcauccggccaaaauaucaccgaagaguucuaccaaucaaccugcuccgccgucagcaaaggauaccucggcgcccuccgaaccggaugguacacuucugucaucacaaucgaacucuccaacaucaaagaaaacaaaugcaacgguaccgacgcgaaagucaaacucaucaaacaagaacuagacaaguacaaaaacgccgucaccgaacugcaacuccucaugcaauccacaccagcaacgggaucaggauccgccaucugcucaggcgucgccgucugcaaaguccugcaccuagaaggagaaguaaacaaaauuaaauccgcccuacucuccaccaacaaagcagucgucucacuauccaacggcgucuccguccucaccuuuaagguccucgaccucaaaaauuauauagacaaacaacuccuccccauccuaaacaaacaaucaugcuccauccccaacauagaaaccgucaucgaauuucaacagaaaaacaaccgacucuuagaaauuacccgcgaguucagcgucaacgccggagucaccacacccgucucaaccuacaugcucaccaacucagaacuccucucacuaaucaaugauaugcccaucacaaacgaccaaaagaaacucauguccaacaacguacaaaucguucgccaacaaagcuacuccaucauguguaucauuaaagaagaaguccucgccuacgucguccaacuuccgcucuacggcguaaucgacacccccugcuggaaacuucacaccucgccccucugcaccacaaacaccaaagaaggcuccaacaucugccuaacccgcaccgaccgcggcugguacugcgacaacgccggcuccgucucauuuuucccccaggcggagaccugcaaaguccaauccaaccgcgucuucugcgacaccaugaacucucuuacccucccaucagaaguaaaccucugcaacgucgacaucuuuaaccccaaauacgauugcaagauaaugaccuccaaaacagacgucucaucguccgucaucaccucccuaggagcuaucgucuccugcuacggcaagaccaaaugcaccgcuuccaacaaaaaccgcggcaucaucaaaaccuucuccaacgggugcgacuacgucucuaacaaaggcguggacacaguauccguaggaaacacacuguacugcguaaacaaacaagagggccaaucgcuuuacgucaaaggcgagccaauuaucaacuucuacgacccgcucgucuucccaucagacgaguucgacgcauccaucucccaagucaacgagaaaaucaaucagucccucgccuucauacgcaaauccgacgaacuccuacauaacguaaacgccggcaaaucuaccacaaacaucaugaucacaaccaucaucaucguaaucaucgucauccuucucucgcucaucgccguaggacugcuacuuuacugcaaggcccgcuaaggacuaguaauaaggaaacuguaugaaugucugugggcaggaagugaagagauccuucuguaaagguuuuuggaauuaugucugcugaauaauaaacuuuuuugaaauaauaaaucugguagaaaaaugagaucuaaaaaaaaaaaaaaaaaaaaaaaaaaaaaaaaaaaaaaaaaaaaaaaaaaaaaaaaaaaaaaaaugcaucccccccccccccccccccccccccccccccaaaggcucuuuucagagccaccagaauu

SEQ ID NO: 2294 - RNA, 1907 nt, Artificial Sequence
  mRNA product Design g-5 comprising derived and/or modified sequence from HRSV(A2)__F-del_DSCav1_mut1 (opt1)
gggagacccgugacccggaaguuguacggcuacgcgacuuucccucccacaaacccucgcgcccuuccuuuccuacuugggcccggcagaaagcuuaccauggagcugcucauccugaaggccaacgccaucaccaccauccugacggcggugaccuucugcuucgccagcggccagaacaucaccgaggaguucuaccaguccacgugcagcgccgucuccaagggguaccucggcgcccugcggaccggcugguacaccuccgugaucaccaucgagcugagcaacaucaaggagaacaagugcaacgggaccgacgccaaggugaagcucaucaagcaggagcuggacaaguacaagaacgcggucacggagcugcagcuccugaugcaguccaccccggcaaccggcuccggcuccgccaucugcagcggcgucgccgugugcaaggugcugcaccucgagggggaggucaacaagaucaagagcgcccugcuguccaccaacaaggccguggugagccucuccaacggcgucagcgugcugaccuucaaggugcuggaccucaagaacuacaucgacaagcagcugcugcccauccugaacaagcagagcugcuccauccccaacaucgagacggugaucgaguuccagcagaagaacaaccggcuccuggagaucacccgcgaguucagcgugaacgccggggucaccacccccguguccacguacaugcugaccaacagcgagcuccugucccugaucaacgacaugccgaucaccaacgaccagaagaagcucaugagcaacaacgugcagaucguccggcagcaguccuacagcaucaugugcaucaucaaggaggaggugcuggcguacgugguccagcugccccucuacggcgugaucgacacccccugcuggaagcugcacacgagcccccugugcaccaccaacaccaaggagggguccaacaucugccucacgcgcaccgaccggggcugguacugcgacaacgccggcagcgucuccuucuucccgcaggccgagaccugcaaggugcagagcaaccgcguguucugcgacaccaugaacucccugacgcugcccagcgagguaaaccucugcaacgucgacaucuucaaccccaaguacgacugcaagaucaugaccuccaagaccgacgugagcuccagcgugaucaccucccugggggccaucgucagcugcuacggcaagacgaagugcaccgccagcaacaagaaccgggggaucaucaagaccuucuccaacggcugcgacuacgugagcaacaagggcguggacaccguguccgucgggaacacccuguacugcgugaacaagcaggagggccagagccucuacgugaagggggagcccaucaucaacuucuacgacccgcuggucuuccccuccgacgaguucgacgcgagcaucucccaggugaacgagaagaucaaccagagccuggccuucauccgcaaguccgacgagcugcuccacaacgugaacgccggcaagagcacgaccaacaucaugaucaccaccaucaucaucgucaucaucgugauccugcugucccucaucgccguggggcugcugcucuacugcaaggcccggugaggacuaguaauaaggaaacuguaugaaugucugugggcaggaagugaagagauccuucuguaaagguuuuuggaauuaugucugcugaauaauaaacuuuuuugaaauaauaaaucugguagaaaaaugagaucuaaaaaaaaaaaaaaaaaaaaaaaaaaaaaaaaaaaaaaaaaaaaaaaaaaaaaaaaaaaaaaaaugcaucccccccccccccccccccccccccccccccaaaggcucuuuucagagccaccagaauu

SEQ ID NO: 2295 - RNA, 1907 nt, Artificial Sequence
  mRNA product Design g-5 comprising derived and/or modified sequence from HRSV(A2)__F-del_DSCav1_mut1 (opt1)
gggagacccgugacccggaaguuguacggcuacgcgacuuucccucccacaaacccucgcgcccuuccuuuccuacuugggcccggcagaaagcuuaccauggagcugcucauccugaaggccaacgccaucaccaccauccugacggcggugaccuucugcuucgccagcggccagaacaucaccgaggaguucuaccaguccacgugcagcgccgucuccaagggguaccucggcgcccugcgcaccgggugguacaccagcgugaucaccaucgagcuguccaacaucaaggagaacaagugcaacggcaccgacgccaaggugaagcucaucaagcaggagcuggacaaguacaagaacgcggucacggagcugcagcuccugaugcagagcacccccgccaccggguccggcagcgccaucugcuccggcguggccgugugcaagguccugcaccucgagggggaggugaacaagaucaagagcgcgcugcuguccaccaacaaggccguggucagccucuccaacggcgugagcgugcugacguucaagguccuggaccucaagaacuacaucgacaagcagcugcugccgauccucaacaagcaguccugcagcauccccaacaucgagaccgugaucgaguuccagcagaagaacaaccggcugcuggagaucacccgcgaguucuccgugaacgccggggucaccacgcccgugagcaccuacaugcucaccaacuccgagcugcugagccucaucaacgacaugcccaucaccaacgaccagaagaagcugaugagcaacaacgugcagaucguccggcagcaguccuacagcaucaugugcaucaucaaggaggaggugcuggccuacgugguccagcucccgcuguacggcgugaucgacacgcccugcuggaagcugcacaccagcccccucugcaccaccaacacgaaggagggguccaacaucugccugacccgcaccgaccggggcugguacugcgacaacgccggcuccgugagcuucuucccccaggcggagaccugcaagguccaguccaaccgcguguucugcgacacgaugaacagccugacccucccguccgaggucaaccugugcaacguggacaucuucaaccccaaguacgacugcaagaucaugaccagcaagaccgacguguccagcuccgucaucacgagccugggggccaucguguccugcuacggcaagaccaagugcaccgccagcaacaagaaccgggggaucaucaagaccuucuccaacggcugcgacuacgugagcaacaagggcgucgacacgguguccguggggaacacccucuacugcgucaacaagcaggagggccagagccuguacgugaagggggagcccaucaucaacuucuacgacccccugguguucccgagcgacgaguucgacgccuccaucagccaggucaacgagaagaucaaccagucccucgccuucauccgcaagagcgacgagcugcugcacaacgugaacgcgggcaaguccaccaccaacaucaugaucaccacgaucaucaucgugaucaucgucauccuccugagccugaucgccguggggcuccugcuguacugcaaggcccggugaggacuaguaauaaggaaacuguaugaaugucugugggcaggaagugaagagauccuucuguaaagguuuuuggaauuaugucugcugaauaauaaacuuuuuugaaauaauaaaucugguagaaaaaugagaucuaaaaaaaaaaaaaaaaaaaaaaaaaaaaaaaaaaaaaaaaaaaaaaaaaaaaaaaaaaaaaaaaugcaucccccccccccccccccccccccccccccccaaaggcucuuuucagagccaccagaauu

SEQ ID NO: 2296 - RNA, 1907 nt, Artificial Sequence
  mRNA product Design g-5 comprising derived and/or modified sequence from HRSV(A2)__F-del_DSCav1_mut1 (opt2)
gggagacccgugacccggaaguuguacggcuacgcgacuuucccucccacaaacccucgcgcccuuccuuuccuacuugggcccggcagaaagcuuaccauggagcuccucauccucaaggccaacgccaucaccaccauccucaccgccgucaccuucugcuucgccuccggccagaacaucaccgaggaguucuaccaguccaccugcuccgccgucuccaagggcuaccucggcgcccuccgcaccggcugguacaccuccgucaucaccaucgagcucuccaacaucaaggagaacaagugcaacggcaccgacgccaaggucaagcucaucaagcaggagcucgacaaguacaagaacgccgucaccgagcuccagcuccucaugcaguccacccccgccaccggcuccggcuccgccaucugcuccggcgucgccgucugcaagguccuccaccucgagggcgaggucaacaagaucaaguccgcccuccucuccaccaacaaggccgucgucucccucuccaacggcgucuccguccucaccuucaagguccucgaccucaagaacuacaucgacaagcagcuccuccccauccucaacaagcaguccugcuccauccccaacaucgagaccgucaucgaguuccagcagaagaacaaccgccuccucgagaucacccgcgaguucuccgucaacgccggcgucaccacccccgucuccaccuacaugcucaccaacuccgagcuccucucccucaucaacgacaugcccaucaccaacgaccagaagaagcucauguccaacaacguccagaucguccgccagcaguccuacuccaucaugugcaucaucaaggaggagguccucgccuacgucguccagcucccccucuacggcgucaucgacacccccugcuggaagcuccacaccuccccccucugcaccaccaacaccaaggagggcuccaacaucugccucacccgcaccgaccgcggcugguacugcgacaacgccggcuccgucuccuucuucccccaggccgagaccugcaagguccaguccaaccgcgucuucugcgacaccaugaacucccucacccuccccuccgaggucaaccucugcaacgucgacaucuucaaccccaaguacgacugcaagaucaugaccuccaagaccgacgucuccuccuccgucaucaccucccucggcgccaucgucuccugcuacggcaagaccaagugcaccgccuccaacaagaaccgcggcaucaucaagaccuucuccaacggcugcgacuacgucuccaacaagggcgucgacaccgucuccgucggcaacacccucuacugcgucaacaagcaggagggccagucccucuacgucaagggcgagcccaucaucaacuucuacgacccccucgucuuccccuccgacgaguucgacgccuccaucucccaggucaacgagaagaucaaccagucccucgccuucauccgcaaguccgacgagcuccuccacaacgucaacgccggcaaguccaccaccaacaucaugaucaccaccaucaucaucgucaucaucgucauccuccucucccucaucgccgucggccuccuccucuacugcaaggcccgcugaggacuaguaauaaggaaacuguaugaaugucugugggcaggaagugaagagauccuucuguaaagguuuuuggaauuaugucugcugaauaauaaacuuuuuugaaauaauaaaucugguagaaaaaugagaucuaaaaaaaaaaaaaaaaaaaaaaaaaaaaaaaaaaaaaaaaaaaaaaaaaaaaaaaaaaaaaaaaugcaucccccccccccccccccccccccccccccccaaaggcucuuuucagagccaccagaauu

SEQ ID NO: 2297 - RNA, 1907 nt, Artificial Sequence
  mRNA product Design g-5 comprising derived and/or modified sequence from HRSV(A2)__F-del_DSCav1_mut1 (opt3)
gggagacccgugacccggaaguuguacggcuacgcgacuuucccucccacaaacccucgcgcccuuccuuuccuacuugggcccggcagaaagcuuaccauggagcugcucauccuuaaggccaacgcuauuaccacaauacugacugcagugacguucugcuuugccagcggccagaauaucaccgaagaguucuaccaauccacauguucugcggucucaaaaggguauuugggagcuuuaagaacugguugguacaccaguguuauuacaaucgaacugagcaacauuaaggagaauaaaugcaacggcaccgacgccaaggugaaacuaaucaagcaggaacucgauaaguauaaaaaugcaguaacugagcugcagcuucugaugcaguccacacccgccaccgggucuggaucggcuauauguucaggcguggcagucugcaagguguugcaccucgagggugaaguuaacaaaaucaagagcgcccugcugaguacgaauaaagcuguggucucccucucuaacggggugagcguauuaacuuuuaagguucuggaccuuaagaauuacauugauaaacaauugcugccuauccuaaacaagcaguccuguucaauuccaaauaucgagaccgugauagaguuccagcagaaaaacaauaggcuccuggaaauuacacgggaguuuagugucaacgccggagugacuaccccggugagcacauauaugcuuaccaauucugaacuguugucccucaucaacgacaugcccauuacgaacgaucaaaagaaacugaugucaaauaacguccagaucguucgccagcagagcuacaguaucaugugcauuauaaaggaggaaguguuagcguauguagugcaacugccucucuacggcgucaucgacacuccauguuggaaacuucauacaucuccccugugcaccacuaauacaaaggagggcuccaacauuuguuugacccgaacggaucgugggugguacugcgacaaugcaggaagcgugucguucuuuccucaggccgaaaccuguaagguucagucuaacagaguguucugcgauacaaugaacucccuaacucugccaucagaggucaaucucugcaauguggacaucuuuaaccccaaauaugauuguaagauaaugaccaguaaaacagacguaagcuccucuguuauuacuagccugggugcuaucgugucaugcuacggcaagaccaaauguacagccaguaauaagaacagggggaucauuaagaccuucuccaauggaugcgauuaugucagcaacaaaggcguggacacugucucuguggguaauacgcuuuacuguguuaacaagcaagaggggcagucacuguaugugaaaggagaaccuaucauuaacuuuuacgacccauugguauucccgagugaugaguuugacgcaagcauaucccaggucaaugaaaagaucaaccagucucucgcuuucauucggaaaucggaugagcuguuacacaaugugaacgccggcaagagcacaaccaauaucaugaucacuaccauuauaaucguuauuaucgugauucugcuaucccucaucgcggucggccugcuuuuguauugcaaggcccgcugaggacuaguaauaaggaaacuguaugaaugucugugggcaggaagugaagagauccuucuguaaagguuuuuggaauuaugucugcugaauaauaaacuuuuuugaaauaauaaaucugguagaaaaaugagaucuaaaaaaaaaaaaaaaaaaaaaaaaaaaaaaaaaaaaaaaaaaaaaaaaaaaaaaaaaaaaaaaaugcaucccccccccccccccccccccccccccccccaaaggcucuuuucagagccaccagaauu

SEQ ID NO: 2298 - RNA, 1907 nt, Artificial Sequence
  mRNA product Design g-5 comprising derived and/or modified sequence from HRSV(A2)__F-del_DSCav1_mut1 (opt4)
gggagacccgugacccggaaguuguacggcuacgcgacuuucccucccacaaacccucgcgcccuuccuuuccuacuugggcccggcagaaagcuuaccauggagcugcugauccugaaggccaacgccaucaccaccauccugaccgccgugaccuucugcuucgccagcggccagaacaucaccgaggaguucuaccagagcaccugcagcgccgugagcaagggcuaccugggcgcccugagaaccggcugguacaccagcgugaucaccaucgagcugagcaacaucaaggagaacaagugcaacggcaccgacgccaaggugaagcugaucaagcaggagcuggacaaguacaagaacgccgugaccgagcugcagcugcugaugcagagcacccccgccaccggcagcggcagcgccaucugcagcggcguggccgugugcaaggugcugcaccuggagggcgaggugaacaagaucaagagcgcccugcugagcaccaacaaggccguggugagccugagcaacggcgugagcgugcugaccuucaaggugcuggaccugaagaacuacaucgacaagcagcugcugcccauccugaacaagcagagcugcagcauccccaacaucgagaccgugaucgaguuccagcagaagaacaacagacugcuggagaucaccagagaguucagcgugaacgccggcgugaccacccccgugagcaccuacaugcugaccaacagcgagcugcugagccugaucaacgacaugcccaucaccaacgaccagaagaagcugaugagcaacaacgugcagaucgugagacagcagagcuacagcaucaugugcaucaucaaggaggaggugcuggccuacguggugcagcugccccuguacggcgugaucgacacccccugcuggaagcugcacaccagcccccugugcaccaccaacaccaaggagggcagcaacaucugccugaccagaaccgacagaggcugguacugcgacaacgccggcagcgugagcuucuucccccaggccgagaccugcaaggugcagagcaacagaguguucugcgacaccaugaacagccugacccugcccagcgaggugaaccugugcaacguggacaucuucaaccccaaguacgacugcaagaucaugaccagcaagaccgacgugagcagcagcgugaucaccagccugggcgccaucgugagcugcuacggcaagaccaagugcaccgccagcaacaagaacagaggcaucaucaagaccuucagcaacggcugcgacuacgugagcaacaagggcguggacaccgugagcgugggcaacacccuguacugcgugaacaagcaggagggccagagccuguacgugaagggcgagcccaucaucaacuucuacgacccccugguguuccccagcgacgaguucgacgccagcaucagccaggugaacgagaagaucaaccagagccuggccuucaucagaaagagcgacgagcugcugcacaacgugaacgccggcaagagcaccaccaacaucaugaucaccaccaucaucaucgugaucaucgugauccugcugagccugaucgccgugggccugcugcuguacugcaaggccagaugaggacuaguaauaaggaaacuguaugaaugucugugggcaggaagugaagagauccuucuguaaagguuuuuggaauuaugucugcugaauaauaaacuuuuuugaaauaauaaaucugguagaaaaaugagaucuaaaaaaaaaaaaaaaaaaaaaaaaaaaaaaaaaaaaaaaaaaaaaaaaaaaaaaaaaaaaaaaaugcaucccccccccccccccccccccccccccccccaaaggcucuuuucagagccaccagaauu

SEQ ID NO: 2299 - RNA, 1907 nt, Artificial Sequence
  mRNA product Design g-5 comprising derived and/or modified sequence from HRSV(A2)__F-del_DSCav1_mut1 (opt5)
gggagacccgugacccggaaguuguacggcuacgcgacuuucccucccacaaacccucgcgcccuuccuuuccuacuugggcccggcagaaagcuuaccauggagcugcucauccugaaggccaacgcuauuaccacaauccuuacggccgugaccuucugcuuugcgagcggccagaauauuacagaagaguucuaccaauccaccuguucugcugucagcaaaggguaucugggagcccucagaacaggcugguacaccuccguuaucacaauugaacugucuaacaucaaggagaauaaaugcaacgggaccgacgccaaggugaaacuuaucaagcaggaacuggauaaguauaaaaaugcugugacggagcuccagcugcugaugcagagcacccccgccacaggauccggcucugcuauuuguagcggggucgccgugugcaagguucuccaccuggagggagaagugaacaaaaucaaguccgcgcuucugagcaccaauaaagccgucgugucucucuccaacggcguuagcgugcugacauuuaagguccuugaccugaagaauuacauugauaaacaacuccugccuauccugaacaagcagucuuguuccauuccgaauaucgagaccgugauugaguuccagcagaaaaacaaucggcuccuggaaaucacgcgcgaguuuagcgugaacgcuggcgucacaacccccguuucuacauauaugcuuaccaauuccgaacugcucagccugaucaacgacaugccuauuaccaacgaucaaaagaaacuuauguccaauaacgugcagaucgugagacagcagucuuacagcauuaugugcaucauuaaggaggaaguccuggccuaugugguucaacucccccuguacggggugaucgacacaccuuguuggaaacugcauacgagcccccucugcaccacaaauaccaaggagggauccaacaucugucugacacggaccgaucgcggcugguacugcgacaaugcugggucugucuccuucuuuccucaggccgaaacguguaaggugcagagcaacagaguuuucugcgauacaaugaacucucuuacccugccgagcgaggugaaucucugcaaugucgacauuuuuaaccccaaauaugauuguaagaucaugaccuccaaaacagacgugucuagcuccgucauuaccagccugggagcgaucgugucuugcuacggcaagacaaaauguacggccuccaauaagaaccgggggauuaucaagaccuucagcaauggaugcgauuauguuucuaacaaaggcguggacacagucuccgugggcaauacccuuuacuguguuaacaagcaagaggggcagagccuguaugugaaaggagaaccuaucauuaacuuuuacgacccccucgucuucccuuccgaugaguuugacgcuucuaucagccaggugaaugaaaagauuaaccagucccuggccuucauccgcaaaucugaugagcugcuccacaaugugaacgcuggcaagagcacaaccaauauuaugaucacgaccauuaucaucguuauuaucgucauucugcuuucccugaucgccguggggcuccugcuguauugcaaggccagaugaggacuaguaauaaggaaacuguaugaaugucugugggcaggaagugaagagauccuucuguaaagguuuuuggaauuaugucugcugaauaauaaacuuuuuugaaauaauaaaucugguagaaaaaugagaucuaaaaaaaaaaaaaaaaaaaaaaaaaaaaaaaaaaaaaaaaaaaaaaaaaaaaaaaaaaaaaaaaugcaucccccccccccccccccccccccccccccccaaaggcucuuuucagagccaccagaauu

SEQ ID NO: 2300 - RNA, 1907 nt, Artificial Sequence
  mRNA product Design g-5 comprising derived and/or modified sequence from HRSV(A2)__F-del_DSCav1_mut1 (opt6)
gggagacccgugacccggaaguuguacggcuacgcgacuuucccucccacaaacccucgcgcccuuccuuuccuacuugggcccggcagaaagcuuaccauggaacuacucaucuuaaaagcaaacgcaauaacaacuauucuaaccgcaguaacauuuuguuucgcaucaggacaaaacauaaccgaagaauuuuaccaaucaacauguuccgcaguuucaaaaggauacuuaggcgcacuaagaacaggcugguacaccuccgugauaacaauagaauuaucaaacauaaaagaaaacaaauguaauggaacugacgccaaaguaaaacuaauaaaacaagaacuagacaaauauaaaaacgcaguaacugaacuacaauuacuaaugcaauccaccccagcaacaggcucaggcucagcaauuugcuccggagucgcugucugcaaaguacuacaucuugaaggcgaagucaauaaaauaaaaucagcacuucuaucaacaaacaaagcaguagucucacuaucaaacggaguaucaguacuaacauuuaaaguauuagaucuaaaaaacuauauagauaaacaacuacuacccauacucaauaaacaauccuguucaauaccaaauauagaaaccguaauagaauuucaacaaaaaaacaaucgacuauuagaaaucacccgagaauuuucagucaaugcaggcguaacaacaccaguaucaaccuacauguuaaccaacuccgaacuacuaucccucauaaacgacaugccaauaacaaacgaucaaaaaaaacuaauguccaacaacguacaaauagucagacaacaaucuuauucaauaaugugcaucauaaaagaagaaguucuagccuacguaguucaacuuccauuauacggcguaauugauacaccaugcuggaaacuacacacauccccacuauguacaacaaacacaaaagaaggaucaaacaucugcuuaacuagaacagacagaggaugguacugcgacaacgcaggaucagucucauucuuuccacaagcagaaacaugcaagguccaaucaaacagaguauucugcgacacaaugaacuccuuaacacuaccaucugaaguaaaccuauguaauguagacauauuuaacccaaaauacgacugcaaaauaaugaccucaaaaacagacguauccucaucaguaauuacaagccucggagccauaguaucaugcuacggaaaaacaaaauguacagcaucaaacaaaaacagaggaauaauaaaaacguucuccaacggaugcgacuauguaucaaacaaaggcguagacacaguaucagucggaaauacccuuuacugcguaaacaaacaagaaggccaaagucuauacguaaaaggagagccaauaauaaacuuuuaugacccccuuguauucccaucugacgaauuugaugcaucaauaucccaagucaacgaaaaaaucaaccaaucauuagccuuuauuagaaaaagugacgaacuauuacacaacguuaaugcagggaaaucaacaacaaauauaaugauuacaaccauaauuauaguuaucauaguuauacuacucucacuaaucgcaguaggauuacuauuauacugcaaagcaagauaaggacuaguaauaaggaaacuguaugaaugucugugggcaggaagugaagagauccuucuguaaagguuuuuggaauuaugucugcugaauaauaaacuuuuuugaaauaauaaaucugguagaaaaaugagaucuaaaaaaaaaaaaaaaaaaaaaaaaaaaaaaaaaaaaaaaaaaaaaaaaaaaaaaaaaaaaaaaaugcaucccccccccccccccccccccccccccccccaaaggcucuuuucagagccaccagaauu

SEQ ID NO: 2301 - RNA, 1907 nt, Artificial Sequence
  mRNA product Design g-5 comprising derived and/or modified sequence from HRSV(A2)__F-del_DSCav1_mut1 (opt11)
gggagacccgugacccggaaguuguacggcuacgcgacuuucccucccacaaacccucgcgcccuuccuuuccuacuugggcccggcagaaagcuuaccauggaacuacucauccuaaaagccaacgcaaucacaaccauacuuacagcuguuaccuucugcuucgcauccggccaaaauaucaccgaagaguucuaccaaucaaccugcuccgccgucagcaaaggauaccucggcgcccuccgaaccggaugguacacuucugucaucacaaucgaacucuccaacaucaaagaaaacaaaugcaacgguaccgacgcgaaagucaaacucaucaaacaagaacuagacaaguacaaaaacgccgucaccgaacugcaacuccucaugcaauccacaccagcaacgggaucaggauccgccaucugcucaggcgucgccgucugcaaaguccugcaccuagaaggagaaguaaacaaaauuaaauccgcccuacucuccaccaacaaagcagucgucucacuauccaacggcgucuccguccucaccuuuaagguccucgaccucaaaaauuauauagacaaacaacuccuccccauccuaaacaaacaaucaugcuccauccccaacauagaaaccgucaucgaauuucaacagaaaaacaaccgacucuuagaaauuacccgcgaguucagcgucaacgccggagucaccacacccgucucaaccuacaugcucaccaacucagaacuccucucacuaaucaaugauaugcccaucacaaacgaccaaaagaaacucauguccaacaacguacaaaucguucgccaacaaagcuacuccaucauguguaucauuaaagaagaaguccucgccuacgucguccaacuuccgcucuacggcguaaucgacacccccugcuggaaacuucacaccucgccccucugcaccacaaacaccaaagaaggcuccaacaucugccuaacccgcaccgaccgcggcugguacugcgacaacgccggcuccgucucauuuuucccccaggcggagaccugcaaaguccaauccaaccgcgucuucugcgacaccaugaacucucuuacccucccaucagaaguaaaccucugcaacgucgacaucuuuaaccccaaauacgauugcaagauaaugaccuccaaaacagacgucucaucguccgucaucaccucccuaggagcuaucgucuccugcuacggcaagaccaaaugcaccgcuuccaacaaaaaccgcggcaucaucaaaaccuucuccaacgggugcgacuacgucucuaacaaaggcguggacacaguauccguaggaaacacacuguacugcguaaacaaacaagagggccaaucgcuuuacgucaaaggcgagccaauuaucaacuucuacgacccgcucgucuucccaucagacgaguucgacgcauccaucucccaagucaacgagaaaaucaaucagucccucgccuucauacgcaaauccgacgaacuccuacauaacguaaacgccggcaaaucuaccacaaacaucaugaucacaaccaucaucaucguaaucaucgucauccuucucucgcucaucgccguaggacugcuacuuuacugcaaggcccgcuaaggacuaguaauaaggaaacuguaugaaugucugugggcaggaagugaagagauccuucuguaaagguuuuuggaauuaugucugcugaauaauaaacuuuuuugaaauaauaaaucugguagaaaaaugagaucuaaaaaaaaaaaaaaaaaaaaaaaaaaaaaaaaaaaaaaaaaaaaaaaaaaaaaaaaaaaaaaaaugcaucccccccccccccccccccccccccccccccaaaggcucuuuucagagccaccagaauu

SEQ ID NO: 2302 - RNA, 1923 nt, Artificial Sequence
  mRNA product Design h-1 comprising derived and/or modified sequence from HRSV(A2)__F-del_DSCav1_mut1 (opt1)
gggagacccgugacccggaaguuguacggcuacgcgacuuucccucccacaaacccucgcgcccuuccuuuccuacuugggcccggcagaaagcuuaccauggagcugcucauccugaaggccaacgccaucaccaccauccugacggcggugaccuucugcuucgccagcggccagaacaucaccgaggaguucuaccaguccacgugcagcgccgucuccaagggguaccucggcgcccugcggaccggcugguacaccuccgugaucaccaucgagcugagcaacaucaaggagaacaagugcaacgggaccgacgccaaggugaagcucaucaagcaggagcuggacaaguacaagaacgcggucacggagcugcagcuccugaugcaguccaccccggcaaccggcuccggcuccgccaucugcagcggcgucgccgugugcaaggugcugcaccucgagggggaggucaacaagaucaagagcgcccugcuguccaccaacaaggccguggugagccucuccaacggcgucagcgugcugaccuucaaggugcuggaccucaagaacuacaucgacaagcagcugcugcccauccugaacaagcagagcugcuccauccccaacaucgagacggugaucgaguuccagcagaagaacaaccggcuccuggagaucacccgcgaguucagcgugaacgccggggucaccacccccguguccacguacaugcugaccaacagcgagcuccugucccugaucaacgacaugccgaucaccaacgaccagaagaagcucaugagcaacaacgugcagaucguccggcagcaguccuacagcaucaugugcaucaucaaggaggaggugcuggcguacgugguccagcugccccucuacggcgugaucgacacccccugcuggaagcugcacacgagcccccugugcaccaccaacaccaaggagggguccaacaucugccucacgcgcaccgaccggggcugguacugcgacaacgccggcagcgucuccuucuucccgcaggccgagaccugcaaggugcagagcaaccgcguguucugcgacaccaugaacucccugacgcugcccagcgagguaaaccucugcaacgucgacaucuucaaccccaaguacgacugcaagaucaugaccuccaagaccgacgugagcuccagcgugaucaccucccugggggccaucgucagcugcuacggcaagacgaagugcaccgccagcaacaagaaccgggggaucaucaagaccuucuccaacggcugcgacuacgugagcaacaagggcguggacaccguguccgucgggaacacccuguacugcgugaacaagcaggagggccagagccucuacgugaagggggagcccaucaucaacuucuacgacccgcuggucuuccccuccgacgaguucgacgcgagcaucucccaggugaacgagaagaucaaccagagccuggccuucauccgcaaguccgacgagcugcuccacaacgugaacgccggcaagagcacgaccaacaucaugaucaccaccaucaucaucgucaucaucgugauccugcugucccucaucgccguggggcugcugcucuacugcaaggcccggugaggacuaguacuggcugcaucucccuuuccucuguccuccauccuucucccaggauggugaagggggaccugguacccagugauccccaccccaggauccuaaaucaugacuuaccugcuaauaaaaacucauuggaaaagugagaagaucuaaaaaaaaaaaaaaaaaaaaaaaaaaaaaaaaaaaaaaaaaaaaaaaaaaaaaaaaaaaaaaaaugcaucccccccccccccccccccccccccccccccaaaggcucuuuucagagccaccagaauu

SEQ ID NO: 2303 - RNA, 1923 nt, Artificial Sequence
  mRNA product Design h-1 comprising derived and/or modified sequence from HRSV(A2)__F-del_DSCav1_mut1 (opt1)
gggagacccgugacccggaaguuguacggcuacgcgacuuucccucccacaaacccucgcgcccuuccuuuccuacuugggcccggcagaaagcuuaccauggagcugcucauccugaaggccaacgccaucaccaccauccugacggcggugaccuucugcuucgccagcggccagaacaucaccgaggaguucuaccaguccacgugcagcgccgucuccaagggguaccucggcgcccugcgcaccgggugguacaccagcgugaucaccaucgagcuguccaacaucaaggagaacaagugcaacggcaccgacgccaaggugaagcucaucaagcaggagcuggacaaguacaagaacgcggucacggagcugcagcuccugaugcagagcacccccgccaccggguccggcagcgccaucugcuccggcguggccgugugcaagguccugcaccucgagggggaggugaacaagaucaagagcgcgcugcuguccaccaacaaggccguggucagccucuccaacggcgugagcgugcugacguucaagguccuggaccucaagaacuacaucgacaagcagcugcugccgauccucaacaagcaguccugcagcauccccaacaucgagaccgugaucgaguuccagcagaagaacaaccggcugcuggagaucacccgcgaguucuccgugaacgccggggucaccacgcccgugagcaccuacaugcucaccaacuccgagcugcugagccucaucaacgacaugcccaucaccaacgaccagaagaagcugaugagcaacaacgugcagaucguccggcagcaguccuacagcaucaugugcaucaucaaggaggaggugcuggccuacgugguccagcucccgcuguacggcgugaucgacacgcccugcuggaagcugcacaccagcccccucugcaccaccaacacgaaggagggguccaacaucugccugacccgcaccgaccggggcugguacugcgacaacgccggcuccgugagcuucuucccccaggcggagaccugcaagguccaguccaaccgcguguucugcgacacgaugaacagccugacccucccguccgaggucaaccugugcaacguggacaucuucaaccccaaguacgacugcaagaucaugaccagcaagaccgacguguccagcuccgucaucacgagccugggggccaucguguccugcuacggcaagaccaagugcaccgccagcaacaagaaccgggggaucaucaagaccuucuccaacggcugcgacuacgugagcaacaagggcgucgacacgguguccguggggaacacccucuacugcgucaacaagcaggagggccagagccuguacgugaagggggagcccaucaucaacuucuacgacccccugguguucccgagcgacgaguucgacgccuccaucagccaggucaacgagaagaucaaccagucccucgccuucauccgcaagagcgacgagcugcugcacaacgugaacgcgggcaaguccaccaccaacaucaugaucaccacgaucaucaucgugaucaucgucauccuccugagccugaucgccguggggcuccugcuguacugcaaggcccggugaggacuaguacuggcugcaucucccuuuccucuguccuccauccuucucccaggauggugaagggggaccugguacccagugauccccaccccaggauccuaaaucaugacuuaccugcuaauaaaaacucauuggaaaagugagaagaucuaaaaaaaaaaaaaaaaaaaaaaaaaaaaaaaaaaaaaaaaaaaaaaaaaaaaaaaaaaaaaaaaugcaucccccccccccccccccccccccccccccccaaaggcucuuuucagagccaccagaauu

SEQ ID NO: 2304 - RNA, 1923 nt, Artificial Sequence
  mRNA product Design h-1 comprising derived and/or modified sequence from HRSV(A2)__F-del_DSCav1_mut1 (opt2)
gggagacccgugacccggaaguuguacggcuacgcgacuuucccucccacaaacccucgcgcccuuccuuuccuacuugggcccggcagaaagcuuaccauggagcuccucauccucaaggccaacgccaucaccaccauccucaccgccgucaccuucugcuucgccuccggccagaacaucaccgaggaguucuaccaguccaccugcuccgccgucuccaagggcuaccucggcgcccuccgcaccggcugguacaccuccgucaucaccaucgagcucuccaacaucaaggagaacaagugcaacggcaccgacgccaaggucaagcucaucaagcaggagcucgacaaguacaagaacgccgucaccgagcuccagcuccucaugcaguccacccccgccaccggcuccggcuccgccaucugcuccggcgucgccgucugcaagguccuccaccucgagggcgaggucaacaagaucaaguccgcccuccucuccaccaacaaggccgucgucucccucuccaacggcgucuccguccucaccuucaagguccucgaccucaagaacuacaucgacaagcagcuccuccccauccucaacaagcaguccugcuccauccccaacaucgagaccgucaucgaguuccagcagaagaacaaccgccuccucgagaucacccgcgaguucuccgucaacgccggcgucaccacccccgucuccaccuacaugcucaccaacuccgagcuccucucccucaucaacgacaugcccaucaccaacgaccagaagaagcucauguccaacaacguccagaucguccgccagcaguccuacuccaucaugugcaucaucaaggaggagguccucgccuacgucguccagcucccccucuacggcgucaucgacacccccugcuggaagcuccacaccuccccccucugcaccaccaacaccaaggagggcuccaacaucugccucacccgcaccgaccgcggcugguacugcgacaacgccggcuccgucuccuucuucccccaggccgagaccugcaagguccaguccaaccgcgucuucugcgacaccaugaacucccucacccuccccuccgaggucaaccucugcaacgucgacaucuucaaccccaaguacgacugcaagaucaugaccuccaagaccgacgucuccuccuccgucaucaccucccucggcgccaucgucuccugcuacggcaagaccaagugcaccgccuccaacaagaaccgcggcaucaucaagaccuucuccaacggcugcgacuacgucuccaacaagggcgucgacaccgucuccgucggcaacacccucuacugcgucaacaagcaggagggccagucccucuacgucaagggcgagcccaucaucaacuucuacgacccccucgucuuccccuccgacgaguucgacgccuccaucucccaggucaacgagaagaucaaccagucccucgccuucauccgcaaguccgacgagcuccuccacaacgucaacgccggcaaguccaccaccaacaucaugaucaccaccaucaucaucgucaucaucgucauccuccucucccucaucgccgucggccuccuccucuacugcaaggcccgcugaggacuaguacuggcugcaucucccuuuccucuguccuccauccuucucccaggauggugaagggggaccugguacccagugauccccaccccaggauccuaaaucaugacuuaccugcuaauaaaaacucauuggaaaagugagaagaucuaaaaaaaaaaaaaaaaaaaaaaaaaaaaaaaaaaaaaaaaaaaaaaaaaaaaaaaaaaaaaaaaugcaucccccccccccccccccccccccccccccccaaaggcucuuuucagagccaccagaauu

SEQ ID NO: 2305 - RNA, 1923 nt, Artificial Sequence
  mRNA product Design h-1 comprising derived and/or modified sequence from HRSV(A2)__F-del_DSCav1_mut1 (opt3)
gggagacccgugacccggaaguuguacggcuacgcgacuuucccucccacaaacccucgcgcccuuccuuuccuacuugggcccggcagaaagcuuaccauggagcugcucauccuuaaggccaacgcuauuaccacaauacugacugcagugacguucugcuuugccagcggccagaauaucaccgaagaguucuaccaauccacauguucugcggucucaaaaggguauuugggagcuuuaagaacugguugguacaccaguguuauuacaaucgaacugagcaacauuaaggagaauaaaugcaacggcaccgacgccaaggugaaacuaaucaagcaggaacucgauaaguauaaaaaugcaguaacugagcugcagcuucugaugcaguccacacccgccaccgggucuggaucggcuauauguucaggcguggcagucugcaagguguugcaccucgagggugaaguuaacaaaaucaagagcgcccugcugaguacgaauaaagcuguggucucccucucuaacggggugagcguauuaacuuuuaagguucuggaccuuaagaauuacauugauaaacaauugcugccuauccuaaacaagcaguccuguucaauuccaaauaucgagaccgugauagaguuccagcagaaaaacaauaggcuccuggaaauuacacgggaguuuagugucaacgccggagugacuaccccggugagcacauauaugcuuaccaauucugaacuguugucccucaucaacgacaugcccauuacgaacgaucaaaagaaacugaugucaaauaacguccagaucguucgccagcagagcuacaguaucaugugcauuauaaaggaggaaguguuagcguauguagugcaacugccucucuacggcgucaucgacacuccauguuggaaacuucauacaucuccccugugcaccacuaauacaaaggagggcuccaacauuuguuugacccgaacggaucgugggugguacugcgacaaugcaggaagcgugucguucuuuccucaggccgaaaccuguaagguucagucuaacagaguguucugcgauacaaugaacucccuaacucugccaucagaggucaaucucugcaauguggacaucuuuaaccccaaauaugauuguaagauaaugaccaguaaaacagacguaagcuccucuguuauuacuagccugggugcuaucgugucaugcuacggcaagaccaaauguacagccaguaauaagaacagggggaucauuaagaccuucuccaauggaugcgauuaugucagcaacaaaggcguggacacugucucuguggguaauacgcuuuacuguguuaacaagcaagaggggcagucacuguaugugaaaggagaaccuaucauuaacuuuuacgacccauugguauucccgagugaugaguuugacgcaagcauaucccaggucaaugaaaagaucaaccagucucucgcuuucauucggaaaucggaugagcuguuacacaaugugaacgccggcaagagcacaaccaauaucaugaucacuaccauuauaaucguuauuaucgugauucugcuaucccucaucgcggucggccugcuuuuguauugcaaggcccgcugaggacuaguacuggcugcaucucccuuuccucuguccuccauccuucucccaggauggugaagggggaccugguacccagugauccccaccccaggauccuaaaucaugacuuaccugcuaauaaaaacucauuggaaaagugagaagaucuaaaaaaaaaaaaaaaaaaaaaaaaaaaaaaaaaaaaaaaaaaaaaaaaaaaaaaaaaaaaaaaaugcaucccccccccccccccccccccccccccccccaaaggcucuuuucagagccaccagaauu

SEQ ID NO: 2306 - RNA, 1923 nt, Artificial Sequence
  mRNA product Design h-1 comprising derived and/or modified sequence from HRSV(A2)__F-del_DSCav1_mut1 (opt4)
gggagacccgugacccggaaguuguacggcuacgcgacuuucccucccacaaacccucgcgcccuuccuuuccuacuugggcccggcagaaagcuuaccauggagcugcugauccugaaggccaacgccaucaccaccauccugaccgccgugaccuucugcuucgccagcggccagaacaucaccgaggaguucuaccagagcaccugcagcgccgugagcaagggcuaccugggcgcccugagaaccggcugguacaccagcgugaucaccaucgagcugagcaacaucaaggagaacaagugcaacggcaccgacgccaaggugaagcugaucaagcaggagcuggacaaguacaagaacgccgugaccgagcugcagcugcugaugcagagcacccccgccaccggcagcggcagcgccaucugcagcggcguggccgugugcaaggugcugcaccuggagggcgaggugaacaagaucaagagcgcccugcugagcaccaacaaggccguggugagccugagcaacggcgugagcgugcugaccuucaaggugcuggaccugaagaacuacaucgacaagcagcugcugcccauccugaacaagcagagcugcagcauccccaacaucgagaccgugaucgaguuccagcagaagaacaacagacugcuggagaucaccagagaguucagcgugaacgccggcgugaccacccccgugagcaccuacaugcugaccaacagcgagcugcugagccugaucaacgacaugcccaucaccaacgaccagaagaagcugaugagcaacaacgugcagaucgugagacagcagagcuacagcaucaugugcaucaucaaggaggaggugcuggccuacguggugcagcugccccuguacggcgugaucgacacccccugcuggaagcugcacaccagcccccugugcaccaccaacaccaaggagggcagcaacaucugccugaccagaaccgacagaggcugguacugcgacaacgccggcagcgugagcuucuucccccaggccgagaccugcaaggugcagagcaacagaguguucugcgacaccaugaacagccugacccugcccagcgaggugaaccugugcaacguggacaucuucaaccccaaguacgacugcaagaucaugaccagcaagaccgacgugagcagcagcgugaucaccagccugggcgccaucgugagcugcuacggcaagaccaagugcaccgccagcaacaagaacagaggcaucaucaagaccuucagcaacggcugcgacuacgugagcaacaagggcguggacaccgugagcgugggcaacacccuguacugcgugaacaagcaggagggccagagccuguacgugaagggcgagcccaucaucaacuucuacgacccccugguguuccccagcgacgaguucgacgccagcaucagccaggugaacgagaagaucaaccagagccuggccuucaucagaaagagcgacgagcugcugcacaacgugaacgccggcaagagcaccaccaacaucaugaucaccaccaucaucaucgugaucaucgugauccugcugagccugaucgccgugggccugcugcuguacugcaaggccagaugaggacuaguacuggcugcaucucccuuuccucuguccuccauccuucucccaggauggugaagggggaccugguacccagugauccccaccccaggauccuaaaucaugacuuaccugcuaauaaaaacucauuggaaaagugagaagaucuaaaaaaaaaaaaaaaaaaaaaaaaaaaaaaaaaaaaaaaaaaaaaaaaaaaaaaaaaaaaaaaaugcaucccccccccccccccccccccccccccccccaaaggcucuuuucagagccaccagaauu

SEQ ID NO: 2307 - RNA, 1923 nt, Artificial Sequence
  mRNA product Design h-1 comprising derived and/or modified sequence from HRSV(A2)__F-del_DSCav1_mut1 (opt5)
gggagacccgugacccggaaguuguacggcuacgcgacuuucccucccacaaacccucgcgcccuuccuuuccuacuugggcccggcagaaagcuuaccauggagcugcucauccugaaggccaacgcuauuaccacaauccuuacggccgugaccuucugcuuugcgagcggccagaauauuacagaagaguucuaccaauccaccuguucugcugucagcaaaggguaucugggagcccucagaacaggcugguacaccuccguuaucacaauugaacugucuaacaucaaggagaauaaaugcaacgggaccgacgccaaggugaaacuuaucaagcaggaacuggauaaguauaaaaaugcugugacggagcuccagcugcugaugcagagcacccccgccacaggauccggcucugcuauuuguagcggggucgccgugugcaagguucuccaccuggagggagaagugaacaaaaucaaguccgcgcuucugagcaccaauaaagccgucgugucucucuccaacggcguuagcgugcugacauuuaagguccuugaccugaagaauuacauugauaaacaacuccugccuauccugaacaagcagucuuguuccauuccgaauaucgagaccgugauugaguuccagcagaaaaacaaucggcuccuggaaaucacgcgcgaguuuagcgugaacgcuggcgucacaacccccguuucuacauauaugcuuaccaauuccgaacugcucagccugaucaacgacaugccuauuaccaacgaucaaaagaaacuuauguccaauaacgugcagaucgugagacagcagucuuacagcauuaugugcaucauuaaggaggaaguccuggccuaugugguucaacucccccuguacggggugaucgacacaccuuguuggaaacugcauacgagcccccucugcaccacaaauaccaaggagggauccaacaucugucugacacggaccgaucgcggcugguacugcgacaaugcugggucugucuccuucuuuccucaggccgaaacguguaaggugcagagcaacagaguuuucugcgauacaaugaacucucuuacccugccgagcgaggugaaucucugcaaugucgacauuuuuaaccccaaauaugauuguaagaucaugaccuccaaaacagacgugucuagcuccgucauuaccagccugggagcgaucgugucuugcuacggcaagacaaaauguacggccuccaauaagaaccgggggauuaucaagaccuucagcaauggaugcgauuauguuucuaacaaaggcguggacacagucuccgugggcaauacccuuuacuguguuaacaagcaagaggggcagagccuguaugugaaaggagaaccuaucauuaacuuuuacgacccccucgucuucccuuccgaugaguuugacgcuucuaucagccaggugaaugaaaagauuaaccagucccuggccuucauccgcaaaucugaugagcugcuccacaaugugaacgcuggcaagagcacaaccaauauuaugaucacgaccauuaucaucguuauuaucgucauucugcuuucccugaucgccguggggcuccugcuguauugcaaggccagaugaggacuaguacuggcugcaucucccuuuccucuguccuccauccuucucccaggauggugaagggggaccugguacccagugauccccaccccaggauccuaaaucaugacuuaccugcuaauaaaaacucauuggaaaagugagaagaucuaaaaaaaaaaaaaaaaaaaaaaaaaaaaaaaaaaaaaaaaaaaaaaaaaaaaaaaaaaaaaaaaugcaucccccccccccccccccccccccccccccccaaaggcucuuuucagagccaccagaauu

SEQ ID NO: 2308 - RNA, 1923 nt, Artificial Sequence
  mRNA product Design h-1 comprising derived and/or modified sequence from HRSV(A2)__F-del_DSCav1_mut1 (opt6)
gggagacccgugacccggaaguuguacggcuacgcgacuuucccucccacaaacccucgcgcccuuccuuuccuacuugggcccggcagaaagcuuaccauggaacuacucaucuuaaaagcaaacgcaauaacaacuauucuaaccgcaguaacauuuuguuucgcaucaggacaaaacauaaccgaagaauuuuaccaaucaacauguuccgcaguuucaaaaggauacuuaggcgcacuaagaacaggcugguacaccuccgugauaacaauagaauuaucaaacauaaaagaaaacaaauguaauggaacugacgccaaaguaaaacuaauaaaacaagaacuagacaaauauaaaaacgcaguaacugaacuacaauuacuaaugcaauccaccccagcaacaggcucaggcucagcaauuugcuccggagucgcugucugcaaaguacuacaucuugaaggcgaagucaauaaaauaaaaucagcacuucuaucaacaaacaaagcaguagucucacuaucaaacggaguaucaguacuaacauuuaaaguauuagaucuaaaaaacuauauagauaaacaacuacuacccauacucaauaaacaauccuguucaauaccaaauauagaaaccguaauagaauuucaacaaaaaaacaaucgacuauuagaaaucacccgagaauuuucagucaaugcaggcguaacaacaccaguaucaaccuacauguuaaccaacuccgaacuacuaucccucauaaacgacaugccaauaacaaacgaucaaaaaaaacuaauguccaacaacguacaaauagucagacaacaaucuuauucaauaaugugcaucauaaaagaagaaguucuagccuacguaguucaacuuccauuauacggcguaauugauacaccaugcuggaaacuacacacauccccacuauguacaacaaacacaaaagaaggaucaaacaucugcuuaacuagaacagacagaggaugguacugcgacaacgcaggaucagucucauucuuuccacaagcagaaacaugcaagguccaaucaaacagaguauucugcgacacaaugaacuccuuaacacuaccaucugaaguaaaccuauguaauguagacauauuuaacccaaaauacgacugcaaaauaaugaccucaaaaacagacguauccucaucaguaauuacaagccucggagccauaguaucaugcuacggaaaaacaaaauguacagcaucaaacaaaaacagaggaauaauaaaaacguucuccaacggaugcgacuauguaucaaacaaaggcguagacacaguaucagucggaaauacccuuuacugcguaaacaaacaagaaggccaaagucuauacguaaaaggagagccaauaauaaacuuuuaugacccccuuguauucccaucugacgaauuugaugcaucaauaucccaagucaacgaaaaaaucaaccaaucauuagccuuuauuagaaaaagugacgaacuauuacacaacguuaaugcagggaaaucaacaacaaauauaaugauuacaaccauaauuauaguuaucauaguuauacuacucucacuaaucgcaguaggauuacuauuauacugcaaagcaagauaaggacuaguacuggcugcaucucccuuuccucuguccuccauccuucucccaggauggugaagggggaccugguacccagugauccccaccccaggauccuaaaucaugacuuaccugcuaauaaaaacucauuggaaaagugagaagaucuaaaaaaaaaaaaaaaaaaaaaaaaaaaaaaaaaaaaaaaaaaaaaaaaaaaaaaaaaaaaaaaaugcaucccccccccccccccccccccccccccccccaaaggcucuuuucagagccaccagaauu

SEQ ID NO: 2309 - RNA, 1923 nt, Artificial Sequence
  mRNA product Design h-1 comprising derived and/or modified sequence from HRSV(A2)__F-del_DSCav1_mut1 (opt11)
gggagacccgugacccggaaguuguacggcuacgcgacuuucccucccacaaacccucgcgcccuuccuuuccuacuugggcccggcagaaagcuuaccauggaacuacucauccuaaaagccaacgcaaucacaaccauacuuacagcuguuaccuucugcuucgcauccggccaaaauaucaccgaagaguucuaccaaucaaccugcuccgccgucagcaaaggauaccucggcgcccuccgaaccggaugguacacuucugucaucacaaucgaacucuccaacaucaaagaaaacaaaugcaacgguaccgacgcgaaagucaaacucaucaaacaagaacuagacaaguacaaaaacgccgucaccgaacugcaacuccucaugcaauccacaccagcaacgggaucaggauccgccaucugcucaggcgucgccgucugcaaaguccugcaccuagaaggagaaguaaacaaaauuaaauccgcccuacucuccaccaacaaagcagucgucucacuauccaacggcgucuccguccucaccuuuaagguccucgaccucaaaaauuauauagacaaacaacuccuccccauccuaaacaaacaaucaugcuccauccccaacauagaaaccgucaucgaauuucaacagaaaaacaaccgacucuuagaaauuacccgcgaguucagcgucaacgccggagucaccacacccgucucaaccuacaugcucaccaacucagaacuccucucacuaaucaaugauaugcccaucacaaacgaccaaaagaaacucauguccaacaacguacaaaucguucgccaacaaagcuacuccaucauguguaucauuaaagaagaaguccucgccuacgucguccaacuuccgcucuacggcguaaucgacacccccugcuggaaacuucacaccucgccccucugcaccacaaacaccaaagaaggcuccaacaucugccuaacccgcaccgaccgcggcugguacugcgacaacgccggcuccgucucauuuuucccccaggcggagaccugcaaaguccaauccaaccgcgucuucugcgacaccaugaacucucuuacccucccaucagaaguaaaccucugcaacgucgacaucuuuaaccccaaauacgauugcaagauaaugaccuccaaaacagacgucucaucguccgucaucaccucccuaggagcuaucgucuccugcuacggcaagaccaaaugcaccgcuuccaacaaaaaccgcggcaucaucaaaaccuucuccaacgggugcgacuacgucucuaacaaaggcguggacacaguauccguaggaaacacacuguacugcguaaacaaacaagagggccaaucgcuuuacgucaaaggcgagccaauuaucaacuucuacgacccgcucgucuucccaucagacgaguucgacgcauccaucucccaagucaacgagaaaaucaaucagucccucgccuucauacgcaaauccgacgaacuccuacauaacguaaacgccggcaaaucuaccacaaacaucaugaucacaaccaucaucaucguaaucaucgucauccuucucucgcucaucgccguaggacugcuacuuuacugcaaggcccgcuaaggacuaguacuggcugcaucucccuuuccucuguccuccauccuucucccaggauggugaagggggaccugguacccagugauccccaccccaggauccuaaaucaugacuuaccugcuaauaaaaacucauuggaaaagugagaagaucuaaaaaaaaaaaaaaaaaaaaaaaaaaaaaaaaaaaaaaaaaaaaaaaaaaaaaaaaaaaaaaaaugcaucccccccccccccccccccccccccccccccaaaggcucuuuucagagccaccagaauu

SEQ ID NO: 2310 - RNA, 2139 nt, Artificial Sequence
  mRNA product Design h-2 comprising derived and/or modified sequence from HRSV(A2)__F-del_DSCav1_mut1 (opt1)
gggagacccgugacccggaaguuguacggcuacgcgacuuucccucccacaaacccucgcgcccuuccuuuccuacuugggcccggcagaaagcuuaccauggagcugcucauccugaaggccaacgccaucaccaccauccugacggcggugaccuucugcuucgccagcggccagaacaucaccgaggaguucuaccaguccacgugcagcgccgucuccaagggguaccucggcgcccugcggaccggcugguacaccuccgugaucaccaucgagcugagcaacaucaaggagaacaagugcaacgggaccgacgccaaggugaagcucaucaagcaggagcuggacaaguacaagaacgcggucacggagcugcagcuccugaugcaguccaccccggcaaccggcuccggcuccgccaucugcagcggcgucgccgugugcaaggugcugcaccucgagggggaggucaacaagaucaagagcgcccugcuguccaccaacaaggccguggugagccucuccaacggcgucagcgugcugaccuucaaggugcuggaccucaagaacuacaucgacaagcagcugcugcccauccugaacaagcagagcugcuccauccccaacaucgagacggugaucgaguuccagcagaagaacaaccggcuccuggagaucacccgcgaguucagcgugaacgccggggucaccacccccguguccacguacaugcugaccaacagcgagcuccugucccugaucaacgacaugccgaucaccaacgaccagaagaagcucaugagcaacaacgugcagaucguccggcagcaguccuacagcaucaugugcaucaucaaggaggaggugcuggcguacgugguccagcugccccucuacggcgugaucgacacccccugcuggaagcugcacacgagcccccugugcaccaccaacaccaaggagggguccaacaucugccucacgcgcaccgaccggggcugguacugcgacaacgccggcagcgucuccuucuucccgcaggccgagaccugcaaggugcagagcaaccgcguguucugcgacaccaugaacucccugacgcugcccagcgagguaaaccucugcaacgucgacaucuucaaccccaaguacgacugcaagaucaugaccuccaagaccgacgugagcuccagcgugaucaccucccugggggccaucgucagcugcuacggcaagacgaagugcaccgccagcaacaagaaccgggggaucaucaagaccuucuccaacggcugcgacuacgugagcaacaagggcguggacaccguguccgucgggaacacccuguacugcgugaacaagcaggagggccagagccucuacgugaagggggagcccaucaucaacuucuacgacccgcuggucuuccccuccgacgaguucgacgcgagcaucucccaggugaacgagaagaucaaccagagccuggccuucauccgcaaguccgacgagcugcuccacaacgugaacgccggcaagagcacgaccaacaucaugaucaccaccaucaucaucgucaucaucgugauccugcugucccucaucgccguggggcugcugcucuacugcaaggcccggugaggacuagugaagggaacacccaaauuuaauucagccuuaagcacaauuaauuaagagugaaacguaauuguacaagcaguuggucacccaccauagggcaugaucaacaccgcaaccuuuccuuuuucccccagugauucugaaaaaccccucuucccuucagcuugcuuagauguuccaaauuuaguaagcuuaaggcggccuacagaagaaaaagaaaaaaaaggccacaaaaguucccucucacuuucaguaaauaaaauaaaagcagcaacagaaauaaagaaauaaaugaaauucaaaaugaaauaaauauuguguugugcagcauuaaaaaaucaauaaaaauuaaaaaugagcaagaucuaaaaaaaaaaaaaaaaaaaaaaaaaaaaaaaaaaaaaaaaaaaaaaaaaaaaaaaaaaaaaaaaugcaucccccccccccccccccccccccccccccccaaaggcucuuuucagagccaccagaauu

SEQ ID NO: 2311 - RNA, 2139 nt, Artificial Sequence
  mRNA product Design h-2 comprising derived and/or modified sequence from HRSV(A2)__F-del_DSCav1_mut1 (opt1)
gggagacccgugacccggaaguuguacggcuacgcgacuuucccucccacaaacccucgcgcccuuccuuuccuacuugggcccggcagaaagcuuaccauggagcugcucauccugaaggccaacgccaucaccaccauccugacggcggugaccuucugcuucgccagcggccagaacaucaccgaggaguucuaccaguccacgugcagcgccgucuccaagggguaccucggcgcccugcgcaccgggugguacaccagcgugaucaccaucgagcuguccaacaucaaggagaacaagugcaacggcaccgacgccaaggugaagcucaucaagcaggagcuggacaaguacaagaacgcggucacggagcugcagcuccugaugcagagcacccccgccaccggguccggcagcgccaucugcuccggcguggccgugugcaagguccugcaccucgagggggaggugaacaagaucaagagcgcgcugcuguccaccaacaaggccguggucagccucuccaacggcgugagcgugcugacguucaagguccuggaccucaagaacuacaucgacaagcagcugcugccgauccucaacaagcaguccugcagcauccccaacaucgagaccgugaucgaguuccagcagaagaacaaccggcugcuggagaucacccgcgaguucuccgugaacgccggggucaccacgcccgugagcaccuacaugcucaccaacuccgagcugcugagccucaucaacgacaugcccaucaccaacgaccagaagaagcugaugagcaacaacgugcagaucguccggcagcaguccuacagcaucaugugcaucaucaaggaggaggugcuggccuacgugguccagcucccgcuguacggcgugaucgacacgcccugcuggaagcugcacaccagcccccucugcaccaccaacacgaaggagggguccaacaucugccugacccgcaccgaccggggcugguacugcgacaacgccggcuccgugagcuucuucccccaggcggagaccugcaagguccaguccaaccgcguguucugcgacacgaugaacagccugacccucccguccgaggucaaccugugcaacguggacaucuucaaccccaaguacgacugcaagaucaugaccagcaagaccgacguguccagcuccgucaucacgagccugggggccaucguguccugcuacggcaagaccaagugcaccgccagcaacaagaaccgggggaucaucaagaccuucuccaacggcugcgacuacgugagcaacaagggcgucgacacgguguccguggggaacacccucuacugcgucaacaagcaggagggccagagccuguacgugaagggggagcccaucaucaacuucuacgacccccugguguucccgagcgacgaguucgacgccuccaucagccaggucaacgagaagaucaaccagucccucgccuucauccgcaagagcgacgagcugcugcacaacgugaacgcgggcaaguccaccaccaacaucaugaucaccacgaucaucaucgugaucaucgucauccuccugagccugaucgccguggggcuccugcuguacugcaaggcccggugaggacuagugaagggaacacccaaauuuaauucagccuuaagcacaauuaauuaagagugaaacguaauuguacaagcaguuggucacccaccauagggcaugaucaacaccgcaaccuuuccuuuuucccccagugauucugaaaaaccccucuucccuucagcuugcuuagauguuccaaauuuaguaagcuuaaggcggccuacagaagaaaaagaaaaaaaaggccacaaaaguucccucucacuuucaguaaauaaaauaaaagcagcaacagaaauaaagaaauaaaugaaauucaaaaugaaauaaauauuguguugugcagcauuaaaaaaucaauaaaaauuaaaaaugagcaagaucuaaaaaaaaaaaaaaaaaaaaaaaaaaaaaaaaaaaaaaaaaaaaaaaaaaaaaaaaaaaaaaaaugcaucccccccccccccccccccccccccccccccaaaggcucuuuucagagccaccagaauu

SEQ ID NO: 2312 - RNA, 2139 nt, Artificial Sequence
  mRNA product Design h-2 comprising derived and/or modified sequence from HRSV(A2)__F-del_DSCav1_mut1 (opt2)
gggagacccgugacccggaaguuguacggcuacgcgacuuucccucccacaaacccucgcgcccuuccuuuccuacuugggcccggcagaaagcuuaccauggagcuccucauccucaaggccaacgccaucaccaccauccucaccgccgucaccuucugcuucgccuccggccagaacaucaccgaggaguucuaccaguccaccugcuccgccgucuccaagggcuaccucggcgcccuccgcaccggcugguacaccuccgucaucaccaucgagcucuccaacaucaaggagaacaagugcaacggcaccgacgccaaggucaagcucaucaagcaggagcucgacaaguacaagaacgccgucaccgagcuccagcuccucaugcaguccacccccgccaccggcuccggcuccgccaucugcuccggcgucgccgucugcaagguccuccaccucgagggcgaggucaacaagaucaaguccgcccuccucuccaccaacaaggccgucgucucccucuccaacggcgucuccguccucaccuucaagguccucgaccucaagaacuacaucgacaagcagcuccuccccauccucaacaagcaguccugcuccauccccaacaucgagaccgucaucgaguuccagcagaagaacaaccgccuccucgagaucacccgcgaguucuccgucaacgccggcgucaccacccccgucuccaccuacaugcucaccaacuccgagcuccucucccucaucaacgacaugcccaucaccaacgaccagaagaagcucauguccaacaacguccagaucguccgccagcaguccuacuccaucaugugcaucaucaaggaggagguccucgccuacgucguccagcucccccucuacggcgucaucgacacccccugcuggaagcuccacaccuccccccucugcaccaccaacaccaaggagggcuccaacaucugccucacccgcaccgaccgcggcugguacugcgacaacgccggcuccgucuccuucuucccccaggccgagaccugcaagguccaguccaaccgcgucuucugcgacaccaugaacucccucacccuccccuccgaggucaaccucugcaacgucgacaucuucaaccccaaguacgacugcaagaucaugaccuccaagaccgacgucuccuccuccgucaucaccucccucggcgccaucgucuccugcuacggcaagaccaagugcaccgccuccaacaagaaccgcggcaucaucaagaccuucuccaacggcugcgacuacgucuccaacaagggcgucgacaccgucuccgucggcaacacccucuacugcgucaacaagcaggagggccagucccucuacgucaagggcgagcccaucaucaacuucuacgacccccucgucuuccccuccgacgaguucgacgccuccaucucccaggucaacgagaagaucaaccagucccucgccuucauccgcaaguccgacgagcuccuccacaacgucaacgccggcaaguccaccaccaacaucaugaucaccaccaucaucaucgucaucaucgucauccuccucucccucaucgccgucggccuccuccucuacugcaaggcccgcugaggacuagugaagggaacacccaaauuuaauucagccuuaagcacaauuaauuaagagugaaacguaauuguacaagcaguuggucacccaccauagggcaugaucaacaccgcaaccuuuccuuuuucccccagugauucugaaaaaccccucuucccuucagcuugcuuagauguuccaaauuuaguaagcuuaaggcggccuacagaagaaaaagaaaaaaaaggccacaaaaguucccucucacuuucaguaaauaaaauaaaagcagcaacagaaauaaagaaauaaaugaaauucaaaaugaaauaaauauuguguugugcagcauuaaaaaaucaauaaaaauuaaaaaugagcaagaucuaaaaaaaaaaaaaaaaaaaaaaaaaaaaaaaaaaaaaaaaaaaaaaaaaaaaaaaaaaaaaaaaugcaucccccccccccccccccccccccccccccccaaaggcucuuuucagagccaccagaauu

SEQ ID NO: 2313 - RNA, 2139 nt, Artificial Sequence
  mRNA product Design h-2 comprising derived and/or modified sequence from HRSV(A2)__F-del_DSCav1_mut1 (opt3)
gggagacccgugacccggaaguuguacggcuacgcgacuuucccucccacaaacccucgcgcccuuccuuuccuacuugggcccggcagaaagcuuaccauggagcugcucauccuuaaggccaacgcuauuaccacaauacugacugcagugacguucugcuuugccagcggccagaauaucaccgaagaguucuaccaauccacauguucugcggucucaaaaggguauuugggagcuuuaagaacugguugguacaccaguguuauuacaaucgaacugagcaacauuaaggagaauaaaugcaacggcaccgacgccaaggugaaacuaaucaagcaggaacucgauaaguauaaaaaugcaguaacugagcugcagcuucugaugcaguccacacccgccaccgggucuggaucggcuauauguucaggcguggcagucugcaagguguugcaccucgagggugaaguuaacaaaaucaagagcgcccugcugaguacgaauaaagcuguggucucccucucuaacggggugagcguauuaacuuuuaagguucuggaccuuaagaauuacauugauaaacaauugcugccuauccuaaacaagcaguccuguucaauuccaaauaucgagaccgugauagaguuccagcagaaaaacaauaggcuccuggaaauuacacgggaguuuagugucaacgccggagugacuaccccggugagcacauauaugcuuaccaauucugaacuguugucccucaucaacgacaugcccauuacgaacgaucaaaagaaacugaugucaaauaacguccagaucguucgccagcagagcuacaguaucaugugcauuauaaaggaggaaguguuagcguauguagugcaacugccucucuacggcgucaucgacacuccauguuggaaacuucauacaucuccccugugcaccacuaauacaaaggagggcuccaacauuuguuugacccgaacggaucgugggugguacugcgacaaugcaggaagcgugucguucuuuccucaggccgaaaccuguaagguucagucuaacagaguguucugcgauacaaugaacucccuaacucugccaucagaggucaaucucugcaauguggacaucuuuaaccccaaauaugauuguaagauaaugaccaguaaaacagacguaagcuccucuguuauuacuagccugggugcuaucgugucaugcuacggcaagaccaaauguacagccaguaauaagaacagggggaucauuaagaccuucuccaauggaugcgauuaugucagcaacaaaggcguggacacugucucuguggguaauacgcuuuacuguguuaacaagcaagaggggcagucacuguaugugaaaggagaaccuaucauuaacuuuuacgacccauugguauucccgagugaugaguuugacgcaagcauaucccaggucaaugaaaagaucaaccagucucucgcuuucauucggaaaucggaugagcuguuacacaaugugaacgccggcaagagcacaaccaauaucaugaucacuaccauuauaaucguuauuaucgugauucugcuaucccucaucgcggucggccugcuuuuguauugcaaggcccgcugaggacuagugaagggaacacccaaauuuaauucagccuuaagcacaauuaauuaagagugaaacguaauuguacaagcaguuggucacccaccauagggcaugaucaacaccgcaaccuuuccuuuuucccccagugauucugaaaaaccccucuucccuucagcuugcuuagauguuccaaauuuaguaagcuuaaggcggccuacagaagaaaaagaaaaaaaaggccacaaaaguucccucucacuuucaguaaauaaaauaaaagcagcaacagaaauaaagaaauaaaugaaauucaaaaugaaauaaauauuguguugugcagcauuaaaaaaucaauaaaaauuaaaaaugagcaagaucuaaaaaaaaaaaaaaaaaaaaaaaaaaaaaaaaaaaaaaaaaaaaaaaaaaaaaaaaaaaaaaaaugcaucccccccccccccccccccccccccccccccaaaggcucuuuucagagccaccagaauu

SEQ ID NO: 2314 - RNA, 2139 nt, Artificial Sequence
  mRNA product Design h-2 comprising derived and/or modified sequence from HRSV(A2)__F-del_DSCav1_mut1 (opt4)
gggagacccgugacccggaaguuguacggcuacgcgacuuucccucccacaaacccucgcgcccuuccuuuccuacuugggcccggcagaaagcuuaccauggagcugcugauccugaaggccaacgccaucaccaccauccugaccgccgugaccuucugcuucgccagcggccagaacaucaccgaggaguucuaccagagcaccugcagcgccgugagcaagggcuaccugggcgcccugagaaccggcugguacaccagcgugaucaccaucgagcugagcaacaucaaggagaacaagugcaacggcaccgacgccaaggugaagcugaucaagcaggagcuggacaaguacaagaacgccgugaccgagcugcagcugcugaugcagagcacccccgccaccggcagcggcagcgccaucugcagcggcguggccgugugcaaggugcugcaccuggagggcgaggugaacaagaucaagagcgcccugcugagcaccaacaaggccguggugagccugagcaacggcgugagcgugcugaccuucaaggugcuggaccugaagaacuacaucgacaagcagcugcugcccauccugaacaagcagagcugcagcauccccaacaucgagaccgugaucgaguuccagcagaagaacaacagacugcuggagaucaccagagaguucagcgugaacgccggcgugaccacccccgugagcaccuacaugcugaccaacagcgagcugcugagccugaucaacgacaugcccaucaccaacgaccagaagaagcugaugagcaacaacgugcagaucgugagacagcagagcuacagcaucaugugcaucaucaaggaggaggugcuggccuacguggugcagcugccccuguacggcgugaucgacacccccugcuggaagcugcacaccagcccccugugcaccaccaacaccaaggagggcagcaacaucugccugaccagaaccgacagaggcugguacugcgacaacgccggcagcgugagcuucuucccccaggccgagaccugcaaggugcagagcaacagaguguucugcgacaccaugaacagccugacccugcccagcgaggugaaccugugcaacguggacaucuucaaccccaaguacgacugcaagaucaugaccagcaagaccgacgugagcagcagcgugaucaccagccugggcgccaucgugagcugcuacggcaagaccaagugcaccgccagcaacaagaacagaggcaucaucaagaccuucagcaacggcugcgacuacgugagcaacaagggcguggacaccgugagcgugggcaacacccuguacugcgugaacaagcaggagggccagagccuguacgugaagggcgagcccaucaucaacuucuacgacccccugguguuccccagcgacgaguucgacgccagcaucagccaggugaacgagaagaucaaccagagccuggccuucaucagaaagagcgacgagcugcugcacaacgugaacgccggcaagagcaccaccaacaucaugaucaccaccaucaucaucgugaucaucgugauccugcugagccugaucgccgugggccugcugcuguacugcaaggccagaugaggacuagugaagggaacacccaaauuuaauucagccuuaagcacaauuaauuaagagugaaacguaauuguacaagcaguuggucacccaccauagggcaugaucaacaccgcaaccuuuccuuuuucccccagugauucugaaaaaccccucuucccuucagcuugcuuagauguuccaaauuuaguaagcuuaaggcggccuacagaagaaaaagaaaaaaaaggccacaaaaguucccucucacuuucaguaaauaaaauaaaagcagcaacagaaauaaagaaauaaaugaaauucaaaaugaaauaaauauuguguugugcagcauuaaaaaaucaauaaaaauuaaaaaugagcaagaucuaaaaaaaaaaaaaaaaaaaaaaaaaaaaaaaaaaaaaaaaaaaaaaaaaaaaaaaaaaaaaaaaugcaucccccccccccccccccccccccccccccccaaaggcucuuuucagagccaccagaauu

SEQ ID NO: 2315 - RNA, 2139 nt, Artificial Sequence
  mRNA product Design h-2 comprising derived and/or modified sequence from HRSV(A2)__F-del_DSCav1_mut1 (opt5)
gggagacccgugacccggaaguuguacggcuacgcgacuuucccucccacaaacccucgcgcccuuccuuuccuacuugggcccggcagaaagcuuaccauggagcugcucauccugaaggccaacgcuauuaccacaauccuuacggccgugaccuucugcuuugcgagcggccagaauauuacagaagaguucuaccaauccaccuguucugcugucagcaaaggguaucugggagcccucagaacaggcugguacaccuccguuaucacaauugaacugucuaacaucaaggagaauaaaugcaacgggaccgacgccaaggugaaacuuaucaagcaggaacuggauaaguauaaaaaugcugugacggagcuccagcugcugaugcagagcacccccgccacaggauccggcucugcuauuuguagcggggucgccgugugcaagguucuccaccuggagggagaagugaacaaaaucaaguccgcgcuucugagcaccaauaaagccgucgugucucucuccaacggcguuagcgugcugacauuuaagguccuugaccugaagaauuacauugauaaacaacuccugccuauccugaacaagcagucuuguuccauuccgaauaucgagaccgugauugaguuccagcagaaaaacaaucggcuccuggaaaucacgcgcgaguuuagcgugaacgcuggcgucacaacccccguuucuacauauaugcuuaccaauuccgaacugcucagccugaucaacgacaugccuauuaccaacgaucaaaagaaacuuauguccaauaacgugcagaucgugagacagcagucuuacagcauuaugugcaucauuaaggaggaaguccuggccuaugugguucaacucccccuguacggggugaucgacacaccuuguuggaaacugcauacgagcccccucugcaccacaaauaccaaggagggauccaacaucugucugacacggaccgaucgcggcugguacugcgacaaugcugggucugucuccuucuuuccucaggccgaaacguguaaggugcagagcaacagaguuuucugcgauacaaugaacucucuuacccugccgagcgaggugaaucucugcaaugucgacauuuuuaaccccaaauaugauuguaagaucaugaccuccaaaacagacgugucuagcuccgucauuaccagccugggagcgaucgugucuugcuacggcaagacaaaauguacggccuccaauaagaaccgggggauuaucaagaccuucagcaauggaugcgauuauguuucuaacaaaggcguggacacagucuccgugggcaauacccuuuacuguguuaacaagcaagaggggcagagccuguaugugaaaggagaaccuaucauuaacuuuuacgacccccucgucuucccuuccgaugaguuugacgcuucuaucagccaggugaaugaaaagauuaaccagucccuggccuucauccgcaaaucugaugagcugcuccacaaugugaacgcuggcaagagcacaaccaauauuaugaucacgaccauuaucaucguuauuaucgucauucugcuuucccugaucgccguggggcuccugcuguauugcaaggccagaugaggacuagugaagggaacacccaaauuuaauucagccuuaagcacaauuaauuaagagugaaacguaauuguacaagcaguuggucacccaccauagggcaugaucaacaccgcaaccuuuccuuuuucccccagugauucugaaaaaccccucuucccuucagcuugcuuagauguuccaaauuuaguaagcuuaaggcggccuacagaagaaaaagaaaaaaaaggccacaaaaguucccucucacuuucaguaaauaaaauaaaagcagcaacagaaauaaagaaauaaaugaaauucaaaaugaaauaaauauuguguugugcagcauuaaaaaaucaauaaaaauuaaaaaugagcaagaucuaaaaaaaaaaaaaaaaaaaaaaaaaaaaaaaaaaaaaaaaaaaaaaaaaaaaaaaaaaaaaaaaugcaucccccccccccccccccccccccccccccccaaaggcucuuuucagagccaccagaauu

SEQ ID NO: 2316 - RNA, 2139 nt, Artificial Sequence
  mRNA product Design h-2 comprising derived and/or modified sequence from HRSV(A2)__F-del_DSCav1_mut1 (opt6)
gggagacccgugacccggaaguuguacggcuacgcgacuuucccucccacaaacccucgcgcccuuccuuuccuacuugggcccggcagaaagcuuaccauggaacuacucaucuuaaaagcaaacgcaauaacaacuauucuaaccgcaguaacauuuuguuucgcaucaggacaaaacauaaccgaagaauuuuaccaaucaacauguuccgcaguuucaaaaggauacuuaggcgcacuaagaacaggcugguacaccuccgugauaacaauagaauuaucaaacauaaaagaaaacaaauguaauggaacugacgccaaaguaaaacuaauaaaacaagaacuagacaaauauaaaaacgcaguaacugaacuacaauuacuaaugcaauccaccccagcaacaggcucaggcucagcaauuugcuccggagucgcugucugcaaaguacuacaucuugaaggcgaagucaauaaaauaaaaucagcacuucuaucaacaaacaaagcaguagucucacuaucaaacggaguaucaguacuaacauuuaaaguauuagaucuaaaaaacuauauagauaaacaacuacuacccauacucaauaaacaauccuguucaauaccaaauauagaaaccguaauagaauuucaacaaaaaaacaaucgacuauuagaaaucacccgagaauuuucagucaaugcaggcguaacaacaccaguaucaaccuacauguuaaccaacuccgaacuacuaucccucauaaacgacaugccaauaacaaacgaucaaaaaaaacuaauguccaacaacguacaaauagucagacaacaaucuuauucaauaaugugcaucauaaaagaagaaguucuagccuacguaguucaacuuccauuauacggcguaauugauacaccaugcuggaaacuacacacauccccacuauguacaacaaacacaaaagaaggaucaaacaucugcuuaacuagaacagacagaggaugguacugcgacaacgcaggaucagucucauucuuuccacaagcagaaacaugcaagguccaaucaaacagaguauucugcgacacaaugaacuccuuaacacuaccaucugaaguaaaccuauguaauguagacauauuuaacccaaaauacgacugcaaaauaaugaccucaaaaacagacguauccucaucaguaauuacaagccucggagccauaguaucaugcuacggaaaaacaaaauguacagcaucaaacaaaaacagaggaauaauaaaaacguucuccaacggaugcgacuauguaucaaacaaaggcguagacacaguaucagucggaaauacccuuuacugcguaaacaaacaagaaggccaaagucuauacguaaaaggagagccaauaauaaacuuuuaugacccccuuguauucccaucugacgaauuugaugcaucaauaucccaagucaacgaaaaaaucaaccaaucauuagccuuuauuagaaaaagugacgaacuauuacacaacguuaaugcagggaaaucaacaacaaauauaaugauuacaaccauaauuauaguuaucauaguuauacuacucucacuaaucgcaguaggauuacuauuauacugcaaagcaagauaaggacuagugaagggaacacccaaauuuaauucagccuuaagcacaauuaauuaagagugaaacguaauuguacaagcaguuggucacccaccauagggcaugaucaacaccgcaaccuuuccuuuuucccccagugauucugaaaaaccccucuucccuucagcuugcuuagauguuccaaauuuaguaagcuuaaggcggccuacagaagaaaaagaaaaaaaaggccacaaaaguucccucucacuuucaguaaauaaaauaaaagcagcaacagaaauaaagaaauaaaugaaauucaaaaugaaauaaauauuguguugugcagcauuaaaaaaucaauaaaaauuaaaaaugagcaagaucuaaaaaaaaaaaaaaaaaaaaaaaaaaaaaaaaaaaaaaaaaaaaaaaaaaaaaaaaaaaaaaaaugcaucccccccccccccccccccccccccccccccaaaggcucuuuucagagccaccagaauu

SEQ ID NO: 2317 - RNA, 2139 nt, Artificial Sequence
  mRNA product Design h-2 comprising derived and/or modified sequence from HRSV(A2)__F-del_DSCav1_mut1 (opt11)
gggagacccgugacccggaaguuguacggcuacgcgacuuucccucccacaaacccucgcgcccuuccuuuccuacuugggcccggcagaaagcuuaccauggaacuacucauccuaaaagccaacgcaaucacaaccauacuuacagcuguuaccuucugcuucgcauccggccaaaauaucaccgaagaguucuaccaaucaaccugcuccgccgucagcaaaggauaccucggcgcccuccgaaccggaugguacacuucugucaucacaaucgaacucuccaacaucaaagaaaacaaaugcaacgguaccgacgcgaaagucaaacucaucaaacaagaacuagacaaguacaaaaacgccgucaccgaacugcaacuccucaugcaauccacaccagcaacgggaucaggauccgccaucugcucaggcgucgccgucugcaaaguccugcaccuagaaggagaaguaaacaaaauuaaauccgcccuacucuccaccaacaaagcagucgucucacuauccaacggcgucuccguccucaccuuuaagguccucgaccucaaaaauuauauagacaaacaacuccuccccauccuaaacaaacaaucaugcuccauccccaacauagaaaccgucaucgaauuucaacagaaaaacaaccgacucuuagaaauuacccgcgaguucagcgucaacgccggagucaccacacccgucucaaccuacaugcucaccaacucagaacuccucucacuaaucaaugauaugcccaucacaaacgaccaaaagaaacucauguccaacaacguacaaaucguucgccaacaaagcuacuccaucauguguaucauuaaagaagaaguccucgccuacgucguccaacuuccgcucuacggcguaaucgacacccccugcuggaaacuucacaccucgccccucugcaccacaaacaccaaagaaggcuccaacaucugccuaacccgcaccgaccgcggcugguacugcgacaacgccggcuccgucucauuuuucccccaggcggagaccugcaaaguccaauccaaccgcgucuucugcgacaccaugaacucucuuacccucccaucagaaguaaaccucugcaacgucgacaucuuuaaccccaaauacgauugcaagauaaugaccuccaaaacagacgucucaucguccgucaucaccucccuaggagcuaucgucuccugcuacggcaagaccaaaugcaccgcuuccaacaaaaaccgcggcaucaucaaaaccuucuccaacgggugcgacuacgucucuaacaaaggcguggacacaguauccguaggaaacacacuguacugcguaaacaaacaagagggccaaucgcuuuacgucaaaggcgagccaauuaucaacuucuacgacccgcucgucuucccaucagacgaguucgacgcauccaucucccaagucaacgagaaaaucaaucagucccucgccuucauacgcaaauccgacgaacuccuacauaacguaaacgccggcaaaucuaccacaaacaucaugaucacaaccaucaucaucguaaucaucgucauccuucucucgcucaucgccguaggacugcuacuuuacugcaaggcccgcuaaggacuagugaagggaacacccaaauuuaauucagccuuaagcacaauuaauuaagagugaaacguaauuguacaagcaguuggucacccaccauagggcaugaucaacaccgcaaccuuuccuuuuucccccagugauucugaaaaaccccucuucccuucagcuugcuuagauguuccaaauuuaguaagcuuaaggcggccuacagaagaaaaagaaaaaaaaggccacaaaaguucccucucacuuucaguaaauaaaauaaaagcagcaacagaaauaaagaaauaaaugaaauucaaaaugaaauaaauauuguguugugcagcauuaaaaaaucaauaaaaauuaaaaaugagcaagaucuaaaaaaaaaaaaaaaaaaaaaaaaaaaaaaaaaaaaaaaaaaaaaaaaaaaaaaaaaaaaaaaaugcaucccccccccccccccccccccccccccccccaaaggcucuuuucagagccaccagaauu

SEQ ID NO: 2318 - RNA, 1919 nt, Artificial Sequence
  mRNA product Design h-3 comprising derived and/or modified sequence from HRSV(A2)__F-del_DSCav1_mut1 (opt1)
gggagacccgugacccggaaguuguacggcuacgcgacuuucccucccacaaacccucgcgcccuuccuuuccuacuugggcccggcagaaagcuuaccauggagcugcucauccugaaggccaacgccaucaccaccauccugacggcggugaccuucugcuucgccagcggccagaacaucaccgaggaguucuaccaguccacgugcagcgccgucuccaagggguaccucggcgcccugcggaccggcugguacaccuccgugaucaccaucgagcugagcaacaucaaggagaacaagugcaacgggaccgacgccaaggugaagcucaucaagcaggagcuggacaaguacaagaacgcggucacggagcugcagcuccugaugcaguccaccccggcaaccggcuccggcuccgccaucugcagcggcgucgccgugugcaaggugcugcaccucgagggggaggucaacaagaucaagagcgcccugcuguccaccaacaaggccguggugagccucuccaacggcgucagcgugcugaccuucaaggugcuggaccucaagaacuacaucgacaagcagcugcugcccauccugaacaagcagagcugcuccauccccaacaucgagacggugaucgaguuccagcagaagaacaaccggcuccuggagaucacccgcgaguucagcgugaacgccggggucaccacccccguguccacguacaugcugaccaacagcgagcuccugucccugaucaacgacaugccgaucaccaacgaccagaagaagcucaugagcaacaacgugcagaucguccggcagcaguccuacagcaucaugugcaucaucaaggaggaggugcuggcguacgugguccagcugccccucuacggcgugaucgacacccccugcuggaagcugcacacgagcccccugugcaccaccaacaccaaggagggguccaacaucugccucacgcgcaccgaccggggcugguacugcgacaacgccggcagcgucuccuucuucccgcaggccgagaccugcaaggugcagagcaaccgcguguucugcgacaccaugaacucccugacgcugcccagcgagguaaaccucugcaacgucgacaucuucaaccccaaguacgacugcaagaucaugaccuccaagaccgacgugagcuccagcgugaucaccucccugggggccaucgucagcugcuacggcaagacgaagugcaccgccagcaacaagaaccgggggaucaucaagaccuucuccaacggcugcgacuacgugagcaacaagggcguggacaccguguccgucgggaacacccuguacugcgugaacaagcaggagggccagagccucuacgugaagggggagcccaucaucaacuucuacgacccgcuggucuuccccuccgacgaguucgacgcgagcaucucccaggugaacgagaagaucaaccagagccuggccuucauccgcaaguccgacgagcugcuccacaacgugaacgccggcaagagcacgaccaacaucaugaucaccaccaucaucaucgucaucaucgugauccugcugucccucaucgccguggggcugcugcucuacugcaaggcccggugaggacuaguggaagcauuuuccuggcugauuaaaagaaauuacucagcuauggucaucuguuccuguuagaaggcuaugcagcauauuauauacuaugcgcauguuaugaaaugcauaauaaaaaauuuuaaaaaaucuaaaagaucuaaaaaaaaaaaaaaaaaaaaaaaaaaaaaaaaaaaaaaaaaaaaaaaaaaaaaaaaaaaaaaaaugcaucccccccccccccccccccccccccccccccaaaggcucuuuucagagccaccagaauu

SEQ ID NO: 2319 - RNA, 1919 nt, Artificial Sequence
  mRNA product Design h-3 comprising derived and/or modified sequence from HRSV(A2)__F-del_DSCav1_mut1 (opt1)
gggagacccgugacccggaaguuguacggcuacgcgacuuucccucccacaaacccucgcgcccuuccuuuccuacuugggcccggcagaaagcuuaccauggagcugcucauccugaaggccaacgccaucaccaccauccugacggcggugaccuucugcuucgccagcggccagaacaucaccgaggaguucuaccaguccacgugcagcgccgucuccaagggguaccucggcgcccugcgcaccgggugguacaccagcgugaucaccaucgagcuguccaacaucaaggagaacaagugcaacggcaccgacgccaaggugaagcucaucaagcaggagcuggacaaguacaagaacgcggucacggagcugcagcuccugaugcagagcacccccgccaccggguccggcagcgccaucugcuccggcguggccgugugcaagguccugcaccucgagggggaggugaacaagaucaagagcgcgcugcuguccaccaacaaggccguggucagccucuccaacggcgugagcgugcugacguucaagguccuggaccucaagaacuacaucgacaagcagcugcugccgauccucaacaagcaguccugcagcauccccaacaucgagaccgugaucgaguuccagcagaagaacaaccggcugcuggagaucacccgcgaguucuccgugaacgccggggucaccacgcccgugagcaccuacaugcucaccaacuccgagcugcugagccucaucaacgacaugcccaucaccaacgaccagaagaagcugaugagcaacaacgugcagaucguccggcagcaguccuacagcaucaugugcaucaucaaggaggaggugcuggccuacgugguccagcucccgcuguacggcgugaucgacacgcccugcuggaagcugcacaccagcccccucugcaccaccaacacgaaggagggguccaacaucugccugacccgcaccgaccggggcugguacugcgacaacgccggcuccgugagcuucuucccccaggcggagaccugcaagguccaguccaaccgcguguucugcgacacgaugaacagccugacccucccguccgaggucaaccugugcaacguggacaucuucaaccccaaguacgacugcaagaucaugaccagcaagaccgacguguccagcuccgucaucacgagccugggggccaucguguccugcuacggcaagaccaagugcaccgccagcaacaagaaccgggggaucaucaagaccuucuccaacggcugcgacuacgugagcaacaagggcgucgacacgguguccguggggaacacccucuacugcgucaacaagcaggagggccagagccuguacgugaagggggagcccaucaucaacuucuacgacccccugguguucccgagcgacgaguucgacgccuccaucagccaggucaacgagaagaucaaccagucccucgccuucauccgcaagagcgacgagcugcugcacaacgugaacgcgggcaaguccaccaccaacaucaugaucaccacgaucaucaucgugaucaucgucauccuccugagccugaucgccguggggcuccugcuguacugcaaggcccggugaggacuaguggaagcauuuuccuggcugauuaaaagaaauuacucagcuauggucaucuguuccuguuagaaggcuaugcagcauauuauauacuaugcgcauguuaugaaaugcauaauaaaaaauuuuaaaaaaucuaaaagaucuaaaaaaaaaaaaaaaaaaaaaaaaaaaaaaaaaaaaaaaaaaaaaaaaaaaaaaaaaaaaaaaaugcaucccccccccccccccccccccccccccccccaaaggcucuuuucagagccaccagaauu

SEQ ID NO: 2320 - RNA, 1919 nt, Artificial Sequence
  mRNA product Design h-3 comprising derived and/or modified sequence from HRSV(A2)__F-del_DSCav1_mut1 (opt2)
gggagacccgugacccggaaguuguacggcuacgcgacuuucccucccacaaacccucgcgcccuuccuuuccuacuugggcccggcagaaagcuuaccauggagcuccucauccucaaggccaacgccaucaccaccauccucaccgccgucaccuucugcuucgccuccggccagaacaucaccgaggaguucuaccaguccaccugcuccgccgucuccaagggcuaccucggcgcccuccgcaccggcugguacaccuccgucaucaccaucgagcucuccaacaucaaggagaacaagugcaacggcaccgacgccaaggucaagcucaucaagcaggagcucgacaaguacaagaacgccgucaccgagcuccagcuccucaugcaguccacccccgccaccggcuccggcuccgccaucugcuccggcgucgccgucugcaagguccuccaccucgagggcgaggucaacaagaucaaguccgcccuccucuccaccaacaaggccgucgucucccucuccaacggcgucuccguccucaccuucaagguccucgaccucaagaacuacaucgacaagcagcuccuccccauccucaacaagcaguccugcuccauccccaacaucgagaccgucaucgaguuccagcagaagaacaaccgccuccucgagaucacccgcgaguucuccgucaacgccggcgucaccacccccgucuccaccuacaugcucaccaacuccgagcuccucucccucaucaacgacaugcccaucaccaacgaccagaagaagcucauguccaacaacguccagaucguccgccagcaguccuacuccaucaugugcaucaucaaggaggagguccucgccuacgucguccagcucccccucuacggcgucaucgacacccccugcuggaagcuccacaccuccccccucugcaccaccaacaccaaggagggcuccaacaucugccucacccgcaccgaccgcggcugguacugcgacaacgccggcuccgucuccuucuucccccaggccgagaccugcaagguccaguccaaccgcgucuucugcgacaccaugaacucccucacccuccccuccgaggucaaccucugcaacgucgacaucuucaaccccaaguacgacugcaagaucaugaccuccaagaccgacgucuccuccuccgucaucaccucccucggcgccaucgucuccugcuacggcaagaccaagugcaccgccuccaacaagaaccgcggcaucaucaagaccuucuccaacggcugcgacuacgucuccaacaagggcgucgacaccgucuccgucggcaacacccucuacugcgucaacaagcaggagggccagucccucuacgucaagggcgagcccaucaucaacuucuacgacccccucgucuuccccuccgacgaguucgacgccuccaucucccaggucaacgagaagaucaaccagucccucgccuucauccgcaaguccgacgagcuccuccacaacgucaacgccggcaaguccaccaccaacaucaugaucaccaccaucaucaucgucaucaucgucauccuccucucccucaucgccgucggccuccuccucuacugcaaggcccgcugaggacuaguggaagcauuuuccuggcugauuaaaagaaauuacucagcuauggucaucuguuccuguuagaaggcuaugcagcauauuauauacuaugcgcauguuaugaaaugcauaauaaaaaauuuuaaaaaaucuaaaagaucuaaaaaaaaaaaaaaaaaaaaaaaaaaaaaaaaaaaaaaaaaaaaaaaaaaaaaaaaaaaaaaaaugcaucccccccccccccccccccccccccccccccaaaggcucuuuucagagccaccagaauu

SEQ ID NO: 2321 - RNA, 1919 nt, Artificial Sequence
  mRNA product Design h-3 comprising derived and/or modified sequence from HRSV(A2)__F-del_DSCav1_mut1 (opt3)
gggagacccgugacccggaaguuguacggcuacgcgacuuucccucccacaaacccucgcgcccuuccuuuccuacuugggcccggcagaaagcuuaccauggagcugcucauccuuaaggccaacgcuauuaccacaauacugacugcagugacguucugcuuugccagcggccagaauaucaccgaagaguucuaccaauccacauguucugcggucucaaaaggguauuugggagcuuuaagaacugguugguacaccaguguuauuacaaucgaacugagcaacauuaaggagaauaaaugcaacggcaccgacgccaaggugaaacuaaucaagcaggaacucgauaaguauaaaaaugcaguaacugagcugcagcuucugaugcaguccacacccgccaccgggucuggaucggcuauauguucaggcguggcagucugcaagguguugcaccucgagggugaaguuaacaaaaucaagagcgcccugcugaguacgaauaaagcuguggucucccucucuaacggggugagcguauuaacuuuuaagguucuggaccuuaagaauuacauugauaaacaauugcugccuauccuaaacaagcaguccuguucaauuccaaauaucgagaccgugauagaguuccagcagaaaaacaauaggcuccuggaaauuacacgggaguuuagugucaacgccggagugacuaccccggugagcacauauaugcuuaccaauucugaacuguugucccucaucaacgacaugcccauuacgaacgaucaaaagaaacugaugucaaauaacguccagaucguucgccagcagagcuacaguaucaugugcauuauaaaggaggaaguguuagcguauguagugcaacugccucucuacggcgucaucgacacuccauguuggaaacuucauacaucuccccugugcaccacuaauacaaaggagggcuccaacauuuguuugacccgaacggaucgugggugguacugcgacaaugcaggaagcgugucguucuuuccucaggccgaaaccuguaagguucagucuaacagaguguucugcgauacaaugaacucccuaacucugccaucagaggucaaucucugcaauguggacaucuuuaaccccaaauaugauuguaagauaaugaccaguaaaacagacguaagcuccucuguuauuacuagccugggugcuaucgugucaugcuacggcaagaccaaauguacagccaguaauaagaacagggggaucauuaagaccuucuccaauggaugcgauuaugucagcaacaaaggcguggacacugucucuguggguaauacgcuuuacuguguuaacaagcaagaggggcagucacuguaugugaaaggagaaccuaucauuaacuuuuacgacccauugguauucccgagugaugaguuugacgcaagcauaucccaggucaaugaaaagaucaaccagucucucgcuuucauucggaaaucggaugagcuguuacacaaugugaacgccggcaagagcacaaccaauaucaugaucacuaccauuauaaucguuauuaucgugauucugcuaucccucaucgcggucggccugcuuuuguauugcaaggcccgcugaggacuaguggaagcauuuuccuggcugauuaaaagaaauuacucagcuauggucaucuguuccuguuagaaggcuaugcagcauauuauauacuaugcgcauguuaugaaaugcauaauaaaaaauuuuaaaaaaucuaaaagaucuaaaaaaaaaaaaaaaaaaaaaaaaaaaaaaaaaaaaaaaaaaaaaaaaaaaaaaaaaaaaaaaaugcaucccccccccccccccccccccccccccccccaaaggcucuuuucagagccaccagaauu

SEQ ID NO: 2322 - RNA, 1919 nt, Artificial Sequence
  mRNA product Design h-3 comprising derived and/or modified sequence from HRSV(A2)__F-del_DSCav1_mut1 (opt4)
gggagacccgugacccggaaguuguacggcuacgcgacuuucccucccacaaacccucgcgcccuuccuuuccuacuugggcccggcagaaagcuuaccauggagcugcugauccugaaggccaacgccaucaccaccauccugaccgccgugaccuucugcuucgccagcggccagaacaucaccgaggaguucuaccagagcaccugcagcgccgugagcaagggcuaccugggcgcccugagaaccggcugguacaccagcgugaucaccaucgagcugagcaacaucaaggagaacaagugcaacggcaccgacgccaaggugaagcugaucaagcaggagcuggacaaguacaagaacgccgugaccgagcugcagcugcugaugcagagcacccccgccaccggcagcggcagcgccaucugcagcggcguggccgugugcaaggugcugcaccuggagggcgaggugaacaagaucaagagcgcccugcugagcaccaacaaggccguggugagccugagcaacggcgugagcgugcugaccuucaaggugcuggaccugaagaacuacaucgacaagcagcugcugcccauccugaacaagcagagcugcagcauccccaacaucgagaccgugaucgaguuccagcagaagaacaacagacugcuggagaucaccagagaguucagcgugaacgccggcgugaccacccccgugagcaccuacaugcugaccaacagcgagcugcugagccugaucaacgacaugcccaucaccaacgaccagaagaagcugaugagcaacaacgugcagaucgugagacagcagagcuacagcaucaugugcaucaucaaggaggaggugcuggccuacguggugcagcugccccuguacggcgugaucgacacccccugcuggaagcugcacaccagcccccugugcaccaccaacaccaaggagggcagcaacaucugccugaccagaaccgacagaggcugguacugcgacaacgccggcagcgugagcuucuucccccaggccgagaccugcaaggugcagagcaacagaguguucugcgacaccaugaacagccugacccugcccagcgaggugaaccugugcaacguggacaucuucaaccccaaguacgacugcaagaucaugaccagcaagaccgacgugagcagcagcgugaucaccagccugggcgccaucgugagcugcuacggcaagaccaagugcaccgccagcaacaagaacagaggcaucaucaagaccuucagcaacggcugcgacuacgugagcaacaagggcguggacaccgugagcgugggcaacacccuguacugcgugaacaagcaggagggccagagccuguacgugaagggcgagcccaucaucaacuucuacgacccccugguguuccccagcgacgaguucgacgccagcaucagccaggugaacgagaagaucaaccagagccuggccuucaucagaaagagcgacgagcugcugcacaacgugaacgccggcaagagcaccaccaacaucaugaucaccaccaucaucaucgugaucaucgugauccugcugagccugaucgccgugggccugcugcuguacugcaaggccagaugaggacuaguggaagcauuuuccuggcugauuaaaagaaauuacucagcuauggucaucuguuccuguuagaaggcuaugcagcauauuauauacuaugcgcauguuaugaaaugcauaauaaaaaauuuuaaaaaaucuaaaagaucuaaaaaaaaaaaaaaaaaaaaaaaaaaaaaaaaaaaaaaaaaaaaaaaaaaaaaaaaaaaaaaaaugcaucccccccccccccccccccccccccccccccaaaggcucuuuucagagccaccagaauu

SEQ ID NO: 2323 - RNA, 1919 nt, Artificial Sequence
  mRNA product Design h-3 comprising derived and/or modified sequence from HRSV(A2)__F-del_DSCav1_mut1 (opt5)
gggagacccgugacccggaaguuguacggcuacgcgacuuucccucccacaaacccucgcgcccuuccuuuccuacuugggcccggcagaaagcuuaccauggagcugcucauccugaaggccaacgcuauuaccacaauccuuacggccgugaccuucugcuuugcgagcggccagaauauuacagaagaguucuaccaauccaccuguucugcugucagcaaaggguaucugggagcccucagaacaggcugguacaccuccguuaucacaauugaacugucuaacaucaaggagaauaaaugcaacgggaccgacgccaaggugaaacuuaucaagcaggaacuggauaaguauaaaaaugcugugacggagcuccagcugcugaugcagagcacccccgccacaggauccggcucugcuauuuguagcggggucgccgugugcaagguucuccaccuggagggagaagugaacaaaaucaaguccgcgcuucugagcaccaauaaagccgucgugucucucuccaacggcguuagcgugcugacauuuaagguccuugaccugaagaauuacauugauaaacaacuccugccuauccugaacaagcagucuuguuccauuccgaauaucgagaccgugauugaguuccagcagaaaaacaaucggcuccuggaaaucacgcgcgaguuuagcgugaacgcuggcgucacaacccccguuucuacauauaugcuuaccaauuccgaacugcucagccugaucaacgacaugccuauuaccaacgaucaaaagaaacuuauguccaauaacgugcagaucgugagacagcagucuuacagcauuaugugcaucauuaaggaggaaguccuggccuaugugguucaacucccccuguacggggugaucgacacaccuuguuggaaacugcauacgagcccccucugcaccacaaauaccaaggagggauccaacaucugucugacacggaccgaucgcggcugguacugcgacaaugcugggucugucuccuucuuuccucaggccgaaacguguaaggugcagagcaacagaguuuucugcgauacaaugaacucucuuacccugccgagcgaggugaaucucugcaaugucgacauuuuuaaccccaaauaugauuguaagaucaugaccuccaaaacagacgugucuagcuccgucauuaccagccugggagcgaucgugucuugcuacggcaagacaaaauguacggccuccaauaagaaccgggggauuaucaagaccuucagcaauggaugcgauuauguuucuaacaaaggcguggacacagucuccgugggcaauacccuuuacuguguuaacaagcaagaggggcagagccuguaugugaaaggagaaccuaucauuaacuuuuacgacccccucgucuucccuuccgaugaguuugacgcuucuaucagccaggugaaugaaaagauuaaccagucccuggccuucauccgcaaaucugaugagcugcuccacaaugugaacgcuggcaagagcacaaccaauauuaugaucacgaccauuaucaucguuauuaucgucauucugcuuucccugaucgccguggggcuccugcuguauugcaaggccagaugaggacuaguggaagcauuuuccuggcugauuaaaagaaauuacucagcuauggucaucuguuccuguuagaaggcuaugcagcauauuauauacuaugcgcauguuaugaaaugcauaauaaaaaauuuuaaaaaaucuaaaagaucuaaaaaaaaaaaaaaaaaaaaaaaaaaaaaaaaaaaaaaaaaaaaaaaaaaaaaaaaaaaaaaaaugcaucccccccccccccccccccccccccccccccaaaggcucuuuucagagccaccagaauu

SEQ ID NO: 2324 - RNA, 1919 nt, Artificial Sequence
  mRNA product Design h-3 comprising derived and/or modified sequence from HRSV(A2)__F-del_DSCav1_mut1 (opt6)
gggagacccgugacccggaaguuguacggcuacgcgacuuucccucccacaaacccucgcgcccuuccuuuccuacuugggcccggcagaaagcuuaccauggaacuacucaucuuaaaagcaaacgcaauaacaacuauucuaaccgcaguaacauuuuguuucgcaucaggacaaaacauaaccgaagaauuuuaccaaucaacauguuccgcaguuucaaaaggauacuuaggcgcacuaagaacaggcugguacaccuccgugauaacaauagaauuaucaaacauaaaagaaaacaaauguaauggaacugacgccaaaguaaaacuaauaaaacaagaacuagacaaauauaaaaacgcaguaacugaacuacaauuacuaaugcaauccaccccagcaacaggcucaggcucagcaauuugcuccggagucgcugucugcaaaguacuacaucuugaaggcgaagucaauaaaauaaaaucagcacuucuaucaacaaacaaagcaguagucucacuaucaaacggaguaucaguacuaacauuuaaaguauuagaucuaaaaaacuauauagauaaacaacuacuacccauacucaauaaacaauccuguucaauaccaaauauagaaaccguaauagaauuucaacaaaaaaacaaucgacuauuagaaaucacccgagaauuuucagucaaugcaggcguaacaacaccaguaucaaccuacauguuaaccaacuccgaacuacuaucccucauaaacgacaugccaauaacaaacgaucaaaaaaaacuaauguccaacaacguacaaauagucagacaacaaucuuauucaauaaugugcaucauaaaagaagaaguucuagccuacguaguucaacuuccauuauacggcguaauugauacaccaugcuggaaacuacacacauccccacuauguacaacaaacacaaaagaaggaucaaacaucugcuuaacuagaacagacagaggaugguacugcgacaacgcaggaucagucucauucuuuccacaagcagaaacaugcaagguccaaucaaacagaguauucugcgacacaaugaacuccuuaacacuaccaucugaaguaaaccuauguaauguagacauauuuaacccaaaauacgacugcaaaauaaugaccucaaaaacagacguauccucaucaguaauuacaagccucggagccauaguaucaugcuacggaaaaacaaaauguacagcaucaaacaaaaacagaggaauaauaaaaacguucuccaacggaugcgacuauguaucaaacaaaggcguagacacaguaucagucggaaauacccuuuacugcguaaacaaacaagaaggccaaagucuauacguaaaaggagagccaauaauaaacuuuuaugacccccuuguauucccaucugacgaauuugaugcaucaauaucccaagucaacgaaaaaaucaaccaaucauuagccuuuauuagaaaaagugacgaacuauuacacaacguuaaugcagggaaaucaacaacaaauauaaugauuacaaccauaauuauaguuaucauaguuauacuacucucacuaaucgcaguaggauuacuauuauacugcaaagcaagauaaggacuaguggaagcauuuuccuggcugauuaaaagaaauuacucagcuauggucaucuguuccuguuagaaggcuaugcagcauauuauauacuaugcgcauguuaugaaaugcauaauaaaaaauuuuaaaaaaucuaaaagaucuaaaaaaaaaaaaaaaaaaaaaaaaaaaaaaaaaaaaaaaaaaaaaaaaaaaaaaaaaaaaaaaaugcaucccccccccccccccccccccccccccccccaaaggcucuuuucagagccaccagaauu

SEQ ID NO: 2325 - RNA, 1919 nt, Artificial Sequence
  mRNA product Design h-3 comprising derived and/or modified sequence from HRSV(A2)__F-del_DSCav1_mut1 (opt11)
gggagacccgugacccggaaguuguacggcuacgcgacuuucccucccacaaacccucgcgcccuuccuuuccuacuugggcccggcagaaagcuuaccauggaacuacucauccuaaaagccaacgcaaucacaaccauacuuacagcuguuaccuucugcuucgcauccggccaaaauaucaccgaagaguucuaccaaucaaccugcuccgccgucagcaaaggauaccucggcgcccuccgaaccggaugguacacuucugucaucacaaucgaacucuccaacaucaaagaaaacaaaugcaacgguaccgacgcgaaagucaaacucaucaaacaagaacuagacaaguacaaaaacgccgucaccgaacugcaacuccucaugcaauccacaccagcaacgggaucaggauccgccaucugcucaggcgucgccgucugcaaaguccugcaccuagaaggagaaguaaacaaaauuaaauccgcccuacucuccaccaacaaagcagucgucucacuauccaacggcgucuccguccucaccuuuaagguccucgaccucaaaaauuauauagacaaacaacuccuccccauccuaaacaaacaaucaugcuccauccccaacauagaaaccgucaucgaauuucaacagaaaaacaaccgacucuuagaaauuacccgcgaguucagcgucaacgccggagucaccacacccgucucaaccuacaugcucaccaacucagaacuccucucacuaaucaaugauaugcccaucacaaacgaccaaaagaaacucauguccaacaacguacaaaucguucgccaacaaagcuacuccaucauguguaucauuaaagaagaaguccucgccuacgucguccaacuuccgcucuacggcguaaucgacacccccugcuggaaacuucacaccucgccccucugcaccacaaacaccaaagaaggcuccaacaucugccuaacccgcaccgaccgcggcugguacugcgacaacgccggcuccgucucauuuuucccccaggcggagaccugcaaaguccaauccaaccgcgucuucugcgacaccaugaacucucuuacccucccaucagaaguaaaccucugcaacgucgacaucuuuaaccccaaauacgauugcaagauaaugaccuccaaaacagacgucucaucguccgucaucaccucccuaggagcuaucgucuccugcuacggcaagaccaaaugcaccgcuuccaacaaaaaccgcggcaucaucaaaaccuucuccaacgggugcgacuacgucucuaacaaaggcguggacacaguauccguaggaaacacacuguacugcguaaacaaacaagagggccaaucgcuuuacgucaaaggcgagccaauuaucaacuucuacgacccgcucgucuucccaucagacgaguucgacgcauccaucucccaagucaacgagaaaaucaaucagucccucgccuucauacgcaaauccgacgaacuccuacauaacguaaacgccggcaaaucuaccacaaacaucaugaucacaaccaucaucaucguaaucaucgucauccuucucucgcucaucgccguaggacugcuacuuuacugcaaggcccgcuaaggacuaguggaagcauuuuccuggcugauuaaaagaaauuacucagcuauggucaucuguuccuguuagaaggcuaugcagcauauuauauacuaugcgcauguuaugaaaugcauaauaaaaaauuuuaaaaaaucuaaaagaucuaaaaaaaaaaaaaaaaaaaaaaaaaaaaaaaaaaaaaaaaaaaaaaaaaaaaaaaaaaaaaaaaugcaucccccccccccccccccccccccccccccccaaaggcucuuuucagagccaccagaauu

SEQ ID NO: 2326 - RNA, 1982 nt, Artificial Sequence
  mRNA product Design h-4 comprising derived and/or modified sequence from HRSV(A2)__F-del_DSCav1_mut1 (opt1)
gggagagggcgcuuggcuugcaaggacccugagcugcggcauugaagcacacccaacccaacucgacugaagucagccucacugaaccggaucugagaaucuucucucucugggcuugccagggcucuccgaaccuagcuagcauccucuucaauuccaacuagaaagcuuaccauggagcugcucauccugaaggccaacgccaucaccaccauccugacggcggugaccuucugcuucgccagcggccagaacaucaccgaggaguucuaccaguccacgugcagcgccgucuccaagggguaccucggcgcccugcggaccggcugguacaccuccgugaucaccaucgagcugagcaacaucaaggagaacaagugcaacgggaccgacgccaaggugaagcucaucaagcaggagcuggacaaguacaagaacgcggucacggagcugcagcuccugaugcaguccaccccggcaaccggcuccggcuccgccaucugcagcggcgucgccgugugcaaggugcugcaccucgagggggaggucaacaagaucaagagcgcccugcuguccaccaacaaggccguggugagccucuccaacggcgucagcgugcugaccuucaaggugcuggaccucaagaacuacaucgacaagcagcugcugcccauccugaacaagcagagcugcuccauccccaacaucgagacggugaucgaguuccagcagaagaacaaccggcuccuggagaucacccgcgaguucagcgugaacgccggggucaccacccccguguccacguacaugcugaccaacagcgagcuccugucccugaucaacgacaugccgaucaccaacgaccagaagaagcucaugagcaacaacgugcagaucguccggcagcaguccuacagcaucaugugcaucaucaaggaggaggugcuggcguacgugguccagcugccccucuacggcgugaucgacacccccugcuggaagcugcacacgagcccccugugcaccaccaacaccaaggagggguccaacaucugccucacgcgcaccgaccggggcugguacugcgacaacgccggcagcgucuccuucuucccgcaggccgagaccugcaaggugcagagcaaccgcguguucugcgacaccaugaacucccugacgcugcccagcgagguaaaccucugcaacgucgacaucuucaaccccaaguacgacugcaagaucaugaccuccaagaccgacgugagcuccagcgugaucaccucccugggggccaucgucagcugcuacggcaagacgaagugcaccgccagcaacaagaaccgggggaucaucaagaccuucuccaacggcugcgacuacgugagcaacaagggcguggacaccguguccgucgggaacacccuguacugcgugaacaagcaggagggccagagccucuacgugaagggggagcccaucaucaacuucuacgacccgcuggucuuccccuccgacgaguucgacgcgagcaucucccaggugaacgagaagaucaaccagagccuggccuucauccgcaaguccgacgagcugcuccacaacgugaacgccggcaagagcacgaccaacaucaugaucaccaccaucaucaucgucaucaucgugauccugcugucccucaucgccguggggcugcugcucuacugcaaggcccggugaggacuaguaauaaggaaacuguaugaaugucugugggcaggaagugaagagauccuucuguaaagguuuuuggaauuaugucugcugaauaauaaacuuuuuugaaauaauaaaucugguagaaaaaugagaucuaaaaaaaaaaaaaaaaaaaaaaaaaaaaaaaaaaaaaaaaaaaaaaaaaaaaaaaaaaaaaaaaugcaucccccccccccccccccccccccccccccccaaaggcucuuuucagagccaccagaauu

SEQ ID NO: 2327 - RNA, 1982 nt, Artificial Sequence
  mRNA product Design h-4 comprising derived and/or modified sequence from HRSV(A2)__F-del_DSCav1_mut1 (opt1)
gggagagggcgcuuggcuugcaaggacccugagcugcggcauugaagcacacccaacccaacucgacugaagucagccucacugaaccggaucugagaaucuucucucucugggcuugccagggcucuccgaaccuagcuagcauccucuucaauuccaacuagaaagcuuaccauggagcugcucauccugaaggccaacgccaucaccaccauccugacggcggugaccuucugcuucgccagcggccagaacaucaccgaggaguucuaccaguccacgugcagcgccgucuccaagggguaccucggcgcccugcgcaccgggugguacaccagcgugaucaccaucgagcuguccaacaucaaggagaacaagugcaacggcaccgacgccaaggugaagcucaucaagcaggagcuggacaaguacaagaacgcggucacggagcugcagcuccugaugcagagcacccccgccaccggguccggcagcgccaucugcuccggcguggccgugugcaagguccugcaccucgagggggaggugaacaagaucaagagcgcgcugcuguccaccaacaaggccguggucagccucuccaacggcgugagcgugcugacguucaagguccuggaccucaagaacuacaucgacaagcagcugcugccgauccucaacaagcaguccugcagcauccccaacaucgagaccgugaucgaguuccagcagaagaacaaccggcugcuggagaucacccgcgaguucuccgugaacgccggggucaccacgcccgugagcaccuacaugcucaccaacuccgagcugcugagccucaucaacgacaugcccaucaccaacgaccagaagaagcugaugagcaacaacgugcagaucguccggcagcaguccuacagcaucaugugcaucaucaaggaggaggugcuggccuacgugguccagcucccgcuguacggcgugaucgacacgcccugcuggaagcugcacaccagcccccucugcaccaccaacacgaaggagggguccaacaucugccugacccgcaccgaccggggcugguacugcgacaacgccggcuccgugagcuucuucccccaggcggagaccugcaagguccaguccaaccgcguguucugcgacacgaugaacagccugacccucccguccgaggucaaccugugcaacguggacaucuucaaccccaaguacgacugcaagaucaugaccagcaagaccgacguguccagcuccgucaucacgagccugggggccaucguguccugcuacggcaagaccaagugcaccgccagcaacaagaaccgggggaucaucaagaccuucuccaacggcugcgacuacgugagcaacaagggcgucgacacgguguccguggggaacacccucuacugcgucaacaagcaggagggccagagccuguacgugaagggggagcccaucaucaacuucuacgacccccugguguucccgagcgacgaguucgacgccuccaucagccaggucaacgagaagaucaaccagucccucgccuucauccgcaagagcgacgagcugcugcacaacgugaacgcgggcaaguccaccaccaacaucaugaucaccacgaucaucaucgugaucaucgucauccuccugagccugaucgccguggggcuccugcuguacugcaaggcccggugaggacuaguaauaaggaaacuguaugaaugucugugggcaggaagugaagagauccuucuguaaagguuuuuggaauuaugucugcugaauaauaaacuuuuuugaaauaauaaaucugguagaaaaaugagaucuaaaaaaaaaaaaaaaaaaaaaaaaaaaaaaaaaaaaaaaaaaaaaaaaaaaaaaaaaaaaaaaaugcaucccccccccccccccccccccccccccccccaaaggcucuuuucagagccaccagaauu

SEQ ID NO: 2328 - RNA, 1982 nt, Artificial Sequence
  mRNA product Design h-4 comprising derived and/or modified sequence from HRSV(A2)__F-del_DSCav1_mut1 (opt2)
gggagagggcgcuuggcuugcaaggacccugagcugcggcauugaagcacacccaacccaacucgacugaagucagccucacugaaccggaucugagaaucuucucucucugggcuugccagggcucuccgaaccuagcuagcauccucuucaauuccaacuagaaagcuuaccauggagcuccucauccucaaggccaacgccaucaccaccauccucaccgccgucaccuucugcuucgccuccggccagaacaucaccgaggaguucuaccaguccaccugcuccgccgucuccaagggcuaccucggcgcccuccgcaccggcugguacaccuccgucaucaccaucgagcucuccaacaucaaggagaacaagugcaacggcaccgacgccaaggucaagcucaucaagcaggagcucgacaaguacaagaacgccgucaccgagcuccagcuccucaugcaguccacccccgccaccggcuccggcuccgccaucugcuccggcgucgccgucugcaagguccuccaccucgagggcgaggucaacaagaucaaguccgcccuccucuccaccaacaaggccgucgucucccucuccaacggcgucuccguccucaccuucaagguccucgaccucaagaacuacaucgacaagcagcuccuccccauccucaacaagcaguccugcuccauccccaacaucgagaccgucaucgaguuccagcagaagaacaaccgccuccucgagaucacccgcgaguucuccgucaacgccggcgucaccacccccgucuccaccuacaugcucaccaacuccgagcuccucucccucaucaacgacaugcccaucaccaacgaccagaagaagcucauguccaacaacguccagaucguccgccagcaguccuacuccaucaugugcaucaucaaggaggagguccucgccuacgucguccagcucccccucuacggcgucaucgacacccccugcuggaagcuccacaccuccccccucugcaccaccaacaccaaggagggcuccaacaucugccucacccgcaccgaccgcggcugguacugcgacaacgccggcuccgucuccuucuucccccaggccgagaccugcaagguccaguccaaccgcgucuucugcgacaccaugaacucccucacccuccccuccgaggucaaccucugcaacgucgacaucuucaaccccaaguacgacugcaagaucaugaccuccaagaccgacgucuccuccuccgucaucaccucccucggcgccaucgucuccugcuacggcaagaccaagugcaccgccuccaacaagaaccgcggcaucaucaagaccuucuccaacggcugcgacuacgucuccaacaagggcgucgacaccgucuccgucggcaacacccucuacugcgucaacaagcaggagggccagucccucuacgucaagggcgagcccaucaucaacuucuacgacccccucgucuuccccuccgacgaguucgacgccuccaucucccaggucaacgagaagaucaaccagucccucgccuucauccgcaaguccgacgagcuccuccacaacgucaacgccggcaaguccaccaccaacaucaugaucaccaccaucaucaucgucaucaucgucauccuccucucccucaucgccgucggccuccuccucuacugcaaggcccgcugaggacuaguaauaaggaaacuguaugaaugucugugggcaggaagugaagagauccuucuguaaagguuuuuggaauuaugucugcugaauaauaaacuuuuuugaaauaauaaaucugguagaaaaaugagaucuaaaaaaaaaaaaaaaaaaaaaaaaaaaaaaaaaaaaaaaaaaaaaaaaaaaaaaaaaaaaaaaaugcaucccccccccccccccccccccccccccccccaaaggcucuuuucagagccaccagaauu

SEQ ID NO: 2329 - RNA, 1982 nt, Artificial Sequence
  mRNA product Design h-4 comprising derived and/or modified sequence from HRSV(A2)__F-del_DSCav1_mut1 (opt3)
gggagagggcgcuuggcuugcaaggacccugagcugcggcauugaagcacacccaacccaacucgacugaagucagccucacugaaccggaucugagaaucuucucucucugggcuugccagggcucuccgaaccuagcuagcauccucuucaauuccaacuagaaagcuuaccauggagcugcucauccuuaaggccaacgcuauuaccacaauacugacugcagugacguucugcuuugccagcggccagaauaucaccgaagaguucuaccaauccacauguucugcggucucaaaaggguauuugggagcuuuaagaacugguugguacaccaguguuauuacaaucgaacugagcaacauuaaggagaauaaaugcaacggcaccgacgccaaggugaaacuaaucaagcaggaacucgauaaguauaaaaaugcaguaacugagcugcagcuucugaugcaguccacacccgccaccgggucuggaucggcuauauguucaggcguggcagucugcaagguguugcaccucgagggugaaguuaacaaaaucaagagcgcccugcugaguacgaauaaagcuguggucucccucucuaacggggugagcguauuaacuuuuaagguucuggaccuuaagaauuacauugauaaacaauugcugccuauccuaaacaagcaguccuguucaauuccaaauaucgagaccgugauagaguuccagcagaaaaacaauaggcuccuggaaauuacacgggaguuuagugucaacgccggagugacuaccccggugagcacauauaugcuuaccaauucugaacuguugucccucaucaacgacaugcccauuacgaacgaucaaaagaaacugaugucaaauaacguccagaucguucgccagcagagcuacaguaucaugugcauuauaaaggaggaaguguuagcguauguagugcaacugccucucuacggcgucaucgacacuccauguuggaaacuucauacaucuccccugugcaccacuaauacaaaggagggcuccaacauuuguuugacccgaacggaucgugggugguacugcgacaaugcaggaagcgugucguucuuuccucaggccgaaaccuguaagguucagucuaacagaguguucugcgauacaaugaacucccuaacucugccaucagaggucaaucucugcaauguggacaucuuuaaccccaaauaugauuguaagauaaugaccaguaaaacagacguaagcuccucuguuauuacuagccugggugcuaucgugucaugcuacggcaagaccaaauguacagccaguaauaagaacagggggaucauuaagaccuucuccaauggaugcgauuaugucagcaacaaaggcguggacacugucucuguggguaauacgcuuuacuguguuaacaagcaagaggggcagucacuguaugugaaaggagaaccuaucauuaacuuuuacgacccauugguauucccgagugaugaguuugacgcaagcauaucccaggucaaugaaaagaucaaccagucucucgcuuucauucggaaaucggaugagcuguuacacaaugugaacgccggcaagagcacaaccaauaucaugaucacuaccauuauaaucguuauuaucgugauucugcuaucccucaucgcggucggccugcuuuuguauugcaaggcccgcugaggacuaguaauaaggaaacuguaugaaugucugugggcaggaagugaagagauccuucuguaaagguuuuuggaauuaugucugcugaauaauaaacuuuuuugaaauaauaaaucugguagaaaaaugagaucuaaaaaaaaaaaaaaaaaaaaaaaaaaaaaaaaaaaaaaaaaaaaaaaaaaaaaaaaaaaaaaaaugcaucccccccccccccccccccccccccccccccaaaggcucuuuucagagccaccagaauu

SEQ ID NO: 2330 - RNA, 1982 nt, Artificial Sequence
  mRNA product Design h-4 comprising derived and/or modified sequence from HRSV(A2)__F-del_DSCav1_mut1 (opt4)
gggagagggcgcuuggcuugcaaggacccugagcugcggcauugaagcacacccaacccaacucgacugaagucagccucacugaaccggaucugagaaucuucucucucugggcuugccagggcucuccgaaccuagcuagcauccucuucaauuccaacuagaaagcuuaccauggagcugcugauccugaaggccaacgccaucaccaccauccugaccgccgugaccuucugcuucgccagcggccagaacaucaccgaggaguucuaccagagcaccugcagcgccgugagcaagggcuaccugggcgcccugagaaccggcugguacaccagcgugaucaccaucgagcugagcaacaucaaggagaacaagugcaacggcaccgacgccaaggugaagcugaucaagcaggagcuggacaaguacaagaacgccgugaccgagcugcagcugcugaugcagagcacccccgccaccggcagcggcagcgccaucugcagcggcguggccgugugcaaggugcugcaccuggagggcgaggugaacaagaucaagagcgcccugcugagcaccaacaaggccguggugagccugagcaacggcgugagcgugcugaccuucaaggugcuggaccugaagaacuacaucgacaagcagcugcugcccauccugaacaagcagagcugcagcauccccaacaucgagaccgugaucgaguuccagcagaagaacaacagacugcuggagaucaccagagaguucagcgugaacgccggcgugaccacccccgugagcaccuacaugcugaccaacagcgagcugcugagccugaucaacgacaugcccaucaccaacgaccagaagaagcugaugagcaacaacgugcagaucgugagacagcagagcuacagcaucaugugcaucaucaaggaggaggugcuggccuacguggugcagcugccccuguacggcgugaucgacacccccugcuggaagcugcacaccagcccccugugcaccaccaacaccaaggagggcagcaacaucugccugaccagaaccgacagaggcugguacugcgacaacgccggcagcgugagcuucuucccccaggccgagaccugcaaggugcagagcaacagaguguucugcgacaccaugaacagccugacccugcccagcgaggugaaccugugcaacguggacaucuucaaccccaaguacgacugcaagaucaugaccagcaagaccgacgugagcagcagcgugaucaccagccugggcgccaucgugagcugcuacggcaagaccaagugcaccgccagcaacaagaacagaggcaucaucaagaccuucagcaacggcugcgacuacgugagcaacaagggcguggacaccgugagcgugggcaacacccuguacugcgugaacaagcaggagggccagagccuguacgugaagggcgagcccaucaucaacuucuacgacccccugguguuccccagcgacgaguucgacgccagcaucagccaggugaacgagaagaucaaccagagccuggccuucaucagaaagagcgacgagcugcugcacaacgugaacgccggcaagagcaccaccaacaucaugaucaccaccaucaucaucgugaucaucgugauccugcugagccugaucgccgugggccugcugcuguacugcaaggccagaugaggacuaguaauaaggaaacuguaugaaugucugugggcaggaagugaagagauccuucuguaaagguuuuuggaauuaugucugcugaauaauaaacuuuuuugaaauaauaaaucugguagaaaaaugagaucuaaaaaaaaaaaaaaaaaaaaaaaaaaaaaaaaaaaaaaaaaaaaaaaaaaaaaaaaaaaaaaaaugcaucccccccccccccccccccccccccccccccaaaggcucuuuucagagccaccagaauu

SEQ ID NO: 2331 - RNA, 1982 nt, Artificial Sequence
  mRNA product Design h-4 comprising derived and/or modified sequence from HRSV(A2)__F-del_DSCav1_mut1 (opt5)
gggagagggcgcuuggcuugcaaggacccugagcugcggcauugaagcacacccaacccaacucgacugaagucagccucacugaaccggaucugagaaucuucucucucugggcuugccagggcucuccgaaccuagcuagcauccucuucaauuccaacuagaaagcuuaccauggagcugcucauccugaaggccaacgcuauuaccacaauccuuacggccgugaccuucugcuuugcgagcggccagaauauuacagaagaguucuaccaauccaccuguucugcugucagcaaaggguaucugggagcccucagaacaggcugguacaccuccguuaucacaauugaacugucuaacaucaaggagaauaaaugcaacgggaccgacgccaaggugaaacuuaucaagcaggaacuggauaaguauaaaaaugcugugacggagcuccagcugcugaugcagagcacccccgccacaggauccggcucugcuauuuguagcggggucgccgugugcaagguucuccaccuggagggagaagugaacaaaaucaaguccgcgcuucugagcaccaauaaagccgucgugucucucuccaacggcguuagcgugcugacauuuaagguccuugaccugaagaauuacauugauaaacaacuccugccuauccugaacaagcagucuuguuccauuccgaauaucgagaccgugauugaguuccagcagaaaaacaaucggcuccuggaaaucacgcgcgaguuuagcgugaacgcuggcgucacaacccccguuucuacauauaugcuuaccaauuccgaacugcucagccugaucaacgacaugccuauuaccaacgaucaaaagaaacuuauguccaauaacgugcagaucgugagacagcagucuuacagcauuaugugcaucauuaaggaggaaguccuggccuaugugguucaacucccccuguacggggugaucgacacaccuuguuggaaacugcauacgagcccccucugcaccacaaauaccaaggagggauccaacaucugucugacacggaccgaucgcggcugguacugcgacaaugcugggucugucuccuucuuuccucaggccgaaacguguaaggugcagagcaacagaguuuucugcgauacaaugaacucucuuacccugccgagcgaggugaaucucugcaaugucgacauuuuuaaccccaaauaugauuguaagaucaugaccuccaaaacagacgugucuagcuccgucauuaccagccugggagcgaucgugucuugcuacggcaagacaaaauguacggccuccaauaagaaccgggggauuaucaagaccuucagcaauggaugcgauuauguuucuaacaaaggcguggacacagucuccgugggcaauacccuuuacuguguuaacaagcaagaggggcagagccuguaugugaaaggagaaccuaucauuaacuuuuacgacccccucgucuucccuuccgaugaguuugacgcuucuaucagccaggugaaugaaaagauuaaccagucccuggccuucauccgcaaaucugaugagcugcuccacaaugugaacgcuggcaagagcacaaccaauauuaugaucacgaccauuaucaucguuauuaucgucauucugcuuucccugaucgccguggggcuccugcuguauugcaaggccagaugaggacuaguaauaaggaaacuguaugaaugucugugggcaggaagugaagagauccuucuguaaagguuuuuggaauuaugucugcugaauaauaaacuuuuuugaaauaauaaaucugguagaaaaaugagaucuaaaaaaaaaaaaaaaaaaaaaaaaaaaaaaaaaaaaaaaaaaaaaaaaaaaaaaaaaaaaaaaaugcaucccccccccccccccccccccccccccccccaaaggcucuuuucagagccaccagaauu

SEQ ID NO: 2332 - RNA, 1982 nt, Artificial Sequence
  mRNA product Design h-4 comprising derived and/or modified sequence from HRSV(A2)__F-del_DSCav1_mut1 (opt6)
gggagagggcgcuuggcuugcaaggacccugagcugcggcauugaagcacacccaacccaacucgacugaagucagccucacugaaccggaucugagaaucuucucucucugggcuugccagggcucuccgaaccuagcuagcauccucuucaauuccaacuagaaagcuuaccauggaacuacucaucuuaaaagcaaacgcaauaacaacuauucuaaccgcaguaacauuuuguuucgcaucaggacaaaacauaaccgaagaauuuuaccaaucaacauguuccgcaguuucaaaaggauacuuaggcgcacuaagaacaggcugguacaccuccgugauaacaauagaauuaucaaacauaaaagaaaacaaauguaauggaacugacgccaaaguaaaacuaauaaaacaagaacuagacaaauauaaaaacgcaguaacugaacuacaauuacuaaugcaauccaccccagcaacaggcucaggcucagcaauuugcuccggagucgcugucugcaaaguacuacaucuugaaggcgaagucaauaaaauaaaaucagcacuucuaucaacaaacaaagcaguagucucacuaucaaacggaguaucaguacuaacauuuaaaguauuagaucuaaaaaacuauauagauaaacaacuacuacccauacucaauaaacaauccuguucaauaccaaauauagaaaccguaauagaauuucaacaaaaaaacaaucgacuauuagaaaucacccgagaauuuucagucaaugcaggcguaacaacaccaguaucaaccuacauguuaaccaacuccgaacuacuaucccucauaaacgacaugccaauaacaaacgaucaaaaaaaacuaauguccaacaacguacaaauagucagacaacaaucuuauucaauaaugugcaucauaaaagaagaaguucuagccuacguaguucaacuuccauuauacggcguaauugauacaccaugcuggaaacuacacacauccccacuauguacaacaaacacaaaagaaggaucaaacaucugcuuaacuagaacagacagaggaugguacugcgacaacgcaggaucagucucauucuuuccacaagcagaaacaugcaagguccaaucaaacagaguauucugcgacacaaugaacuccuuaacacuaccaucugaaguaaaccuauguaauguagacauauuuaacccaaaauacgacugcaaaauaaugaccucaaaaacagacguauccucaucaguaauuacaagccucggagccauaguaucaugcuacggaaaaacaaaauguacagcaucaaacaaaaacagaggaauaauaaaaacguucuccaacggaugcgacuauguaucaaacaaaggcguagacacaguaucagucggaaauacccuuuacugcguaaacaaacaagaaggccaaagucuauacguaaaaggagagccaauaauaaacuuuuaugacccccuuguauucccaucugacgaauuugaugcaucaauaucccaagucaacgaaaaaaucaaccaaucauuagccuuuauuagaaaaagugacgaacuauuacacaacguuaaugcagggaaaucaacaacaaauauaaugauuacaaccauaauuauaguuaucauaguuauacuacucucacuaaucgcaguaggauuacuauuauacugcaaagcaagauaaggacuaguaauaaggaaacuguaugaaugucugugggcaggaagugaagagauccuucuguaaagguuuuuggaauuaugucugcugaauaauaaacuuuuuugaaauaauaaaucugguagaaaaaugagaucuaaaaaaaaaaaaaaaaaaaaaaaaaaaaaaaaaaaaaaaaaaaaaaaaaaaaaaaaaaaaaaaaugcaucccccccccccccccccccccccccccccccaaaggcucuuuucagagccaccagaauu

SEQ ID NO: 2333 - RNA, 1982 nt, Artificial Sequence
  mRNA product Design h-4 comprising derived and/or modified sequence from HRSV(A2)__F-del_DSCav1_mut1 (opt11)
gggagagggcgcuuggcuugcaaggacccugagcugcggcauugaagcacacccaacccaacucgacugaagucagccucacugaaccggaucugagaaucuucucucucugggcuugccagggcucuccgaaccuagcuagcauccucuucaauuccaacuagaaagcuuaccauggaacuacucauccuaaaagccaacgcaaucacaaccauacuuacagcuguuaccuucugcuucgcauccggccaaaauaucaccgaagaguucuaccaaucaaccugcuccgccgucagcaaaggauaccucggcgcccuccgaaccggaugguacacuucugucaucacaaucgaacucuccaacaucaaagaaaacaaaugcaacgguaccgacgcgaaagucaaacucaucaaacaagaacuagacaaguacaaaaacgccgucaccgaacugcaacuccucaugcaauccacaccagcaacgggaucaggauccgccaucugcucaggcgucgccgucugcaaaguccugcaccuagaaggagaaguaaacaaaauuaaauccgcccuacucuccaccaacaaagcagucgucucacuauccaacggcgucuccguccucaccuuuaagguccucgaccucaaaaauuauauagacaaacaacuccuccccauccuaaacaaacaaucaugcuccauccccaacauagaaaccgucaucgaauuucaacagaaaaacaaccgacucuuagaaauuacccgcgaguucagcgucaacgccggagucaccacacccgucucaaccuacaugcucaccaacucagaacuccucucacuaaucaaugauaugcccaucacaaacgaccaaaagaaacucauguccaacaacguacaaaucguucgccaacaaagcuacuccaucauguguaucauuaaagaagaaguccucgccuacgucguccaacuuccgcucuacggcguaaucgacacccccugcuggaaacuucacaccucgccccucugcaccacaaacaccaaagaaggcuccaacaucugccuaacccgcaccgaccgcggcugguacugcgacaacgccggcuccgucucauuuuucccccaggcggagaccugcaaaguccaauccaaccgcgucuucugcgacaccaugaacucucuuacccucccaucagaaguaaaccucugcaacgucgacaucuuuaaccccaaauacgauugcaagauaaugaccuccaaaacagacgucucaucguccgucaucaccucccuaggagcuaucgucuccugcuacggcaagaccaaaugcaccgcuuccaacaaaaaccgcggcaucaucaaaaccuucuccaacgggugcgacuacgucucuaacaaaggcguggacacaguauccguaggaaacacacuguacugcguaaacaaacaagagggccaaucgcuuuacgucaaaggcgagccaauuaucaacuucuacgacccgcucgucuucccaucagacgaguucgacgcauccaucucccaagucaacgagaaaaucaaucagucccucgccuucauacgcaaauccgacgaacuccuacauaacguaaacgccggcaaaucuaccacaaacaucaugaucacaaccaucaucaucguaaucaucgucauccuucucucgcucaucgccguaggacugcuacuuuacugcaaggcccgcuaaggacuaguaauaaggaaacuguaugaaugucugugggcaggaagugaagagauccuucuguaaagguuuuuggaauuaugucugcugaauaauaaacuuuuuugaaauaauaaaucugguagaaaaaugagaucuaaaaaaaaaaaaaaaaaaaaaaaaaaaaaaaaaaaaaaaaaaaaaaaaaaaaaaaaaaaaaaaaugcaucccccccccccccccccccccccccccccccaaaggcucuuuucagagccaccagaauu

SEQ ID NO: 2334 - RNA, 1998 nt, Artificial Sequence
  mRNA product Design h-5 comprising derived and/or modified sequence from HRSV(A2)__F-del_DSCav1_mut1 (opt1)
gggagagggcgcuuggcuugcaaggacccugagcugcggcauugaagcacacccaacccaacucgacugaagucagccucacugaaccggaucugagaaucuucucucucugggcuugccagggcucuccgaaccuagcuagcauccucuucaauuccaacuagaaagcuuaccauggagcugcucauccugaaggccaacgccaucaccaccauccugacggcggugaccuucugcuucgccagcggccagaacaucaccgaggaguucuaccaguccacgugcagcgccgucuccaagggguaccucggcgcccugcggaccggcugguacaccuccgugaucaccaucgagcugagcaacaucaaggagaacaagugcaacgggaccgacgccaaggugaagcucaucaagcaggagcuggacaaguacaagaacgcggucacggagcugcagcuccugaugcaguccaccccggcaaccggcuccggcuccgccaucugcagcggcgucgccgugugcaaggugcugcaccucgagggggaggucaacaagaucaagagcgcccugcuguccaccaacaaggccguggugagccucuccaacggcgucagcgugcugaccuucaaggugcuggaccucaagaacuacaucgacaagcagcugcugcccauccugaacaagcagagcugcuccauccccaacaucgagacggugaucgaguuccagcagaagaacaaccggcuccuggagaucacccgcgaguucagcgugaacgccggggucaccacccccguguccacguacaugcugaccaacagcgagcuccugucccugaucaacgacaugccgaucaccaacgaccagaagaagcucaugagcaacaacgugcagaucguccggcagcaguccuacagcaucaugugcaucaucaaggaggaggugcuggcguacgugguccagcugccccucuacggcgugaucgacacccccugcuggaagcugcacacgagcccccugugcaccaccaacaccaaggagggguccaacaucugccucacgcgcaccgaccggggcugguacugcgacaacgccggcagcgucuccuucuucccgcaggccgagaccugcaaggugcagagcaaccgcguguucugcgacaccaugaacucccugacgcugcccagcgagguaaaccucugcaacgucgacaucuucaaccccaaguacgacugcaagaucaugaccuccaagaccgacgugagcuccagcgugaucaccucccugggggccaucgucagcugcuacggcaagacgaagugcaccgccagcaacaagaaccgggggaucaucaagaccuucuccaacggcugcgacuacgugagcaacaagggcguggacaccguguccgucgggaacacccuguacugcgugaacaagcaggagggccagagccucuacgugaagggggagcccaucaucaacuucuacgacccgcuggucuuccccuccgacgaguucgacgcgagcaucucccaggugaacgagaagaucaaccagagccuggccuucauccgcaaguccgacgagcugcuccacaacgugaacgccggcaagagcacgaccaacaucaugaucaccaccaucaucaucgucaucaucgugauccugcugucccucaucgccguggggcugcugcucuacugcaaggcccggugaggacuaguacuggcugcaucucccuuuccucuguccuccauccuucucccaggauggugaagggggaccugguacccagugauccccaccccaggauccuaaaucaugacuuaccugcuaauaaaaacucauuggaaaagugagaagaucuaaaaaaaaaaaaaaaaaaaaaaaaaaaaaaaaaaaaaaaaaaaaaaaaaaaaaaaaaaaaaaaaugcaucccccccccccccccccccccccccccccccaaaggcucuuuucagagccaccagaauu

SEQ ID NO: 2335 - RNA, 1998 nt, Artificial Sequence
  mRNA product Design h-5 comprising derived and/or modified sequence from HRSV(A2)__F-del_DSCav1_mut1 (opt1)
gggagagggcgcuuggcuugcaaggacccugagcugcggcauugaagcacacccaacccaacucgacugaagucagccucacugaaccggaucugagaaucuucucucucugggcuugccagggcucuccgaaccuagcuagcauccucuucaauuccaacuagaaagcuuaccauggagcugcucauccugaaggccaacgccaucaccaccauccugacggcggugaccuucugcuucgccagcggccagaacaucaccgaggaguucuaccaguccacgugcagcgccgucuccaagggguaccucggcgcccugcgcaccgggugguacaccagcgugaucaccaucgagcuguccaacaucaaggagaacaagugcaacggcaccgacgccaaggugaagcucaucaagcaggagcuggacaaguacaagaacgcggucacggagcugcagcuccugaugcagagcacccccgccaccggguccggcagcgccaucugcuccggcguggccgugugcaagguccugcaccucgagggggaggugaacaagaucaagagcgcgcugcuguccaccaacaaggccguggucagccucuccaacggcgugagcgugcugacguucaagguccuggaccucaagaacuacaucgacaagcagcugcugccgauccucaacaagcaguccugcagcauccccaacaucgagaccgugaucgaguuccagcagaagaacaaccggcugcuggagaucacccgcgaguucuccgugaacgccggggucaccacgcccgugagcaccuacaugcucaccaacuccgagcugcugagccucaucaacgacaugcccaucaccaacgaccagaagaagcugaugagcaacaacgugcagaucguccggcagcaguccuacagcaucaugugcaucaucaaggaggaggugcuggccuacgugguccagcucccgcuguacggcgugaucgacacgcccugcuggaagcugcacaccagcccccucugcaccaccaacacgaaggagggguccaacaucugccugacccgcaccgaccggggcugguacugcgacaacgccggcuccgugagcuucuucccccaggcggagaccugcaagguccaguccaaccgcguguucugcgacacgaugaacagccugacccucccguccgaggucaaccugugcaacguggacaucuucaaccccaaguacgacugcaagaucaugaccagcaagaccgacguguccagcuccgucaucacgagccugggggccaucguguccugcuacggcaagaccaagugcaccgccagcaacaagaaccgggggaucaucaagaccuucuccaacggcugcgacuacgugagcaacaagggcgucgacacgguguccguggggaacacccucuacugcgucaacaagcaggagggccagagccuguacgugaagggggagcccaucaucaacuucuacgacccccugguguucccgagcgacgaguucgacgccuccaucagccaggucaacgagaagaucaaccagucccucgccuucauccgcaagagcgacgagcugcugcacaacgugaacgcgggcaaguccaccaccaacaucaugaucaccacgaucaucaucgugaucaucgucauccuccugagccugaucgccguggggcuccugcuguacugcaaggcccggugaggacuaguacuggcugcaucucccuuuccucuguccuccauccuucucccaggauggugaagggggaccugguacccagugauccccaccccaggauccuaaaucaugacuuaccugcuaauaaaaacucauuggaaaagugagaagaucuaaaaaaaaaaaaaaaaaaaaaaaaaaaaaaaaaaaaaaaaaaaaaaaaaaaaaaaaaaaaaaaaugcaucccccccccccccccccccccccccccccccaaaggcucuuuucagagccaccagaauu

SEQ ID NO: 2336 - RNA, 1998 nt, Artificial Sequence
  mRNA product Design h-5 comprising derived and/or modified sequence from HRSV(A2)__F-del_DSCav1_mut1 (opt2)
gggagagggcgcuuggcuugcaaggacccugagcugcggcauugaagcacacccaacccaacucgacugaagucagccucacugaaccggaucugagaaucuucucucucugggcuugccagggcucuccgaaccuagcuagcauccucuucaauuccaacuagaaagcuuaccauggagcuccucauccucaaggccaacgccaucaccaccauccucaccgccgucaccuucugcuucgccuccggccagaacaucaccgaggaguucuaccaguccaccugcuccgccgucuccaagggcuaccucggcgcccuccgcaccggcugguacaccuccgucaucaccaucgagcucuccaacaucaaggagaacaagugcaacggcaccgacgccaaggucaagcucaucaagcaggagcucgacaaguacaagaacgccgucaccgagcuccagcuccucaugcaguccacccccgccaccggcuccggcuccgccaucugcuccggcgucgccgucugcaagguccuccaccucgagggcgaggucaacaagaucaaguccgcccuccucuccaccaacaaggccgucgucucccucuccaacggcgucuccguccucaccuucaagguccucgaccucaagaacuacaucgacaagcagcuccuccccauccucaacaagcaguccugcuccauccccaacaucgagaccgucaucgaguuccagcagaagaacaaccgccuccucgagaucacccgcgaguucuccgucaacgccggcgucaccacccccgucuccaccuacaugcucaccaacuccgagcuccucucccucaucaacgacaugcccaucaccaacgaccagaagaagcucauguccaacaacguccagaucguccgccagcaguccuacuccaucaugugcaucaucaaggaggagguccucgccuacgucguccagcucccccucuacggcgucaucgacacccccugcuggaagcuccacaccuccccccucugcaccaccaacaccaaggagggcuccaacaucugccucacccgcaccgaccgcggcugguacugcgacaacgccggcuccgucuccuucuucccccaggccgagaccugcaagguccaguccaaccgcgucuucugcgacaccaugaacucccucacccuccccuccgaggucaaccucugcaacgucgacaucuucaaccccaaguacgacugcaagaucaugaccuccaagaccgacgucuccuccuccgucaucaccucccucggcgccaucgucuccugcuacggcaagaccaagugcaccgccuccaacaagaaccgcggcaucaucaagaccuucuccaacggcugcgacuacgucuccaacaagggcgucgacaccgucuccgucggcaacacccucuacugcgucaacaagcaggagggccagucccucuacgucaagggcgagcccaucaucaacuucuacgacccccucgucuuccccuccgacgaguucgacgccuccaucucccaggucaacgagaagaucaaccagucccucgccuucauccgcaaguccgacgagcuccuccacaacgucaacgccggcaaguccaccaccaacaucaugaucaccaccaucaucaucgucaucaucgucauccuccucucccucaucgccgucggccuccuccucuacugcaaggcccgcugaggacuaguacuggcugcaucucccuuuccucuguccuccauccuucucccaggauggugaagggggaccugguacccagugauccccaccccaggauccuaaaucaugacuuaccugcuaauaaaaacucauuggaaaagugagaagaucuaaaaaaaaaaaaaaaaaaaaaaaaaaaaaaaaaaaaaaaaaaaaaaaaaaaaaaaaaaaaaaaaugcaucccccccccccccccccccccccccccccccaaaggcucuuuucagagccaccagaauu

SEQ ID NO: 2337 - RNA, 1998 nt, Artificial Sequence
  mRNA product Design h-5 comprising derived and/or modified sequence from HRSV(A2)__F-del_DSCav1_mut1 (opt3)
gggagagggcgcuuggcuugcaaggacccugagcugcggcauugaagcacacccaacccaacucgacugaagucagccucacugaaccggaucugagaaucuucucucucugggcuugccagggcucuccgaaccuagcuagcauccucuucaauuccaacuagaaagcuuaccauggagcugcucauccuuaaggccaacgcuauuaccacaauacugacugcagugacguucugcuuugccagcggccagaauaucaccgaagaguucuaccaauccacauguucugcggucucaaaaggguauuugggagcuuuaagaacugguugguacaccaguguuauuacaaucgaacugagcaacauuaaggagaauaaaugcaacggcaccgacgccaaggugaaacuaaucaagcaggaacucgauaaguauaaaaaugcaguaacugagcugcagcuucugaugcaguccacacccgccaccgggucuggaucggcuauauguucaggcguggcagucugcaagguguugcaccucgagggugaaguuaacaaaaucaagagcgcccugcugaguacgaauaaagcuguggucucccucucuaacggggugagcguauuaacuuuuaagguucuggaccuuaagaauuacauugauaaacaauugcugccuauccuaaacaagcaguccuguucaauuccaaauaucgagaccgugauagaguuccagcagaaaaacaauaggcuccuggaaauuacacgggaguuuagugucaacgccggagugacuaccccggugagcacauauaugcuuaccaauucugaacuguugucccucaucaacgacaugcccauuacgaacgaucaaaagaaacugaugucaaauaacguccagaucguucgccagcagagcuacaguaucaugugcauuauaaaggaggaaguguuagcguauguagugcaacugccucucuacggcgucaucgacacuccauguuggaaacuucauacaucuccccugugcaccacuaauacaaaggagggcuccaacauuuguuugacccgaacggaucgugggugguacugcgacaaugcaggaagcgugucguucuuuccucaggccgaaaccuguaagguucagucuaacagaguguucugcgauacaaugaacucccuaacucugccaucagaggucaaucucugcaauguggacaucuuuaaccccaaauaugauuguaagauaaugaccaguaaaacagacguaagcuccucuguuauuacuagccugggugcuaucgugucaugcuacggcaagaccaaauguacagccaguaauaagaacagggggaucauuaagaccuucuccaauggaugcgauuaugucagcaacaaaggcguggacacugucucuguggguaauacgcuuuacuguguuaacaagcaagaggggcagucacuguaugugaaaggagaaccuaucauuaacuuuuacgacccauugguauucccgagugaugaguuugacgcaagcauaucccaggucaaugaaaagaucaaccagucucucgcuuucauucggaaaucggaugagcuguuacacaaugugaacgccggcaagagcacaaccaauaucaugaucacuaccauuauaaucguuauuaucgugauucugcuaucccucaucgcggucggccugcuuuuguauugcaaggcccgcugaggacuaguacuggcugcaucucccuuuccucuguccuccauccuucucccaggauggugaagggggaccugguacccagugauccccaccccaggauccuaaaucaugacuuaccugcuaauaaaaacucauuggaaaagugagaagaucuaaaaaaaaaaaaaaaaaaaaaaaaaaaaaaaaaaaaaaaaaaaaaaaaaaaaaaaaaaaaaaaaugcaucccccccccccccccccccccccccccccccaaaggcucuuuucagagccaccagaauu

SEQ ID NO: 2338 - RNA, 1998 nt, Artificial Sequence
  mRNA product Design h-5 comprising derived and/or modified sequence from HRSV(A2)__F-del_DSCav1_mut1 (opt4)
gggagagggcgcuuggcuugcaaggacccugagcugcggcauugaagcacacccaacccaacucgacugaagucagccucacugaaccggaucugagaaucuucucucucugggcuugccagggcucuccgaaccuagcuagcauccucuucaauuccaacuagaaagcuuaccauggagcugcugauccugaaggccaacgccaucaccaccauccugaccgccgugaccuucugcuucgccagcggccagaacaucaccgaggaguucuaccagagcaccugcagcgccgugagcaagggcuaccugggcgcccugagaaccggcugguacaccagcgugaucaccaucgagcugagcaacaucaaggagaacaagugcaacggcaccgacgccaaggugaagcugaucaagcaggagcuggacaaguacaagaacgccgugaccgagcugcagcugcugaugcagagcacccccgccaccggcagcggcagcgccaucugcagcggcguggccgugugcaaggugcugcaccuggagggcgaggugaacaagaucaagagcgcccugcugagcaccaacaaggccguggugagccugagcaacggcgugagcgugcugaccuucaaggugcuggaccugaagaacuacaucgacaagcagcugcugcccauccugaacaagcagagcugcagcauccccaacaucgagaccgugaucgaguuccagcagaagaacaacagacugcuggagaucaccagagaguucagcgugaacgccggcgugaccacccccgugagcaccuacaugcugaccaacagcgagcugcugagccugaucaacgacaugcccaucaccaacgaccagaagaagcugaugagcaacaacgugcagaucgugagacagcagagcuacagcaucaugugcaucaucaaggaggaggugcuggccuacguggugcagcugccccuguacggcgugaucgacacccccugcuggaagcugcacaccagcccccugugcaccaccaacaccaaggagggcagcaacaucugccugaccagaaccgacagaggcugguacugcgacaacgccggcagcgugagcuucuucccccaggccgagaccugcaaggugcagagcaacagaguguucugcgacaccaugaacagccugacccugcccagcgaggugaaccugugcaacguggacaucuucaaccccaaguacgacugcaagaucaugaccagcaagaccgacgugagcagcagcgugaucaccagccugggcgccaucgugagcugcuacggcaagaccaagugcaccgccagcaacaagaacagaggcaucaucaagaccuucagcaacggcugcgacuacgugagcaacaagggcguggacaccgugagcgugggcaacacccuguacugcgugaacaagcaggagggccagagccuguacgugaagggcgagcccaucaucaacuucuacgacccccugguguuccccagcgacgaguucgacgccagcaucagccaggugaacgagaagaucaaccagagccuggccuucaucagaaagagcgacgagcugcugcacaacgugaacgccggcaagagcaccaccaacaucaugaucaccaccaucaucaucgugaucaucgugauccugcugagccugaucgccgugggccugcugcuguacugcaaggccagaugaggacuaguacuggcugcaucucccuuuccucuguccuccauccuucucccaggauggugaagggggaccugguacccagugauccccaccccaggauccuaaaucaugacuuaccugcuaauaaaaacucauuggaaaagugagaagaucuaaaaaaaaaaaaaaaaaaaaaaaaaaaaaaaaaaaaaaaaaaaaaaaaaaaaaaaaaaaaaaaaugcaucccccccccccccccccccccccccccccccaaaggcucuuuucagagccaccagaauu

SEQ ID NO: 2339 - RNA, 1998 nt, Artificial Sequence
  mRNA product Design h-5 comprising derived and/or modified sequence from HRSV(A2)__F-del_DSCav1_mut1 (opt5)
gggagagggcgcuuggcuugcaaggacccugagcugcggcauugaagcacacccaacccaacucgacugaagucagccucacugaaccggaucugagaaucuucucucucugggcuugccagggcucuccgaaccuagcuagcauccucuucaauuccaacuagaaagcuuaccauggagcugcucauccugaaggccaacgcuauuaccacaauccuuacggccgugaccuucugcuuugcgagcggccagaauauuacagaagaguucuaccaauccaccuguucugcugucagcaaaggguaucugggagcccucagaacaggcugguacaccuccguuaucacaauugaacugucuaacaucaaggagaauaaaugcaacgggaccgacgccaaggugaaacuuaucaagcaggaacuggauaaguauaaaaaugcugugacggagcuccagcugcugaugcagagcacccccgccacaggauccggcucugcuauuuguagcggggucgccgugugcaagguucuccaccuggagggagaagugaacaaaaucaaguccgcgcuucugagcaccaauaaagccgucgugucucucuccaacggcguuagcgugcugacauuuaagguccuugaccugaagaauuacauugauaaacaacuccugccuauccugaacaagcagucuuguuccauuccgaauaucgagaccgugauugaguuccagcagaaaaacaaucggcuccuggaaaucacgcgcgaguuuagcgugaacgcuggcgucacaacccccguuucuacauauaugcuuaccaauuccgaacugcucagccugaucaacgacaugccuauuaccaacgaucaaaagaaacuuauguccaauaacgugcagaucgugagacagcagucuuacagcauuaugugcaucauuaaggaggaaguccuggccuaugugguucaacucccccuguacggggugaucgacacaccuuguuggaaacugcauacgagcccccucugcaccacaaauaccaaggagggauccaacaucugucugacacggaccgaucgcggcugguacugcgacaaugcugggucugucuccuucuuuccucaggccgaaacguguaaggugcagagcaacagaguuuucugcgauacaaugaacucucuuacccugccgagcgaggugaaucucugcaaugucgacauuuuuaaccccaaauaugauuguaagaucaugaccuccaaaacagacgugucuagcuccgucauuaccagccugggagcgaucgugucuugcuacggcaagacaaaauguacggccuccaauaagaaccgggggauuaucaagaccuucagcaauggaugcgauuauguuucuaacaaaggcguggacacagucuccgugggcaauacccuuuacuguguuaacaagcaagaggggcagagccuguaugugaaaggagaaccuaucauuaacuuuuacgacccccucgucuucccuuccgaugaguuugacgcuucuaucagccaggugaaugaaaagauuaaccagucccuggccuucauccgcaaaucugaugagcugcuccacaaugugaacgcuggcaagagcacaaccaauauuaugaucacgaccauuaucaucguuauuaucgucauucugcuuucccugaucgccguggggcuccugcuguauugcaaggccagaugaggacuaguacuggcugcaucucccuuuccucuguccuccauccuucucccaggauggugaagggggaccugguacccagugauccccaccccaggauccuaaaucaugacuuaccugcuaauaaaaacucauuggaaaagugagaagaucuaaaaaaaaaaaaaaaaaaaaaaaaaaaaaaaaaaaaaaaaaaaaaaaaaaaaaaaaaaaaaaaaugcaucccccccccccccccccccccccccccccccaaaggcucuuuucagagccaccagaauu

SEQ ID NO: 2340 - RNA, 1998 nt, Artificial Sequence
  mRNA product Design h-5 comprising derived and/or modified sequence from HRSV(A2)__F-del_DSCav1_mut1 (opt6)
gggagagggcgcuuggcuugcaaggacccugagcugcggcauugaagcacacccaacccaacucgacugaagucagccucacugaaccggaucugagaaucuucucucucugggcuugccagggcucuccgaaccuagcuagcauccucuucaauuccaacuagaaagcuuaccauggaacuacucaucuuaaaagcaaacgcaauaacaacuauucuaaccgcaguaacauuuuguuucgcaucaggacaaaacauaaccgaagaauuuuaccaaucaacauguuccgcaguuucaaaaggauacuuaggcgcacuaagaacaggcugguacaccuccgugauaacaauagaauuaucaaacauaaaagaaaacaaauguaauggaacugacgccaaaguaaaacuaauaaaacaagaacuagacaaauauaaaaacgcaguaacugaacuacaauuacuaaugcaauccaccccagcaacaggcucaggcucagcaauuugcuccggagucgcugucugcaaaguacuacaucuugaaggcgaagucaauaaaauaaaaucagcacuucuaucaacaaacaaagcaguagucucacuaucaaacggaguaucaguacuaacauuuaaaguauuagaucuaaaaaacuauauagauaaacaacuacuacccauacucaauaaacaauccuguucaauaccaaauauagaaaccguaauagaauuucaacaaaaaaacaaucgacuauuagaaaucacccgagaauuuucagucaaugcaggcguaacaacaccaguaucaaccuacauguuaaccaacuccgaacuacuaucccucauaaacgacaugccaauaacaaacgaucaaaaaaaacuaauguccaacaacguacaaauagucagacaacaaucuuauucaauaaugugcaucauaaaagaagaaguucuagccuacguaguucaacuuccauuauacggcguaauugauacaccaugcuggaaacuacacacauccccacuauguacaacaaacacaaaagaaggaucaaacaucugcuuaacuagaacagacagaggaugguacugcgacaacgcaggaucagucucauucuuuccacaagcagaaacaugcaagguccaaucaaacagaguauucugcgacacaaugaacuccuuaacacuaccaucugaaguaaaccuauguaauguagacauauuuaacccaaaauacgacugcaaaauaaugaccucaaaaacagacguauccucaucaguaauuacaagccucggagccauaguaucaugcuacggaaaaacaaaauguacagcaucaaacaaaaacagaggaauaauaaaaacguucuccaacggaugcgacuauguaucaaacaaaggcguagacacaguaucagucggaaauacccuuuacugcguaaacaaacaagaaggccaaagucuauacguaaaaggagagccaauaauaaacuuuuaugacccccuuguauucccaucugacgaauuugaugcaucaauaucccaagucaacgaaaaaaucaaccaaucauuagccuuuauuagaaaaagugacgaacuauuacacaacguuaaugcagggaaaucaacaacaaauauaaugauuacaaccauaauuauaguuaucauaguuauacuacucucacuaaucgcaguaggauuacuauuauacugcaaagcaagauaaggacuaguacuggcugcaucucccuuuccucuguccuccauccuucucccaggauggugaagggggaccugguacccagugauccccaccccaggauccuaaaucaugacuuaccugcuaauaaaaacucauuggaaaagugagaagaucuaaaaaaaaaaaaaaaaaaaaaaaaaaaaaaaaaaaaaaaaaaaaaaaaaaaaaaaaaaaaaaaaugcaucccccccccccccccccccccccccccccccaaaggcucuuuucagagccaccagaauu

SEQ ID NO: 2341 - RNA, 1998 nt, Artificial Sequence
  mRNA product Design h-5 comprising derived and/or modified sequence from HRSV(A2)__F-del_DSCav1_mut1 (opt11)
gggagagggcgcuuggcuugcaaggacccugagcugcggcauugaagcacacccaacccaacucgacugaagucagccucacugaaccggaucugagaaucuucucucucugggcuugccagggcucuccgaaccuagcuagcauccucuucaauuccaacuagaaagcuuaccauggaacuacucauccuaaaagccaacgcaaucacaaccauacuuacagcuguuaccuucugcuucgcauccggccaaaauaucaccgaagaguucuaccaaucaaccugcuccgccgucagcaaaggauaccucggcgcccuccgaaccggaugguacacuucugucaucacaaucgaacucuccaacaucaaagaaaacaaaugcaacgguaccgacgcgaaagucaaacucaucaaacaagaacuagacaaguacaaaaacgccgucaccgaacugcaacuccucaugcaauccacaccagcaacgggaucaggauccgccaucugcucaggcgucgccgucugcaaaguccugcaccuagaaggagaaguaaacaaaauuaaauccgcccuacucuccaccaacaaagcagucgucucacuauccaacggcgucuccguccucaccuuuaagguccucgaccucaaaaauuauauagacaaacaacuccuccccauccuaaacaaacaaucaugcuccauccccaacauagaaaccgucaucgaauuucaacagaaaaacaaccgacucuuagaaauuacccgcgaguucagcgucaacgccggagucaccacacccgucucaaccuacaugcucaccaacucagaacuccucucacuaaucaaugauaugcccaucacaaacgaccaaaagaaacucauguccaacaacguacaaaucguucgccaacaaagcuacuccaucauguguaucauuaaagaagaaguccucgccuacgucguccaacuuccgcucuacggcguaaucgacacccccugcuggaaacuucacaccucgccccucugcaccacaaacaccaaagaaggcuccaacaucugccuaacccgcaccgaccgcggcugguacugcgacaacgccggcuccgucucauuuuucccccaggcggagaccugcaaaguccaauccaaccgcgucuucugcgacaccaugaacucucuuacccucccaucagaaguaaaccucugcaacgucgacaucuuuaaccccaaauacgauugcaagauaaugaccuccaaaacagacgucucaucguccgucaucaccucccuaggagcuaucgucuccugcuacggcaagaccaaaugcaccgcuuccaacaaaaaccgcggcaucaucaaaaccuucuccaacgggugcgacuacgucucuaacaaaggcguggacacaguauccguaggaaacacacuguacugcguaaacaaacaagagggccaaucgcuuuacgucaaaggcgagccaauuaucaacuucuacgacccgcucgucuucccaucagacgaguucgacgcauccaucucccaagucaacgagaaaaucaaucagucccucgccuucauacgcaaauccgacgaacuccuacauaacguaaacgccggcaaaucuaccacaaacaucaugaucacaaccaucaucaucguaaucaucgucauccuucucucgcucaucgccguaggacugcuacuuuacugcaaggcccgcuaaggacuaguacuggcugcaucucccuuuccucuguccuccauccuucucccaggauggugaagggggaccugguacccagugauccccaccccaggauccuaaaucaugacuuaccugcuaauaaaaacucauuggaaaagugagaagaucuaaaaaaaaaaaaaaaaaaaaaaaaaaaaaaaaaaaaaaaaaaaaaaaaaaaaaaaaaaaaaaaaugcaucccccccccccccccccccccccccccccccaaaggcucuuuucagagccaccagaauu

SEQ ID NO: 2342 - RNA, 1931 nt, Artificial Sequence
  mRNA product Design i-1 comprising derived and/or modified sequence from HRSV(A2)__F-del_DSCav1_mut1 (opt1)
gggagagggcgcuuggcuugcaaggacccugagcugcggcauugaagcacacccaacccaacucgacugaagucagccucacugaaccggaucugagaaucuucucucucugggcuugccagggcucuccgaaccuagcuagcauccucuucaauuccaacuagaaagcuuaccauggagcugcucauccugaaggccaacgccaucaccaccauccugacggcggugaccuucugcuucgccagcggccagaacaucaccgaggaguucuaccaguccacgugcagcgccgucuccaagggguaccucggcgcccugcggaccggcugguacaccuccgugaucaccaucgagcugagcaacaucaaggagaacaagugcaacgggaccgacgccaaggugaagcucaucaagcaggagcuggacaaguacaagaacgcggucacggagcugcagcuccugaugcaguccaccccggcaaccggcuccggcuccgccaucugcagcggcgucgccgugugcaaggugcugcaccucgagggggaggucaacaagaucaagagcgcccugcuguccaccaacaaggccguggugagccucuccaacggcgucagcgugcugaccuucaaggugcuggaccucaagaacuacaucgacaagcagcugcugcccauccugaacaagcagagcugcuccauccccaacaucgagacggugaucgaguuccagcagaagaacaaccggcuccuggagaucacccgcgaguucagcgugaacgccggggucaccacccccguguccacguacaugcugaccaacagcgagcuccugucccugaucaacgacaugccgaucaccaacgaccagaagaagcucaugagcaacaacgugcagaucguccggcagcaguccuacagcaucaugugcaucaucaaggaggaggugcuggcguacgugguccagcugccccucuacggcgugaucgacacccccugcuggaagcugcacacgagcccccugugcaccaccaacaccaaggagggguccaacaucugccucacgcgcaccgaccggggcugguacugcgacaacgccggcagcgucuccuucuucccgcaggccgagaccugcaaggugcagagcaaccgcguguucugcgacaccaugaacucccugacgcugcccagcgagguaaaccucugcaacgucgacaucuucaaccccaaguacgacugcaagaucaugaccuccaagaccgacgugagcuccagcgugaucaccucccugggggccaucgucagcugcuacggcaagacgaagugcaccgccagcaacaagaaccgggggaucaucaagaccuucuccaacggcugcgacuacgugagcaacaagggcguggacaccguguccgucgggaacacccuguacugcgugaacaagcaggagggccagagccucuacgugaagggggagcccaucaucaacuucuacgacccgcuggucuuccccuccgacgaguucgacgcgagcaucucccaggugaacgagaagaucaaccagagccuggccuucauccgcaaguccgacgagcugcuccacaacgugaacgccggcaagagcacgaccaacaucaugaucaccaccaucaucaucgucaucaucgugauccugcugucccucaucgccguggggcugcugcucuacugcaaggcccggugaggacuaguguccaccugucccuccugggcugcuggauugucucguuuuccugccaaauaaacaggaucagcgcuuuacagaucuaaaaaaaaaaaaaaaaaaaaaaaaaaaaaaaaaaaaaaaaaaaaaaaaaaaaaaaaaaaaaaaaugcaucccccccccccccccccccccccccccccccaaaggcucuuuucagagccaccagaauu

SEQ ID NO: 2343 - RNA, 1931 nt, Artificial Sequence
  mRNA product Design i-1 comprising derived and/or modified sequence from HRSV(A2)__F-del_DSCav1_mut1 (opt1)
gggagagggcgcuuggcuugcaaggacccugagcugcggcauugaagcacacccaacccaacucgacugaagucagccucacugaaccggaucugagaaucuucucucucugggcuugccagggcucuccgaaccuagcuagcauccucuucaauuccaacuagaaagcuuaccauggagcugcucauccugaaggccaacgccaucaccaccauccugacggcggugaccuucugcuucgccagcggccagaacaucaccgaggaguucuaccaguccacgugcagcgccgucuccaagggguaccucggcgcccugcgcaccgggugguacaccagcgugaucaccaucgagcuguccaacaucaaggagaacaagugcaacggcaccgacgccaaggugaagcucaucaagcaggagcuggacaaguacaagaacgcggucacggagcugcagcuccugaugcagagcacccccgccaccggguccggcagcgccaucugcuccggcguggccgugugcaagguccugcaccucgagggggaggugaacaagaucaagagcgcgcugcuguccaccaacaaggccguggucagccucuccaacggcgugagcgugcugacguucaagguccuggaccucaagaacuacaucgacaagcagcugcugccgauccucaacaagcaguccugcagcauccccaacaucgagaccgugaucgaguuccagcagaagaacaaccggcugcuggagaucacccgcgaguucuccgugaacgccggggucaccacgcccgugagcaccuacaugcucaccaacuccgagcugcugagccucaucaacgacaugcccaucaccaacgaccagaagaagcugaugagcaacaacgugcagaucguccggcagcaguccuacagcaucaugugcaucaucaaggaggaggugcuggccuacgugguccagcucccgcuguacggcgugaucgacacgcccugcuggaagcugcacaccagcccccucugcaccaccaacacgaaggagggguccaacaucugccugacccgcaccgaccggggcugguacugcgacaacgccggcuccgugagcuucuucccccaggcggagaccugcaagguccaguccaaccgcguguucugcgacacgaugaacagccugacccucccguccgaggucaaccugugcaacguggacaucuucaaccccaaguacgacugcaagaucaugaccagcaagaccgacguguccagcuccgucaucacgagccugggggccaucguguccugcuacggcaagaccaagugcaccgccagcaacaagaaccgggggaucaucaagaccuucuccaacggcugcgacuacgugagcaacaagggcgucgacacgguguccguggggaacacccucuacugcgucaacaagcaggagggccagagccuguacgugaagggggagcccaucaucaacuucuacgacccccugguguucccgagcgacgaguucgacgccuccaucagccaggucaacgagaagaucaaccagucccucgccuucauccgcaagagcgacgagcugcugcacaacgugaacgcgggcaaguccaccaccaacaucaugaucaccacgaucaucaucgugaucaucgucauccuccugagccugaucgccguggggcuccugcuguacugcaaggcccggugaggacuaguguccaccugucccuccugggcugcuggauugucucguuuuccugccaaauaaacaggaucagcgcuuuacagaucuaaaaaaaaaaaaaaaaaaaaaaaaaaaaaaaaaaaaaaaaaaaaaaaaaaaaaaaaaaaaaaaaugcaucccccccccccccccccccccccccccccccaaaggcucuuuucagagccaccagaauu

SEQ ID NO: 2344 - RNA, 1931 nt, Artificial Sequence
  mRNA product Design i-1 comprising derived and/or modified sequence from HRSV(A2)__F-del_DSCav1_mut1 (opt2)
gggagagggcgcuuggcuugcaaggacccugagcugcggcauugaagcacacccaacccaacucgacugaagucagccucacugaaccggaucugagaaucuucucucucugggcuugccagggcucuccgaaccuagcuagcauccucuucaauuccaacuagaaagcuuaccauggagcuccucauccucaaggccaacgccaucaccaccauccucaccgccgucaccuucugcuucgccuccggccagaacaucaccgaggaguucuaccaguccaccugcuccgccgucuccaagggcuaccucggcgcccuccgcaccggcugguacaccuccgucaucaccaucgagcucuccaacaucaaggagaacaagugcaacggcaccgacgccaaggucaagcucaucaagcaggagcucgacaaguacaagaacgccgucaccgagcuccagcuccucaugcaguccacccccgccaccggcuccggcuccgccaucugcuccggcgucgccgucugcaagguccuccaccucgagggcgaggucaacaagaucaaguccgcccuccucuccaccaacaaggccgucgucucccucuccaacggcgucuccguccucaccuucaagguccucgaccucaagaacuacaucgacaagcagcuccuccccauccucaacaagcaguccugcuccauccccaacaucgagaccgucaucgaguuccagcagaagaacaaccgccuccucgagaucacccgcgaguucuccgucaacgccggcgucaccacccccgucuccaccuacaugcucaccaacuccgagcuccucucccucaucaacgacaugcccaucaccaacgaccagaagaagcucauguccaacaacguccagaucguccgccagcaguccuacuccaucaugugcaucaucaaggaggagguccucgccuacgucguccagcucccccucuacggcgucaucgacacccccugcuggaagcuccacaccuccccccucugcaccaccaacaccaaggagggcuccaacaucugccucacccgcaccgaccgcggcugguacugcgacaacgccggcuccgucuccuucuucccccaggccgagaccugcaagguccaguccaaccgcgucuucugcgacaccaugaacucccucacccuccccuccgaggucaaccucugcaacgucgacaucuucaaccccaaguacgacugcaagaucaugaccuccaagaccgacgucuccuccuccgucaucaccucccucggcgccaucgucuccugcuacggcaagaccaagugcaccgccuccaacaagaaccgcggcaucaucaagaccuucuccaacggcugcgacuacgucuccaacaagggcgucgacaccgucuccgucggcaacacccucuacugcgucaacaagcaggagggccagucccucuacgucaagggcgagcccaucaucaacuucuacgacccccucgucuuccccuccgacgaguucgacgccuccaucucccaggucaacgagaagaucaaccagucccucgccuucauccgcaaguccgacgagcuccuccacaacgucaacgccggcaaguccaccaccaacaucaugaucaccaccaucaucaucgucaucaucgucauccuccucucccucaucgccgucggccuccuccucuacugcaaggcccgcugaggacuaguguccaccugucccuccugggcugcuggauugucucguuuuccugccaaauaaacaggaucagcgcuuuacagaucuaaaaaaaaaaaaaaaaaaaaaaaaaaaaaaaaaaaaaaaaaaaaaaaaaaaaaaaaaaaaaaaaugcaucccccccccccccccccccccccccccccccaaaggcucuuuucagagccaccagaauu

SEQ ID NO: 2345 - RNA, 1931 nt, Artificial Sequence
  mRNA product Design i-1 comprising derived and/or modified sequence from HRSV(A2)__F-del_DSCav1_mut1 (opt3)
gggagagggcgcuuggcuugcaaggacccugagcugcggcauugaagcacacccaacccaacucgacugaagucagccucacugaaccggaucugagaaucuucucucucugggcuugccagggcucuccgaaccuagcuagcauccucuucaauuccaacuagaaagcuuaccauggagcugcucauccuuaaggccaacgcuauuaccacaauacugacugcagugacguucugcuuugccagcggccagaauaucaccgaagaguucuaccaauccacauguucugcggucucaaaaggguauuugggagcuuuaagaacugguugguacaccaguguuauuacaaucgaacugagcaacauuaaggagaauaaaugcaacggcaccgacgccaaggugaaacuaaucaagcaggaacucgauaaguauaaaaaugcaguaacugagcugcagcuucugaugcaguccacacccgccaccgggucuggaucggcuauauguucaggcguggcagucugcaagguguugcaccucgagggugaaguuaacaaaaucaagagcgcccugcugaguacgaauaaagcuguggucucccucucuaacggggugagcguauuaacuuuuaagguucuggaccuuaagaauuacauugauaaacaauugcugccuauccuaaacaagcaguccuguucaauuccaaauaucgagaccgugauagaguuccagcagaaaaacaauaggcuccuggaaauuacacgggaguuuagugucaacgccggagugacuaccccggugagcacauauaugcuuaccaauucugaacuguugucccucaucaacgacaugcccauuacgaacgaucaaaagaaacugaugucaaauaacguccagaucguucgccagcagagcuacaguaucaugugcauuauaaaggaggaaguguuagcguauguagugcaacugccucucuacggcgucaucgacacuccauguuggaaacuucauacaucuccccugugcaccacuaauacaaaggagggcuccaacauuuguuugacccgaacggaucgugggugguacugcgacaaugcaggaagcgugucguucuuuccucaggccgaaaccuguaagguucagucuaacagaguguucugcgauacaaugaacucccuaacucugccaucagaggucaaucucugcaauguggacaucuuuaaccccaaauaugauuguaagauaaugaccaguaaaacagacguaagcuccucuguuauuacuagccugggugcuaucgugucaugcuacggcaagaccaaauguacagccaguaauaagaacagggggaucauuaagaccuucuccaauggaugcgauuaugucagcaacaaaggcguggacacugucucuguggguaauacgcuuuacuguguuaacaagcaagaggggcagucacuguaugugaaaggagaaccuaucauuaacuuuuacgacccauugguauucccgagugaugaguuugacgcaagcauaucccaggucaaugaaaagaucaaccagucucucgcuuucauucggaaaucggaugagcuguuacacaaugugaacgccggcaagagcacaaccaauaucaugaucacuaccauuauaaucguuauuaucgugauucugcuaucccucaucgcggucggccugcuuuuguauugcaaggcccgcugaggacuaguguccaccugucccuccugggcugcuggauugucucguuuuccugccaaauaaacaggaucagcgcuuuacagaucuaaaaaaaaaaaaaaaaaaaaaaaaaaaaaaaaaaaaaaaaaaaaaaaaaaaaaaaaaaaaaaaaugcaucccccccccccccccccccccccccccccccaaaggcucuuuucagagccaccagaauu

SEQ ID NO: 2346 - RNA, 1931 nt, Artificial Sequence
  mRNA product Design i-1 comprising derived and/or modified sequence from HRSV(A2)__F-del_DSCav1_mut1 (opt4)
gggagagggcgcuuggcuugcaaggacccugagcugcggcauugaagcacacccaacccaacucgacugaagucagccucacugaaccggaucugagaaucuucucucucugggcuugccagggcucuccgaaccuagcuagcauccucuucaauuccaacuagaaagcuuaccauggagcugcugauccugaaggccaacgccaucaccaccauccugaccgccgugaccuucugcuucgccagcggccagaacaucaccgaggaguucuaccagagcaccugcagcgccgugagcaagggcuaccugggcgcccugagaaccggcugguacaccagcgugaucaccaucgagcugagcaacaucaaggagaacaagugcaacggcaccgacgccaaggugaagcugaucaagcaggagcuggacaaguacaagaacgccgugaccgagcugcagcugcugaugcagagcacccccgccaccggcagcggcagcgccaucugcagcggcguggccgugugcaaggugcugcaccuggagggcgaggugaacaagaucaagagcgcccugcugagcaccaacaaggccguggugagccugagcaacggcgugagcgugcugaccuucaaggugcuggaccugaagaacuacaucgacaagcagcugcugcccauccugaacaagcagagcugcagcauccccaacaucgagaccgugaucgaguuccagcagaagaacaacagacugcuggagaucaccagagaguucagcgugaacgccggcgugaccacccccgugagcaccuacaugcugaccaacagcgagcugcugagccugaucaacgacaugcccaucaccaacgaccagaagaagcugaugagcaacaacgugcagaucgugagacagcagagcuacagcaucaugugcaucaucaaggaggaggugcuggccuacguggugcagcugccccuguacggcgugaucgacacccccugcuggaagcugcacaccagcccccugugcaccaccaacaccaaggagggcagcaacaucugccugaccagaaccgacagaggcugguacugcgacaacgccggcagcgugagcuucuucccccaggccgagaccugcaaggugcagagcaacagaguguucugcgacaccaugaacagccugacccugcccagcgaggugaaccugugcaacguggacaucuucaaccccaaguacgacugcaagaucaugaccagcaagaccgacgugagcagcagcgugaucaccagccugggcgccaucgugagcugcuacggcaagaccaagugcaccgccagcaacaagaacagaggcaucaucaagaccuucagcaacggcugcgacuacgugagcaacaagggcguggacaccgugagcgugggcaacacccuguacugcgugaacaagcaggagggccagagccuguacgugaagggcgagcccaucaucaacuucuacgacccccugguguuccccagcgacgaguucgacgccagcaucagccaggugaacgagaagaucaaccagagccuggccuucaucagaaagagcgacgagcugcugcacaacgugaacgccggcaagagcaccaccaacaucaugaucaccaccaucaucaucgugaucaucgugauccugcugagccugaucgccgugggccugcugcuguacugcaaggccagaugaggacuaguguccaccugucccuccugggcugcuggauugucucguuuuccugccaaauaaacaggaucagcgcuuuacagaucuaaaaaaaaaaaaaaaaaaaaaaaaaaaaaaaaaaaaaaaaaaaaaaaaaaaaaaaaaaaaaaaaugcaucccccccccccccccccccccccccccccccaaaggcucuuuucagagccaccagaauu

SEQ ID NO: 2347 - RNA, 1931 nt, Artificial Sequence
  mRNA product Design i-1 comprising derived and/or modified sequence from HRSV(A2)__F-del_DSCav1_mut1 (opt5)
gggagagggcgcuuggcuugcaaggacccugagcugcggcauugaagcacacccaacccaacucgacugaagucagccucacugaaccggaucugagaaucuucucucucugggcuugccagggcucuccgaaccuagcuagcauccucuucaauuccaacuagaaagcuuaccauggagcugcucauccugaaggccaacgcuauuaccacaauccuuacggccgugaccuucugcuuugcgagcggccagaauauuacagaagaguucuaccaauccaccuguucugcugucagcaaaggguaucugggagcccucagaacaggcugguacaccuccguuaucacaauugaacugucuaacaucaaggagaauaaaugcaacgggaccgacgccaaggugaaacuuaucaagcaggaacuggauaaguauaaaaaugcugugacggagcuccagcugcugaugcagagcacccccgccacaggauccggcucugcuauuuguagcggggucgccgugugcaagguucuccaccuggagggagaagugaacaaaaucaaguccgcgcuucugagcaccaauaaagccgucgugucucucuccaacggcguuagcgugcugacauuuaagguccuugaccugaagaauuacauugauaaacaacuccugccuauccugaacaagcagucuuguuccauuccgaauaucgagaccgugauugaguuccagcagaaaaacaaucggcuccuggaaaucacgcgcgaguuuagcgugaacgcuggcgucacaacccccguuucuacauauaugcuuaccaauuccgaacugcucagccugaucaacgacaugccuauuaccaacgaucaaaagaaacuuauguccaauaacgugcagaucgugagacagcagucuuacagcauuaugugcaucauuaaggaggaaguccuggccuaugugguucaacucccccuguacggggugaucgacacaccuuguuggaaacugcauacgagcccccucugcaccacaaauaccaaggagggauccaacaucugucugacacggaccgaucgcggcugguacugcgacaaugcugggucugucuccuucuuuccucaggccgaaacguguaaggugcagagcaacagaguuuucugcgauacaaugaacucucuuacccugccgagcgaggugaaucucugcaaugucgacauuuuuaaccccaaauaugauuguaagaucaugaccuccaaaacagacgugucuagcuccgucauuaccagccugggagcgaucgugucuugcuacggcaagacaaaauguacggccuccaauaagaaccgggggauuaucaagaccuucagcaauggaugcgauuauguuucuaacaaaggcguggacacagucuccgugggcaauacccuuuacuguguuaacaagcaagaggggcagagccuguaugugaaaggagaaccuaucauuaacuuuuacgacccccucgucuucccuuccgaugaguuugacgcuucuaucagccaggugaaugaaaagauuaaccagucccuggccuucauccgcaaaucugaugagcugcuccacaaugugaacgcuggcaagagcacaaccaauauuaugaucacgaccauuaucaucguuauuaucgucauucugcuuucccugaucgccguggggcuccugcuguauugcaaggccagaugaggacuaguguccaccugucccuccugggcugcuggauugucucguuuuccugccaaauaaacaggaucagcgcuuuacagaucuaaaaaaaaaaaaaaaaaaaaaaaaaaaaaaaaaaaaaaaaaaaaaaaaaaaaaaaaaaaaaaaaugcaucccccccccccccccccccccccccccccccaaaggcucuuuucagagccaccagaauu

SEQ ID NO: 2348 - RNA, 1931 nt, Artificial Sequence
  mRNA product Design i-1 comprising derived and/or modified sequence from HRSV(A2)__F-del_DSCav1_mut1 (opt6)
gggagagggcgcuuggcuugcaaggacccugagcugcggcauugaagcacacccaacccaacucgacugaagucagccucacugaaccggaucugagaaucuucucucucugggcuugccagggcucuccgaaccuagcuagcauccucuucaauuccaacuagaaagcuuaccauggaacuacucaucuuaaaagcaaacgcaauaacaacuauucuaaccgcaguaacauuuuguuucgcaucaggacaaaacauaaccgaagaauuuuaccaaucaacauguuccgcaguuucaaaaggauacuuaggcgcacuaagaacaggcugguacaccuccgugauaacaauagaauuaucaaacauaaaagaaaacaaauguaauggaacugacgccaaaguaaaacuaauaaaacaagaacuagacaaauauaaaaacgcaguaacugaacuacaauuacuaaugcaauccaccccagcaacaggcucaggcucagcaauuugcuccggagucgcugucugcaaaguacuacaucuugaaggcgaagucaauaaaauaaaaucagcacuucuaucaacaaacaaagcaguagucucacuaucaaacggaguaucaguacuaacauuuaaaguauuagaucuaaaaaacuauauagauaaacaacuacuacccauacucaauaaacaauccuguucaauaccaaauauagaaaccguaauagaauuucaacaaaaaaacaaucgacuauuagaaaucacccgagaauuuucagucaaugcaggcguaacaacaccaguaucaaccuacauguuaaccaacuccgaacuacuaucccucauaaacgacaugccaauaacaaacgaucaaaaaaaacuaauguccaacaacguacaaauagucagacaacaaucuuauucaauaaugugcaucauaaaagaagaaguucuagccuacguaguucaacuuccauuauacggcguaauugauacaccaugcuggaaacuacacacauccccacuauguacaacaaacacaaaagaaggaucaaacaucugcuuaacuagaacagacagaggaugguacugcgacaacgcaggaucagucucauucuuuccacaagcagaaacaugcaagguccaaucaaacagaguauucugcgacacaaugaacuccuuaacacuaccaucugaaguaaaccuauguaauguagacauauuuaacccaaaauacgacugcaaaauaaugaccucaaaaacagacguauccucaucaguaauuacaagccucggagccauaguaucaugcuacggaaaaacaaaauguacagcaucaaacaaaaacagaggaauaauaaaaacguucuccaacggaugcgacuauguaucaaacaaaggcguagacacaguaucagucggaaauacccuuuacugcguaaacaaacaagaaggccaaagucuauacguaaaaggagagccaauaauaaacuuuuaugacccccuuguauucccaucugacgaauuugaugcaucaauaucccaagucaacgaaaaaaucaaccaaucauuagccuuuauuagaaaaagugacgaacuauuacacaacguuaaugcagggaaaucaacaacaaauauaaugauuacaaccauaauuauaguuaucauaguuauacuacucucacuaaucgcaguaggauuacuauuauacugcaaagcaagauaaggacuaguguccaccugucccuccugggcugcuggauugucucguuuuccugccaaauaaacaggaucagcgcuuuacagaucuaaaaaaaaaaaaaaaaaaaaaaaaaaaaaaaaaaaaaaaaaaaaaaaaaaaaaaaaaaaaaaaaugcaucccccccccccccccccccccccccccccccaaaggcucuuuucagagccaccagaauu

SEQ ID NO: 2349 - RNA, 1931 nt, Artificial Sequence
  mRNA product Design i-1 comprising derived and/or modified sequence from HRSV(A2)__F-del_DSCav1_mut1 (opt11)
gggagagggcgcuuggcuugcaaggacccugagcugcggcauugaagcacacccaacccaacucgacugaagucagccucacugaaccggaucugagaaucuucucucucugggcuugccagggcucuccgaaccuagcuagcauccucuucaauuccaacuagaaagcuuaccauggaacuacucauccuaaaagccaacgcaaucacaaccauacuuacagcuguuaccuucugcuucgcauccggccaaaauaucaccgaagaguucuaccaaucaaccugcuccgccgucagcaaaggauaccucggcgcccuccgaaccggaugguacacuucugucaucacaaucgaacucuccaacaucaaagaaaacaaaugcaacgguaccgacgcgaaagucaaacucaucaaacaagaacuagacaaguacaaaaacgccgucaccgaacugcaacuccucaugcaauccacaccagcaacgggaucaggauccgccaucugcucaggcgucgccgucugcaaaguccugcaccuagaaggagaaguaaacaaaauuaaauccgcccuacucuccaccaacaaagcagucgucucacuauccaacggcgucuccguccucaccuuuaagguccucgaccucaaaaauuauauagacaaacaacuccuccccauccuaaacaaacaaucaugcuccauccccaacauagaaaccgucaucgaauuucaacagaaaaacaaccgacucuuagaaauuacccgcgaguucagcgucaacgccggagucaccacacccgucucaaccuacaugcucaccaacucagaacuccucucacuaaucaaugauaugcccaucacaaacgaccaaaagaaacucauguccaacaacguacaaaucguucgccaacaaagcuacuccaucauguguaucauuaaagaagaaguccucgccuacgucguccaacuuccgcucuacggcguaaucgacacccccugcuggaaacuucacaccucgccccucugcaccacaaacaccaaagaaggcuccaacaucugccuaacccgcaccgaccgcggcugguacugcgacaacgccggcuccgucucauuuuucccccaggcggagaccugcaaaguccaauccaaccgcgucuucugcgacaccaugaacucucuuacccucccaucagaaguaaaccucugcaacgucgacaucuuuaaccccaaauacgauugcaagauaaugaccuccaaaacagacgucucaucguccgucaucaccucccuaggagcuaucgucuccugcuacggcaagaccaaaugcaccgcuuccaacaaaaaccgcggcaucaucaaaaccuucuccaacgggugcgacuacgucucuaacaaaggcguggacacaguauccguaggaaacacacuguacugcguaaacaaacaagagggccaaucgcuuuacgucaaaggcgagccaauuaucaacuucuacgacccgcucgucuucccaucagacgaguucgacgcauccaucucccaagucaacgagaaaaucaaucagucccucgccuucauacgcaaauccgacgaacuccuacauaacguaaacgccggcaaaucuaccacaaacaucaugaucacaaccaucaucaucguaaucaucgucauccuucucucgcucaucgccguaggacugcuacuuuacugcaaggcccgcuaaggacuaguguccaccugucccuccugggcugcuggauugucucguuuuccugccaaauaaacaggaucagcgcuuuacagaucuaaaaaaaaaaaaaaaaaaaaaaaaaaaaaaaaaaaaaaaaaaaaaaaaaaaaaaaaaaaaaaaaugcaucccccccccccccccccccccccccccccccaaaggcucuuuucagagccaccagaauu

SEQ ID NO: 2350 - RNA, 1931 nt, Artificial Sequence
  mRNA product Design i-2 comprising derived and/or modified sequence from HRSV(A2)__F-del_DSCav1_mut1 (opt1)
gggagaggcgcugccuacggagguggcagccaucuccuucucggcaucaagcuuaccauggagcugcucauccugaaggccaacgccaucaccaccauccugacggcggugaccuucugcuucgccagcggccagaacaucaccgaggaguucuaccaguccacgugcagcgccgucuccaagggguaccucggcgcccugcggaccggcugguacaccuccgugaucaccaucgagcugagcaacaucaaggagaacaagugcaacgggaccgacgccaaggugaagcucaucaagcaggagcuggacaaguacaagaacgcggucacggagcugcagcuccugaugcaguccaccccggcaaccggcuccggcuccgccaucugcagcggcgucgccgugugcaaggugcugcaccucgagggggaggucaacaagaucaagagcgcccugcuguccaccaacaaggccguggugagccucuccaacggcgucagcgugcugaccuucaaggugcuggaccucaagaacuacaucgacaagcagcugcugcccauccugaacaagcagagcugcuccauccccaacaucgagacggugaucgaguuccagcagaagaacaaccggcuccuggagaucacccgcgaguucagcgugaacgccggggucaccacccccguguccacguacaugcugaccaacagcgagcuccugucccugaucaacgacaugccgaucaccaacgaccagaagaagcucaugagcaacaacgugcagaucguccggcagcaguccuacagcaucaugugcaucaucaaggaggaggugcuggcguacgugguccagcugccccucuacggcgugaucgacacccccugcuggaagcugcacacgagcccccugugcaccaccaacaccaaggagggguccaacaucugccucacgcgcaccgaccggggcugguacugcgacaacgccggcagcgucuccuucuucccgcaggccgagaccugcaaggugcagagcaaccgcguguucugcgacaccaugaacucccugacgcugcccagcgagguaaaccucugcaacgucgacaucuucaaccccaaguacgacugcaagaucaugaccuccaagaccgacgugagcuccagcgugaucaccucccugggggccaucgucagcugcuacggcaagacgaagugcaccgccagcaacaagaaccgggggaucaucaagaccuucuccaacggcugcgacuacgugagcaacaagggcguggacaccguguccgucgggaacacccuguacugcgugaacaagcaggagggccagagccucuacgugaagggggagcccaucaucaacuucuacgacccgcuggucuuccccuccgacgaguucgacgcgagcaucucccaggugaacgagaagaucaaccagagccuggccuucauccgcaaguccgacgagcugcuccacaacgugaacgccggcaagagcacgaccaacaucaugaucaccaccaucaucaucgucaucaucgugauccugcugucccucaucgccguggggcugcugcucuacugcaaggcccggugaggacuagugcaucacauuuaaaagcaucucagccuaccaugagaauaagagaaagaaaaugaagaucaauagcuuauucaucucuuuuucuuuuucguugguguaaagccaacacccugucuaaaaaacauaaauuucuuuaaucauuuugccucuuuucucugugcuucaauuaauaaaaaauggaaagaaccuagaucuaaaaaaaaaaaaaaaaaaaaaaaaaaaaaaaaaaaaaaaaaaaaaaaaaaaaaaaaaaaaaaaaugcaucccccccccccccccccccccccccccccccaaaggcucuuuucagagccaccagaauu

SEQ ID NO: 2351 - RNA, 1931 nt, Artificial Sequence
  mRNA product Design i-2 comprising derived and/or modified sequence from HRSV(A2)__F-del_DSCav1_mut1 (opt1)
gggagaggcgcugccuacggagguggcagccaucuccuucucggcaucaagcuuaccauggagcugcucauccugaaggccaacgccaucaccaccauccugacggcggugaccuucugcuucgccagcggccagaacaucaccgaggaguucuaccaguccacgugcagcgccgucuccaagggguaccucggcgcccugcgcaccgggugguacaccagcgugaucaccaucgagcuguccaacaucaaggagaacaagugcaacggcaccgacgccaaggugaagcucaucaagcaggagcuggacaaguacaagaacgcggucacggagcugcagcuccugaugcagagcacccccgccaccggguccggcagcgccaucugcuccggcguggccgugugcaagguccugcaccucgagggggaggugaacaagaucaagagcgcgcugcuguccaccaacaaggccguggucagccucuccaacggcgugagcgugcugacguucaagguccuggaccucaagaacuacaucgacaagcagcugcugccgauccucaacaagcaguccugcagcauccccaacaucgagaccgugaucgaguuccagcagaagaacaaccggcugcuggagaucacccgcgaguucuccgugaacgccggggucaccacgcccgugagcaccuacaugcucaccaacuccgagcugcugagccucaucaacgacaugcccaucaccaacgaccagaagaagcugaugagcaacaacgugcagaucguccggcagcaguccuacagcaucaugugcaucaucaaggaggaggugcuggccuacgugguccagcucccgcuguacggcgugaucgacacgcccugcuggaagcugcacaccagcccccucugcaccaccaacacgaaggagggguccaacaucugccugacccgcaccgaccggggcugguacugcgacaacgccggcuccgugagcuucuucccccaggcggagaccugcaagguccaguccaaccgcguguucugcgacacgaugaacagccugacccucccguccgaggucaaccugugcaacguggacaucuucaaccccaaguacgacugcaagaucaugaccagcaagaccgacguguccagcuccgucaucacgagccugggggccaucguguccugcuacggcaagaccaagugcaccgccagcaacaagaaccgggggaucaucaagaccuucuccaacggcugcgacuacgugagcaacaagggcgucgacacgguguccguggggaacacccucuacugcgucaacaagcaggagggccagagccuguacgugaagggggagcccaucaucaacuucuacgacccccugguguucccgagcgacgaguucgacgccuccaucagccaggucaacgagaagaucaaccagucccucgccuucauccgcaagagcgacgagcugcugcacaacgugaacgcgggcaaguccaccaccaacaucaugaucaccacgaucaucaucgugaucaucgucauccuccugagccugaucgccguggggcuccugcuguacugcaaggcccggugaggacuagugcaucacauuuaaaagcaucucagccuaccaugagaauaagagaaagaaaaugaagaucaauagcuuauucaucucuuuuucuuuuucguugguguaaagccaacacccugucuaaaaaacauaaauuucuuuaaucauuuugccucuuuucucugugcuucaauuaauaaaaaauggaaagaaccuagaucuaaaaaaaaaaaaaaaaaaaaaaaaaaaaaaaaaaaaaaaaaaaaaaaaaaaaaaaaaaaaaaaaugcaucccccccccccccccccccccccccccccccaaaggcucuuuucagagccaccagaauu

SEQ ID NO: 2352 - RNA, 1931 nt, Artificial Sequence
  mRNA product Design i-2 comprising derived and/or modified sequence from HRSV(A2)__F-del_DSCav1_mut1 (opt2)
gggagaggcgcugccuacggagguggcagccaucuccuucucggcaucaagcuuaccauggagcuccucauccucaaggccaacgccaucaccaccauccucaccgccgucaccuucugcuucgccuccggccagaacaucaccgaggaguucuaccaguccaccugcuccgccgucuccaagggcuaccucggcgcccuccgcaccggcugguacaccuccgucaucaccaucgagcucuccaacaucaaggagaacaagugcaacggcaccgacgccaaggucaagcucaucaagcaggagcucgacaaguacaagaacgccgucaccgagcuccagcuccucaugcaguccacccccgccaccggcuccggcuccgccaucugcuccggcgucgccgucugcaagguccuccaccucgagggcgaggucaacaagaucaaguccgcccuccucuccaccaacaaggccgucgucucccucuccaacggcgucuccguccucaccuucaagguccucgaccucaagaacuacaucgacaagcagcuccuccccauccucaacaagcaguccugcuccauccccaacaucgagaccgucaucgaguuccagcagaagaacaaccgccuccucgagaucacccgcgaguucuccgucaacgccggcgucaccacccccgucuccaccuacaugcucaccaacuccgagcuccucucccucaucaacgacaugcccaucaccaacgaccagaagaagcucauguccaacaacguccagaucguccgccagcaguccuacuccaucaugugcaucaucaaggaggagguccucgccuacgucguccagcucccccucuacggcgucaucgacacccccugcuggaagcuccacaccuccccccucugcaccaccaacaccaaggagggcuccaacaucugccucacccgcaccgaccgcggcugguacugcgacaacgccggcuccgucuccuucuucccccaggccgagaccugcaagguccaguccaaccgcgucuucugcgacaccaugaacucccucacccuccccuccgaggucaaccucugcaacgucgacaucuucaaccccaaguacgacugcaagaucaugaccuccaagaccgacgucuccuccuccgucaucaccucccucggcgccaucgucuccugcuacggcaagaccaagugcaccgccuccaacaagaaccgcggcaucaucaagaccuucuccaacggcugcgacuacgucuccaacaagggcgucgacaccgucuccgucggcaacacccucuacugcgucaacaagcaggagggccagucccucuacgucaagggcgagcccaucaucaacuucuacgacccccucgucuuccccuccgacgaguucgacgccuccaucucccaggucaacgagaagaucaaccagucccucgccuucauccgcaaguccgacgagcuccuccacaacgucaacgccggcaaguccaccaccaacaucaugaucaccaccaucaucaucgucaucaucgucauccuccucucccucaucgccgucggccuccuccucuacugcaaggcccgcugaggacuagugcaucacauuuaaaagcaucucagccuaccaugagaauaagagaaagaaaaugaagaucaauagcuuauucaucucuuuuucuuuuucguugguguaaagccaacacccugucuaaaaaacauaaauuucuuuaaucauuuugccucuuuucucugugcuucaauuaauaaaaaauggaaagaaccuagaucuaaaaaaaaaaaaaaaaaaaaaaaaaaaaaaaaaaaaaaaaaaaaaaaaaaaaaaaaaaaaaaaaugcaucccccccccccccccccccccccccccccccaaaggcucuuuucagagccaccagaauu

SEQ ID NO: 2353 - RNA, 1931 nt, Artificial Sequence
  mRNA product Design i-2 comprising derived and/or modified sequence from HRSV(A2)__F-del_DSCav1_mut1 (opt3)
gggagaggcgcugccuacggagguggcagccaucuccuucucggcaucaagcuuaccauggagcugcucauccuuaaggccaacgcuauuaccacaauacugacugcagugacguucugcuuugccagcggccagaauaucaccgaagaguucuaccaauccacauguucugcggucucaaaaggguauuugggagcuuuaagaacugguugguacaccaguguuauuacaaucgaacugagcaacauuaaggagaauaaaugcaacggcaccgacgccaaggugaaacuaaucaagcaggaacucgauaaguauaaaaaugcaguaacugagcugcagcuucugaugcaguccacacccgccaccgggucuggaucggcuauauguucaggcguggcagucugcaagguguugcaccucgagggugaaguuaacaaaaucaagagcgcccugcugaguacgaauaaagcuguggucucccucucuaacggggugagcguauuaacuuuuaagguucuggaccuuaagaauuacauugauaaacaauugcugccuauccuaaacaagcaguccuguucaauuccaaauaucgagaccgugauagaguuccagcagaaaaacaauaggcuccuggaaauuacacgggaguuuagugucaacgccggagugacuaccccggugagcacauauaugcuuaccaauucugaacuguugucccucaucaacgacaugcccauuacgaacgaucaaaagaaacugaugucaaauaacguccagaucguucgccagcagagcuacaguaucaugugcauuauaaaggaggaaguguuagcguauguagugcaacugccucucuacggcgucaucgacacuccauguuggaaacuucauacaucuccccugugcaccacuaauacaaaggagggcuccaacauuuguuugacccgaacggaucgugggugguacugcgacaaugcaggaagcgugucguucuuuccucaggccgaaaccuguaagguucagucuaacagaguguucugcgauacaaugaacucccuaacucugccaucagaggucaaucucugcaauguggacaucuuuaaccccaaauaugauuguaagauaaugaccaguaaaacagacguaagcuccucuguuauuacuagccugggugcuaucgugucaugcuacggcaagaccaaauguacagccaguaauaagaacagggggaucauuaagaccuucuccaauggaugcgauuaugucagcaacaaaggcguggacacugucucuguggguaauacgcuuuacuguguuaacaagcaagaggggcagucacuguaugugaaaggagaaccuaucauuaacuuuuacgacccauugguauucccgagugaugaguuugacgcaagcauaucccaggucaaugaaaagaucaaccagucucucgcuuucauucggaaaucggaugagcuguuacacaaugugaacgccggcaagagcacaaccaauaucaugaucacuaccauuauaaucguuauuaucgugauucugcuaucccucaucgcggucggccugcuuuuguauugcaaggcccgcugaggacuagugcaucacauuuaaaagcaucucagccuaccaugagaauaagagaaagaaaaugaagaucaauagcuuauucaucucuuuuucuuuuucguugguguaaagccaacacccugucuaaaaaacauaaauuucuuuaaucauuuugccucuuuucucugugcuucaauuaauaaaaaauggaaagaaccuagaucuaaaaaaaaaaaaaaaaaaaaaaaaaaaaaaaaaaaaaaaaaaaaaaaaaaaaaaaaaaaaaaaaugcaucccccccccccccccccccccccccccccccaaaggcucuuuucagagccaccagaauu

SEQ ID NO: 2354 - RNA, 1931 nt, Artificial Sequence
  mRNA product Design i-2 comprising derived and/or modified sequence from HRSV(A2)__F-del_DSCav1_mut1 (opt4)
gggagaggcgcugccuacggagguggcagccaucuccuucucggcaucaagcuuaccauggagcugcugauccugaaggccaacgccaucaccaccauccugaccgccgugaccuucugcuucgccagcggccagaacaucaccgaggaguucuaccagagcaccugcagcgccgugagcaagggcuaccugggcgcccugagaaccggcugguacaccagcgugaucaccaucgagcugagcaacaucaaggagaacaagugcaacggcaccgacgccaaggugaagcugaucaagcaggagcuggacaaguacaagaacgccgugaccgagcugcagcugcugaugcagagcacccccgccaccggcagcggcagcgccaucugcagcggcguggccgugugcaaggugcugcaccuggagggcgaggugaacaagaucaagagcgcccugcugagcaccaacaaggccguggugagccugagcaacggcgugagcgugcugaccuucaaggugcuggaccugaagaacuacaucgacaagcagcugcugcccauccugaacaagcagagcugcagcauccccaacaucgagaccgugaucgaguuccagcagaagaacaacagacugcuggagaucaccagagaguucagcgugaacgccggcgugaccacccccgugagcaccuacaugcugaccaacagcgagcugcugagccugaucaacgacaugcccaucaccaacgaccagaagaagcugaugagcaacaacgugcagaucgugagacagcagagcuacagcaucaugugcaucaucaaggaggaggugcuggccuacguggugcagcugccccuguacggcgugaucgacacccccugcuggaagcugcacaccagcccccugugcaccaccaacaccaaggagggcagcaacaucugccugaccagaaccgacagaggcugguacugcgacaacgccggcagcgugagcuucuucccccaggccgagaccugcaaggugcagagcaacagaguguucugcgacaccaugaacagccugacccugcccagcgaggugaaccugugcaacguggacaucuucaaccccaaguacgacugcaagaucaugaccagcaagaccgacgugagcagcagcgugaucaccagccugggcgccaucgugagcugcuacggcaagaccaagugcaccgccagcaacaagaacagaggcaucaucaagaccuucagcaacggcugcgacuacgugagcaacaagggcguggacaccgugagcgugggcaacacccuguacugcgugaacaagcaggagggccagagccuguacgugaagggcgagcccaucaucaacuucuacgacccccugguguuccccagcgacgaguucgacgccagcaucagccaggugaacgagaagaucaaccagagccuggccuucaucagaaagagcgacgagcugcugcacaacgugaacgccggcaagagcaccaccaacaucaugaucaccaccaucaucaucgugaucaucgugauccugcugagccugaucgccgugggccugcugcuguacugcaaggccagaugaggacuagugcaucacauuuaaaagcaucucagccuaccaugagaauaagagaaagaaaaugaagaucaauagcuuauucaucucuuuuucuuuuucguugguguaaagccaacacccugucuaaaaaacauaaauuucuuuaaucauuuugccucuuuucucugugcuucaauuaauaaaaaauggaaagaaccuagaucuaaaaaaaaaaaaaaaaaaaaaaaaaaaaaaaaaaaaaaaaaaaaaaaaaaaaaaaaaaaaaaaaugcaucccccccccccccccccccccccccccccccaaaggcucuuuucagagccaccagaauu

SEQ ID NO: 2355 - RNA, 1931 nt, Artificial Sequence
  mRNA product Design i-2 comprising derived and/or modified sequence from HRSV(A2)__F-del_DSCav1_mut1 (opt5)
gggagaggcgcugccuacggagguggcagccaucuccuucucggcaucaagcuuaccauggagcugcucauccugaaggccaacgcuauuaccacaauccuuacggccgugaccuucugcuuugcgagcggccagaauauuacagaagaguucuaccaauccaccuguucugcugucagcaaaggguaucugggagcccucagaacaggcugguacaccuccguuaucacaauugaacugucuaacaucaaggagaauaaaugcaacgggaccgacgccaaggugaaacuuaucaagcaggaacuggauaaguauaaaaaugcugugacggagcuccagcugcugaugcagagcacccccgccacaggauccggcucugcuauuuguagcggggucgccgugugcaagguucuccaccuggagggagaagugaacaaaaucaaguccgcgcuucugagcaccaauaaagccgucgugucucucuccaacggcguuagcgugcugacauuuaagguccuugaccugaagaauuacauugauaaacaacuccugccuauccugaacaagcagucuuguuccauuccgaauaucgagaccgugauugaguuccagcagaaaaacaaucggcuccuggaaaucacgcgcgaguuuagcgugaacgcuggcgucacaacccccguuucuacauauaugcuuaccaauuccgaacugcucagccugaucaacgacaugccuauuaccaacgaucaaaagaaacuuauguccaauaacgugcagaucgugagacagcagucuuacagcauuaugugcaucauuaaggaggaaguccuggccuaugugguucaacucccccuguacggggugaucgacacaccuuguuggaaacugcauacgagcccccucugcaccacaaauaccaaggagggauccaacaucugucugacacggaccgaucgcggcugguacugcgacaaugcugggucugucuccuucuuuccucaggccgaaacguguaaggugcagagcaacagaguuuucugcgauacaaugaacucucuuacccugccgagcgaggugaaucucugcaaugucgacauuuuuaaccccaaauaugauuguaagaucaugaccuccaaaacagacgugucuagcuccgucauuaccagccugggagcgaucgugucuugcuacggcaagacaaaauguacggccuccaauaagaaccgggggauuaucaagaccuucagcaauggaugcgauuauguuucuaacaaaggcguggacacagucuccgugggcaauacccuuuacuguguuaacaagcaagaggggcagagccuguaugugaaaggagaaccuaucauuaacuuuuacgacccccucgucuucccuuccgaugaguuugacgcuucuaucagccaggugaaugaaaagauuaaccagucccuggccuucauccgcaaaucugaugagcugcuccacaaugugaacgcuggcaagagcacaaccaauauuaugaucacgaccauuaucaucguuauuaucgucauucugcuuucccugaucgccguggggcuccugcuguauugcaaggccagaugaggacuagugcaucacauuuaaaagcaucucagccuaccaugagaauaagagaaagaaaaugaagaucaauagcuuauucaucucuuuuucuuuuucguugguguaaagccaacacccugucuaaaaaacauaaauuucuuuaaucauuuugccucuuuucucugugcuucaauuaauaaaaaauggaaagaaccuagaucuaaaaaaaaaaaaaaaaaaaaaaaaaaaaaaaaaaaaaaaaaaaaaaaaaaaaaaaaaaaaaaaaugcaucccccccccccccccccccccccccccccccaaaggcucuuuucagagccaccagaauu

SEQ ID NO: 2356 - RNA, 1931 nt, Artificial Sequence
  mRNA product Design i-2 comprising derived and/or modified sequence from HRSV(A2)__F-del_DSCav1_mut1 (opt6)
gggagaggcgcugccuacggagguggcagccaucuccuucucggcaucaagcuuaccauggaacuacucaucuuaaaagcaaacgcaauaacaacuauucuaaccgcaguaacauuuuguuucgcaucaggacaaaacauaaccgaagaauuuuaccaaucaacauguuccgcaguuucaaaaggauacuuaggcgcacuaagaacaggcugguacaccuccgugauaacaauagaauuaucaaacauaaaagaaaacaaauguaauggaacugacgccaaaguaaaacuaauaaaacaagaacuagacaaauauaaaaacgcaguaacugaacuacaauuacuaaugcaauccaccccagcaacaggcucaggcucagcaauuugcuccggagucgcugucugcaaaguacuacaucuugaaggcgaagucaauaaaauaaaaucagcacuucuaucaacaaacaaagcaguagucucacuaucaaacggaguaucaguacuaacauuuaaaguauuagaucuaaaaaacuauauagauaaacaacuacuacccauacucaauaaacaauccuguucaauaccaaauauagaaaccguaauagaauuucaacaaaaaaacaaucgacuauuagaaaucacccgagaauuuucagucaaugcaggcguaacaacaccaguaucaaccuacauguuaaccaacuccgaacuacuaucccucauaaacgacaugccaauaacaaacgaucaaaaaaaacuaauguccaacaacguacaaauagucagacaacaaucuuauucaauaaugugcaucauaaaagaagaaguucuagccuacguaguucaacuuccauuauacggcguaauugauacaccaugcuggaaacuacacacauccccacuauguacaacaaacacaaaagaaggaucaaacaucugcuuaacuagaacagacagaggaugguacugcgacaacgcaggaucagucucauucuuuccacaagcagaaacaugcaagguccaaucaaacagaguauucugcgacacaaugaacuccuuaacacuaccaucugaaguaaaccuauguaauguagacauauuuaacccaaaauacgacugcaaaauaaugaccucaaaaacagacguauccucaucaguaauuacaagccucggagccauaguaucaugcuacggaaaaacaaaauguacagcaucaaacaaaaacagaggaauaauaaaaacguucuccaacggaugcgacuauguaucaaacaaaggcguagacacaguaucagucggaaauacccuuuacugcguaaacaaacaagaaggccaaagucuauacguaaaaggagagccaauaauaaacuuuuaugacccccuuguauucccaucugacgaauuugaugcaucaauaucccaagucaacgaaaaaaucaaccaaucauuagccuuuauuagaaaaagugacgaacuauuacacaacguuaaugcagggaaaucaacaacaaauauaaugauuacaaccauaauuauaguuaucauaguuauacuacucucacuaaucgcaguaggauuacuauuauacugcaaagcaagauaaggacuagugcaucacauuuaaaagcaucucagccuaccaugagaauaagagaaagaaaaugaagaucaauagcuuauucaucucuuuuucuuuuucguugguguaaagccaacacccugucuaaaaaacauaaauuucuuuaaucauuuugccucuuuucucugugcuucaauuaauaaaaaauggaaagaaccuagaucuaaaaaaaaaaaaaaaaaaaaaaaaaaaaaaaaaaaaaaaaaaaaaaaaaaaaaaaaaaaaaaaaugcaucccccccccccccccccccccccccccccccaaaggcucuuuucagagccaccagaauu

SEQ ID NO: 2357 - RNA, 1931 nt, Artificial Sequence
  mRNA product Design i-2 comprising derived and/or modified sequence from HRSV(A2)__F-del_DSCav1_mut1 (opt11)
gggagaggcgcugccuacggagguggcagccaucuccuucucggcaucaagcuuaccauggaacuacucauccuaaaagccaacgcaaucacaaccauacuuacagcuguuaccuucugcuucgcauccggccaaaauaucaccgaagaguucuaccaaucaaccugcuccgccgucagcaaaggauaccucggcgcccuccgaaccggaugguacacuucugucaucacaaucgaacucuccaacaucaaagaaaacaaaugcaacgguaccgacgcgaaagucaaacucaucaaacaagaacuagacaaguacaaaaacgccgucaccgaacugcaacuccucaugcaauccacaccagcaacgggaucaggauccgccaucugcucaggcgucgccgucugcaaaguccugcaccuagaaggagaaguaaacaaaauuaaauccgcccuacucuccaccaacaaagcagucgucucacuauccaacggcgucuccguccucaccuuuaagguccucgaccucaaaaauuauauagacaaacaacuccuccccauccuaaacaaacaaucaugcuccauccccaacauagaaaccgucaucgaauuucaacagaaaaacaaccgacucuuagaaauuacccgcgaguucagcgucaacgccggagucaccacacccgucucaaccuacaugcucaccaacucagaacuccucucacuaaucaaugauaugcccaucacaaacgaccaaaagaaacucauguccaacaacguacaaaucguucgccaacaaagcuacuccaucauguguaucauuaaagaagaaguccucgccuacgucguccaacuuccgcucuacggcguaaucgacacccccugcuggaaacuucacaccucgccccucugcaccacaaacaccaaagaaggcuccaacaucugccuaacccgcaccgaccgcggcugguacugcgacaacgccggcuccgucucauuuuucccccaggcggagaccugcaaaguccaauccaaccgcgucuucugcgacaccaugaacucucuuacccucccaucagaaguaaaccucugcaacgucgacaucuuuaaccccaaauacgauugcaagauaaugaccuccaaaacagacgucucaucguccgucaucaccucccuaggagcuaucgucuccugcuacggcaagaccaaaugcaccgcuuccaacaaaaaccgcggcaucaucaaaaccuucuccaacgggugcgacuacgucucuaacaaaggcguggacacaguauccguaggaaacacacuguacugcguaaacaaacaagagggccaaucgcuuuacgucaaaggcgagccaauuaucaacuucuacgacccgcucgucuucccaucagacgaguucgacgcauccaucucccaagucaacgagaaaaucaaucagucccucgccuucauacgcaaauccgacgaacuccuacauaacguaaacgccggcaaaucuaccacaaacaucaugaucacaaccaucaucaucguaaucaucgucauccuucucucgcucaucgccguaggacugcuacuuuacugcaaggcccgcuaaggacuagugcaucacauuuaaaagcaucucagccuaccaugagaauaagagaaagaaaaugaagaucaauagcuuauucaucucuuuuucuuuuucguugguguaaagccaacacccugucuaaaaaacauaaauuucuuuaaucauuuugccucuuuucucugugcuucaauuaauaaaaaauggaaagaaccuagaucuaaaaaaaaaaaaaaaaaaaaaaaaaaaaaaaaaaaaaaaaaaaaaaaaaaaaaaaaaaaaaaaaugcaucccccccccccccccccccccccccccccccaaaggcucuuuucagagccaccagaauu

SEQ ID NO: 2358 - RNA, 1927 nt, Artificial Sequence
  mRNA product Design i-2 comprising derived and/or modified sequence from HRSV(A2)__F-del_DSCav1_mut1 (opt1)
ggggcgcugccuacggagguggcagccaucuccuucucggcaucaagcuuaccauggagcugcucauccugaaggccaacgccaucaccaccauccugacggcggugaccuucugcuucgccagcggccagaacaucaccgaggaguucuaccaguccacgugcagcgccgucuccaagggguaccucggcgcccugcggaccggcugguacaccuccgugaucaccaucgagcugagcaacaucaaggagaacaagugcaacgggaccgacgccaaggugaagcucaucaagcaggagcuggacaaguacaagaacgcggucacggagcugcagcuccugaugcaguccaccccggcaaccggcuccggcuccgccaucugcagcggcgucgccgugugcaaggugcugcaccucgagggggaggucaacaagaucaagagcgcccugcuguccaccaacaaggccguggugagccucuccaacggcgucagcgugcugaccuucaaggugcuggaccucaagaacuacaucgacaagcagcugcugcccauccugaacaagcagagcugcuccauccccaacaucgagacggugaucgaguuccagcagaagaacaaccggcuccuggagaucacccgcgaguucagcgugaacgccggggucaccacccccguguccacguacaugcugaccaacagcgagcuccugucccugaucaacgacaugccgaucaccaacgaccagaagaagcucaugagcaacaacgugcagaucguccggcagcaguccuacagcaucaugugcaucaucaaggaggaggugcuggcguacgugguccagcugccccucuacggcgugaucgacacccccugcuggaagcugcacacgagcccccugugcaccaccaacaccaaggagggguccaacaucugccucacgcgcaccgaccggggcugguacugcgacaacgccggcagcgucuccuucuucccgcaggccgagaccugcaaggugcagagcaaccgcguguucugcgacaccaugaacucccugacgcugcccagcgagguaaaccucugcaacgucgacaucuucaaccccaaguacgacugcaagaucaugaccuccaagaccgacgugagcuccagcgugaucaccucccugggggccaucgucagcugcuacggcaagacgaagugcaccgccagcaacaagaaccgggggaucaucaagaccuucuccaacggcugcgacuacgugagcaacaagggcguggacaccguguccgucgggaacacccuguacugcgugaacaagcaggagggccagagccucuacgugaagggggagcccaucaucaacuucuacgacccgcuggucuuccccuccgacgaguucgacgcgagcaucucccaggugaacgagaagaucaaccagagccuggccuucauccgcaaguccgacgagcugcuccacaacgugaacgccggcaagagcacgaccaacaucaugaucaccaccaucaucaucgucaucaucgugauccugcugucccucaucgccguggggcugcugcucuacugcaaggcccggugaggacuagugcaucacauuuaaaagcaucucagccuaccaugagaauaagagaaagaaaaugaagaucaauagcuuauucaucucuuuuucuuuuucguugguguaaagccaacacccugucuaaaaaacauaaauuucuuuaaucauuuugccucuuuucucugugcuucaauuaauaaaaaauggaaagaaccuagaucuaaaaaaaaaaaaaaaaaaaaaaaaaaaaaaaaaaaaaaaaaaaaaaaaaaaaaaaaaaaaaaaaugcaucccccccccccccccccccccccccccccccaaaggcucuuuucagagccaccagaauu

SEQ ID NO: 2359 - RNA, 1927 nt, Artificial Sequence
  mRNA product Design i-2 comprising derived and/or modified sequence from HRSV(A2)__F-del_DSCav1_mut1 (opt1)
ggggcgcugccuacggagguggcagccaucuccuucucggcaucaagcuuaccauggagcugcucauccugaaggccaacgccaucaccaccauccugacggcggugaccuucugcuucgccagcggccagaacaucaccgaggaguucuaccaguccacgugcagcgccgucuccaagggguaccucggcgcccugcgcaccgggugguacaccagcgugaucaccaucgagcuguccaacaucaaggagaacaagugcaacggcaccgacgccaaggugaagcucaucaagcaggagcuggacaaguacaagaacgcggucacggagcugcagcuccugaugcagagcacccccgccaccggguccggcagcgccaucugcuccggcguggccgugugcaagguccugcaccucgagggggaggugaacaagaucaagagcgcgcugcuguccaccaacaaggccguggucagccucuccaacggcgugagcgugcugacguucaagguccuggaccucaagaacuacaucgacaagcagcugcugccgauccucaacaagcaguccugcagcauccccaacaucgagaccgugaucgaguuccagcagaagaacaaccggcugcuggagaucacccgcgaguucuccgugaacgccggggucaccacgcccgugagcaccuacaugcucaccaacuccgagcugcugagccucaucaacgacaugcccaucaccaacgaccagaagaagcugaugagcaacaacgugcagaucguccggcagcaguccuacagcaucaugugcaucaucaaggaggaggugcuggccuacgugguccagcucccgcuguacggcgugaucgacacgcccugcuggaagcugcacaccagcccccucugcaccaccaacacgaaggagggguccaacaucugccugacccgcaccgaccggggcugguacugcgacaacgccggcuccgugagcuucuucccccaggcggagaccugcaagguccaguccaaccgcguguucugcgacacgaugaacagccugacccucccguccgaggucaaccugugcaacguggacaucuucaaccccaaguacgacugcaagaucaugaccagcaagaccgacguguccagcuccgucaucacgagccugggggccaucguguccugcuacggcaagaccaagugcaccgccagcaacaagaaccgggggaucaucaagaccuucuccaacggcugcgacuacgugagcaacaagggcgucgacacgguguccguggggaacacccucuacugcgucaacaagcaggagggccagagccuguacgugaagggggagcccaucaucaacuucuacgacccccugguguucccgagcgacgaguucgacgccuccaucagccaggucaacgagaagaucaaccagucccucgccuucauccgcaagagcgacgagcugcugcacaacgugaacgcgggcaaguccaccaccaacaucaugaucaccacgaucaucaucgugaucaucgucauccuccugagccugaucgccguggggcuccugcuguacugcaaggcccggugaggacuagugcaucacauuuaaaagcaucucagccuaccaugagaauaagagaaagaaaaugaagaucaauagcuuauucaucucuuuuucuuuuucguugguguaaagccaacacccugucuaaaaaacauaaauuucuuuaaucauuuugccucuuuucucugugcuucaauuaauaaaaaauggaaagaaccuagaucuaaaaaaaaaaaaaaaaaaaaaaaaaaaaaaaaaaaaaaaaaaaaaaaaaaaaaaaaaaaaaaaaugcaucccccccccccccccccccccccccccccccaaaggcucuuuucagagccaccagaauu

SEQ ID NO: 2360 - RNA, 1927 nt, Artificial Sequence
  mRNA product Design i-2 comprising derived and/or modified sequence from HRSV(A2)__F-del_DSCav1_mut1 (opt2)
ggggcgcugccuacggagguggcagccaucuccuucucggcaucaagcuuaccauggagcuccucauccucaaggccaacgccaucaccaccauccucaccgccgucaccuucugcuucgccuccggccagaacaucaccgaggaguucuaccaguccaccugcuccgccgucuccaagggcuaccucggcgcccuccgcaccggcugguacaccuccgucaucaccaucgagcucuccaacaucaaggagaacaagugcaacggcaccgacgccaaggucaagcucaucaagcaggagcucgacaaguacaagaacgccgucaccgagcuccagcuccucaugcaguccacccccgccaccggcuccggcuccgccaucugcuccggcgucgccgucugcaagguccuccaccucgagggcgaggucaacaagaucaaguccgcccuccucuccaccaacaaggccgucgucucccucuccaacggcgucuccguccucaccuucaagguccucgaccucaagaacuacaucgacaagcagcuccuccccauccucaacaagcaguccugcuccauccccaacaucgagaccgucaucgaguuccagcagaagaacaaccgccuccucgagaucacccgcgaguucuccgucaacgccggcgucaccacccccgucuccaccuacaugcucaccaacuccgagcuccucucccucaucaacgacaugcccaucaccaacgaccagaagaagcucauguccaacaacguccagaucguccgccagcaguccuacuccaucaugugcaucaucaaggaggagguccucgccuacgucguccagcucccccucuacggcgucaucgacacccccugcuggaagcuccacaccuccccccucugcaccaccaacaccaaggagggcuccaacaucugccucacccgcaccgaccgcggcugguacugcgacaacgccggcuccgucuccuucuucccccaggccgagaccugcaagguccaguccaaccgcgucuucugcgacaccaugaacucccucacccuccccuccgaggucaaccucugcaacgucgacaucuucaaccccaaguacgacugcaagaucaugaccuccaagaccgacgucuccuccuccgucaucaccucccucggcgccaucgucuccugcuacggcaagaccaagugcaccgccuccaacaagaaccgcggcaucaucaagaccuucuccaacggcugcgacuacgucuccaacaagggcgucgacaccgucuccgucggcaacacccucuacugcgucaacaagcaggagggccagucccucuacgucaagggcgagcccaucaucaacuucuacgacccccucgucuuccccuccgacgaguucgacgccuccaucucccaggucaacgagaagaucaaccagucccucgccuucauccgcaaguccgacgagcuccuccacaacgucaacgccggcaaguccaccaccaacaucaugaucaccaccaucaucaucgucaucaucgucauccuccucucccucaucgccgucggccuccuccucuacugcaaggcccgcugaggacuagugcaucacauuuaaaagcaucucagccuaccaugagaauaagagaaagaaaaugaagaucaauagcuuauucaucucuuuuucuuuuucguugguguaaagccaacacccugucuaaaaaacauaaauuucuuuaaucauuuugccucuuuucucugugcuucaauuaauaaaaaauggaaagaaccuagaucuaaaaaaaaaaaaaaaaaaaaaaaaaaaaaaaaaaaaaaaaaaaaaaaaaaaaaaaaaaaaaaaaugcaucccccccccccccccccccccccccccccccaaaggcucuuuucagagccaccagaauu

SEQ ID NO: 2361 - RNA, 1927 nt, Artificial Sequence
  mRNA product Design i-2 comprising derived and/or modified sequence from HRSV(A2)__F-del_DSCav1_mut1 (opt3)
ggggcgcugccuacggagguggcagccaucuccuucucggcaucaagcuuaccauggagcugcucauccuuaaggccaacgcuauuaccacaauacugacugcagugacguucugcuuugccagcggccagaauaucaccgaagaguucuaccaauccacauguucugcggucucaaaaggguauuugggagcuuuaagaacugguugguacaccaguguuauuacaaucgaacugagcaacauuaaggagaauaaaugcaacggcaccgacgccaaggugaaacuaaucaagcaggaacucgauaaguauaaaaaugcaguaacugagcugcagcuucugaugcaguccacacccgccaccgggucuggaucggcuauauguucaggcguggcagucugcaagguguugcaccucgagggugaaguuaacaaaaucaagagcgcccugcugaguacgaauaaagcuguggucucccucucuaacggggugagcguauuaacuuuuaagguucuggaccuuaagaauuacauugauaaacaauugcugccuauccuaaacaagcaguccuguucaauuccaaauaucgagaccgugauagaguuccagcagaaaaacaauaggcuccuggaaauuacacgggaguuuagugucaacgccggagugacuaccccggugagcacauauaugcuuaccaauucugaacuguugucccucaucaacgacaugcccauuacgaacgaucaaaagaaacugaugucaaauaacguccagaucguucgccagcagagcuacaguaucaugugcauuauaaaggaggaaguguuagcguauguagugcaacugccucucuacggcgucaucgacacuccauguuggaaacuucauacaucuccccugugcaccacuaauacaaaggagggcuccaacauuuguuugacccgaacggaucgugggugguacugcgacaaugcaggaagcgugucguucuuuccucaggccgaaaccuguaagguucagucuaacagaguguucugcgauacaaugaacucccuaacucugccaucagaggucaaucucugcaauguggacaucuuuaaccccaaauaugauuguaagauaaugaccaguaaaacagacguaagcuccucuguuauuacuagccugggugcuaucgugucaugcuacggcaagaccaaauguacagccaguaauaagaacagggggaucauuaagaccuucuccaauggaugcgauuaugucagcaacaaaggcguggacacugucucuguggguaauacgcuuuacuguguuaacaagcaagaggggcagucacuguaugugaaaggagaaccuaucauuaacuuuuacgacccauugguauucccgagugaugaguuugacgcaagcauaucccaggucaaugaaaagaucaaccagucucucgcuuucauucggaaaucggaugagcuguuacacaaugugaacgccggcaagagcacaaccaauaucaugaucacuaccauuauaaucguuauuaucgugauucugcuaucccucaucgcggucggccugcuuuuguauugcaaggcccgcugaggacuagugcaucacauuuaaaagcaucucagccuaccaugagaauaagagaaagaaaaugaagaucaauagcuuauucaucucuuuuucuuuuucguugguguaaagccaacacccugucuaaaaaacauaaauuucuuuaaucauuuugccucuuuucucugugcuucaauuaauaaaaaauggaaagaaccuagaucuaaaaaaaaaaaaaaaaaaaaaaaaaaaaaaaaaaaaaaaaaaaaaaaaaaaaaaaaaaaaaaaaugcaucccccccccccccccccccccccccccccccaaaggcucuuuucagagccaccagaauu

SEQ ID NO: 2362 - RNA, 1927 nt, Artificial Sequence
  mRNA product Design i-2 comprising derived and/or modified sequence from HRSV(A2)__F-del_DSCav1_mut1 (opt4)
ggggcgcugccuacggagguggcagccaucuccuucucggcaucaagcuuaccauggagcugcugauccugaaggccaacgccaucaccaccauccugaccgccgugaccuucugcuucgccagcggccagaacaucaccgaggaguucuaccagagcaccugcagcgccgugagcaagggcuaccugggcgcccugagaaccggcugguacaccagcgugaucaccaucgagcugagcaacaucaaggagaacaagugcaacggcaccgacgccaaggugaagcugaucaagcaggagcuggacaaguacaagaacgccgugaccgagcugcagcugcugaugcagagcacccccgccaccggcagcggcagcgccaucugcagcggcguggccgugugcaaggugcugcaccuggagggcgaggugaacaagaucaagagcgcccugcugagcaccaacaaggccguggugagccugagcaacggcgugagcgugcugaccuucaaggugcuggaccugaagaacuacaucgacaagcagcugcugcccauccugaacaagcagagcugcagcauccccaacaucgagaccgugaucgaguuccagcagaagaacaacagacugcuggagaucaccagagaguucagcgugaacgccggcgugaccacccccgugagcaccuacaugcugaccaacagcgagcugcugagccugaucaacgacaugcccaucaccaacgaccagaagaagcugaugagcaacaacgugcagaucgugagacagcagagcuacagcaucaugugcaucaucaaggaggaggugcuggccuacguggugcagcugccccuguacggcgugaucgacacccccugcuggaagcugcacaccagcccccugugcaccaccaacaccaaggagggcagcaacaucugccugaccagaaccgacagaggcugguacugcgacaacgccggcagcgugagcuucuucccccaggccgagaccugcaaggugcagagcaacagaguguucugcgacaccaugaacagccugacccugcccagcgaggugaaccugugcaacguggacaucuucaaccccaaguacgacugcaagaucaugaccagcaagaccgacgugagcagcagcgugaucaccagccugggcgccaucgugagcugcuacggcaagaccaagugcaccgccagcaacaagaacagaggcaucaucaagaccuucagcaacggcugcgacuacgugagcaacaagggcguggacaccgugagcgugggcaacacccuguacugcgugaacaagcaggagggccagagccuguacgugaagggcgagcccaucaucaacuucuacgacccccugguguuccccagcgacgaguucgacgccagcaucagccaggugaacgagaagaucaaccagagccuggccuucaucagaaagagcgacgagcugcugcacaacgugaacgccggcaagagcaccaccaacaucaugaucaccaccaucaucaucgugaucaucgugauccugcugagccugaucgccgugggccugcugcuguacugcaaggccagaugaggacuagugcaucacauuuaaaagcaucucagccuaccaugagaauaagagaaagaaaaugaagaucaauagcuuauucaucucuuuuucuuuuucguugguguaaagccaacacccugucuaaaaaacauaaauuucuuuaaucauuuugccucuuuucucugugcuucaauuaauaaaaaauggaaagaaccuagaucuaaaaaaaaaaaaaaaaaaaaaaaaaaaaaaaaaaaaaaaaaaaaaaaaaaaaaaaaaaaaaaaaugcaucccccccccccccccccccccccccccccccaaaggcucuuuucagagccaccagaauu

SEQ ID NO: 2363 - RNA, 1927 nt, Artificial Sequence
  mRNA product Design i-2 comprising derived and/or modified sequence from HRSV(A2)__F-del_DSCav1_mut1 (opt5)
ggggcgcugccuacggagguggcagccaucuccuucucggcaucaagcuuaccauggagcugcucauccugaaggccaacgcuauuaccacaauccuuacggccgugaccuucugcuuugcgagcggccagaauauuacagaagaguucuaccaauccaccuguucugcugucagcaaaggguaucugggagcccucagaacaggcugguacaccuccguuaucacaauugaacugucuaacaucaaggagaauaaaugcaacgggaccgacgccaaggugaaacuuaucaagcaggaacuggauaaguauaaaaaugcugugacggagcuccagcugcugaugcagagcacccccgccacaggauccggcucugcuauuuguagcggggucgccgugugcaagguucuccaccuggagggagaagugaacaaaaucaaguccgcgcuucugagcaccaauaaagccgucgugucucucuccaacggcguuagcgugcugacauuuaagguccuugaccugaagaauuacauugauaaacaacuccugccuauccugaacaagcagucuuguuccauuccgaauaucgagaccgugauugaguuccagcagaaaaacaaucggcuccuggaaaucacgcgcgaguuuagcgugaacgcuggcgucacaacccccguuucuacauauaugcuuaccaauuccgaacugcucagccugaucaacgacaugccuauuaccaacgaucaaaagaaacuuauguccaauaacgugcagaucgugagacagcagucuuacagcauuaugugcaucauuaaggaggaaguccuggccuaugugguucaacucccccuguacggggugaucgacacaccuuguuggaaacugcauacgagcccccucugcaccacaaauaccaaggagggauccaacaucugucugacacggaccgaucgcggcugguacugcgacaaugcugggucugucuccuucuuuccucaggccgaaacguguaaggugcagagcaacagaguuuucugcgauacaaugaacucucuuacccugccgagcgaggugaaucucugcaaugucgacauuuuuaaccccaaauaugauuguaagaucaugaccuccaaaacagacgugucuagcuccgucauuaccagccugggagcgaucgugucuugcuacggcaagacaaaauguacggccuccaauaagaaccgggggauuaucaagaccuucagcaauggaugcgauuauguuucuaacaaaggcguggacacagucuccgugggcaauacccuuuacuguguuaacaagcaagaggggcagagccuguaugugaaaggagaaccuaucauuaacuuuuacgacccccucgucuucccuuccgaugaguuugacgcuucuaucagccaggugaaugaaaagauuaaccagucccuggccuucauccgcaaaucugaugagcugcuccacaaugugaacgcuggcaagagcacaaccaauauuaugaucacgaccauuaucaucguuauuaucgucauucugcuuucccugaucgccguggggcuccugcuguauugcaaggccagaugaggacuagugcaucacauuuaaaagcaucucagccuaccaugagaauaagagaaagaaaaugaagaucaauagcuuauucaucucuuuuucuuuuucguugguguaaagccaacacccugucuaaaaaacauaaauuucuuuaaucauuuugccucuuuucucugugcuucaauuaauaaaaaauggaaagaaccuagaucuaaaaaaaaaaaaaaaaaaaaaaaaaaaaaaaaaaaaaaaaaaaaaaaaaaaaaaaaaaaaaaaaugcaucccccccccccccccccccccccccccccccaaaggcucuuuucagagccaccagaauu

SEQ ID NO: 2364 - RNA, 1927 nt, Artificial Sequence
  mRNA product Design i-2 comprising derived and/or modified sequence from HRSV(A2)__F-del_DSCav1_mut1 (opt6)
ggggcgcugccuacggagguggcagccaucuccuucucggcaucaagcuuaccauggaacuacucaucuuaaaagcaaacgcaauaacaacuauucuaaccgcaguaacauuuuguuucgcaucaggacaaaacauaaccgaagaauuuuaccaaucaacauguuccgcaguuucaaaaggauacuuaggcgcacuaagaacaggcugguacaccuccgugauaacaauagaauuaucaaacauaaaagaaaacaaauguaauggaacugacgccaaaguaaaacuaauaaaacaagaacuagacaaauauaaaaacgcaguaacugaacuacaauuacuaaugcaauccaccccagcaacaggcucaggcucagcaauuugcuccggagucgcugucugcaaaguacuacaucuugaaggcgaagucaauaaaauaaaaucagcacuucuaucaacaaacaaagcaguagucucacuaucaaacggaguaucaguacuaacauuuaaaguauuagaucuaaaaaacuauauagauaaacaacuacuacccauacucaauaaacaauccuguucaauaccaaauauagaaaccguaauagaauuucaacaaaaaaacaaucgacuauuagaaaucacccgagaauuuucagucaaugcaggcguaacaacaccaguaucaaccuacauguuaaccaacuccgaacuacuaucccucauaaacgacaugccaauaacaaacgaucaaaaaaaacuaauguccaacaacguacaaauagucagacaacaaucuuauucaauaaugugcaucauaaaagaagaaguucuagccuacguaguucaacuuccauuauacggcguaauugauacaccaugcuggaaacuacacacauccccacuauguacaacaaacacaaaagaaggaucaaacaucugcuuaacuagaacagacagaggaugguacugcgacaacgcaggaucagucucauucuuuccacaagcagaaacaugcaagguccaaucaaacagaguauucugcgacacaaugaacuccuuaacacuaccaucugaaguaaaccuauguaauguagacauauuuaacccaaaauacgacugcaaaauaaugaccucaaaaacagacguauccucaucaguaauuacaagccucggagccauaguaucaugcuacggaaaaacaaaauguacagcaucaaacaaaaacagaggaauaauaaaaacguucuccaacggaugcgacuauguaucaaacaaaggcguagacacaguaucagucggaaauacccuuuacugcguaaacaaacaagaaggccaaagucuauacguaaaaggagagccaauaauaaacuuuuaugacccccuuguauucccaucugacgaauuugaugcaucaauaucccaagucaacgaaaaaaucaaccaaucauuagccuuuauuagaaaaagugacgaacuauuacacaacguuaaugcagggaaaucaacaacaaauauaaugauuacaaccauaauuauaguuaucauaguuauacuacucucacuaaucgcaguaggauuacuauuauacugcaaagcaagauaaggacuagugcaucacauuuaaaagcaucucagccuaccaugagaauaagagaaagaaaaugaagaucaauagcuuauucaucucuuuuucuuuuucguugguguaaagccaacacccugucuaaaaaacauaaauuucuuuaaucauuuugccucuuuucucugugcuucaauuaauaaaaaauggaaagaaccuagaucuaaaaaaaaaaaaaaaaaaaaaaaaaaaaaaaaaaaaaaaaaaaaaaaaaaaaaaaaaaaaaaaaugcaucccccccccccccccccccccccccccccccaaaggcucuuuucagagccaccagaauu

SEQ ID NO: 2365 - RNA, 1927 nt, Artificial Sequence
  mRNA product Design i-2 comprising derived and/or modified sequence from HRSV(A2)__F-del_DSCav1_mut1 (opt11)
ggggcgcugccuacggagguggcagccaucuccuucucggcaucaagcuuaccauggaacuacucauccuaaaagccaacgcaaucacaaccauacuuacagcuguuaccuucugcuucgcauccggccaaaauaucaccgaagaguucuaccaaucaaccugcuccgccgucagcaaaggauaccucggcgcccuccgaaccggaugguacacuucugucaucacaaucgaacucuccaacaucaaagaaaacaaaugcaacgguaccgacgcgaaagucaaacucaucaaacaagaacuagacaaguacaaaaacgccgucaccgaacugcaacuccucaugcaauccacaccagcaacgggaucaggauccgccaucugcucaggcgucgccgucugcaaaguccugcaccuagaaggagaaguaaacaaaauuaaauccgcccuacucuccaccaacaaagcagucgucucacuauccaacggcgucuccguccucaccuuuaagguccucgaccucaaaaauuauauagacaaacaacuccuccccauccuaaacaaacaaucaugcuccauccccaacauagaaaccgucaucgaauuucaacagaaaaacaaccgacucuuagaaauuacccgcgaguucagcgucaacgccggagucaccacacccgucucaaccuacaugcucaccaacucagaacuccucucacuaaucaaugauaugcccaucacaaacgaccaaaagaaacucauguccaacaacguacaaaucguucgccaacaaagcuacuccaucauguguaucauuaaagaagaaguccucgccuacgucguccaacuuccgcucuacggcguaaucgacacccccugcuggaaacuucacaccucgccccucugcaccacaaacaccaaagaaggcuccaacaucugccuaacccgcaccgaccgcggcugguacugcgacaacgccggcuccgucucauuuuucccccaggcggagaccugcaaaguccaauccaaccgcgucuucugcgacaccaugaacucucuuacccucccaucagaaguaaaccucugcaacgucgacaucuuuaaccccaaauacgauugcaagauaaugaccuccaaaacagacgucucaucguccgucaucaccucccuaggagcuaucgucuccugcuacggcaagaccaaaugcaccgcuuccaacaaaaaccgcggcaucaucaaaaccuucuccaacgggugcgacuacgucucuaacaaaggcguggacacaguauccguaggaaacacacuguacugcguaaacaaacaagagggccaaucgcuuuacgucaaaggcgagccaauuaucaacuucuacgacccgcucgucuucccaucagacgaguucgacgcauccaucucccaagucaacgagaaaaucaaucagucccucgccuucauacgcaaauccgacgaacuccuacauaacguaaacgccggcaaaucuaccacaaacaucaugaucacaaccaucaucaucguaaucaucgucauccuucucucgcucaucgccguaggacugcuacuuuacugcaaggcccgcuaaggacuagugcaucacauuuaaaagcaucucagccuaccaugagaauaagagaaagaaaaugaagaucaauagcuuauucaucucuuuuucuuuuucguugguguaaagccaacacccugucuaaaaaacauaaauuucuuuaaucauuuugccucuuuucucugugcuucaauuaauaaaaaauggaaagaaccuagaucuaaaaaaaaaaaaaaaaaaaaaaaaaaaaaaaaaaaaaaaaaaaaaaaaaaaaaaaaaaaaaaaaugcaucccccccccccccccccccccccccccccccaaaggcucuuuucagagccaccagaauu

SEQ ID NO: 2366 - RNA, 1762 nt, Artificial Sequence
  mRNA product Design i-3 comprising derived and/or modified sequence from HRSV(A2)__F-del_DSCav1_mut1 (opt1) R6774
gggagaaagcuuaccauggagcugcucauccugaaggccaacgccaucaccaccauccugacggcggugaccuucugcuucgccagcggccagaacaucaccgaggaguucuaccaguccacgugcagcgccgucuccaagggguaccucggcgcccugcggaccggcugguacaccuccgugaucaccaucgagcugagcaacaucaaggagaacaagugcaacgggaccgacgccaaggugaagcucaucaagcaggagcuggacaaguacaagaacgcggucacggagcugcagcuccugaugcaguccaccccggcaaccggcuccggcuccgccaucugcagcggcgucgccgugugcaaggugcugcaccucgagggggaggucaacaagaucaagagcgcccugcuguccaccaacaaggccguggugagccucuccaacggcgucagcgugcugaccuucaaggugcuggaccucaagaacuacaucgacaagcagcugcugcccauccugaacaagcagagcugcuccauccccaacaucgagacggugaucgaguuccagcagaagaacaaccggcuccuggagaucacccgcgaguucagcgugaacgccggggucaccacccccguguccacguacaugcugaccaacagcgagcuccugucccugaucaacgacaugccgaucaccaacgaccagaagaagcucaugagcaacaacgugcagaucguccggcagcaguccuacagcaucaugugcaucaucaaggaggaggugcuggcguacgugguccagcugccccucuacggcgugaucgacacccccugcuggaagcugcacacgagcccccugugcaccaccaacaccaaggagggguccaacaucugccucacgcgcaccgaccggggcugguacugcgacaacgccggcagcgucuccuucuucccgcaggccgagaccugcaaggugcagagcaaccgcguguucugcgacaccaugaacucccugacgcugcccagcgagguaaaccucugcaacgucgacaucuucaaccccaaguacgacugcaagaucaugaccuccaagaccgacgugagcuccagcgugaucaccucccugggggccaucgucagcugcuacggcaagacgaagugcaccgccagcaacaagaaccgggggaucaucaagaccuucuccaacggcugcgacuacgugagcaacaagggcguggacaccguguccgucgggaacacccuguacugcgugaacaagcaggagggccagagccucuacgugaagggggagcccaucaucaacuucuacgacccgcuggucuuccccuccgacgaguucgacgcgagcaucucccaggugaacgagaagaucaaccagagccuggccuucauccgcaaguccgacgagcugcuccacaacgugaacgccggcaagagcacgaccaacaucaugaucaccaccaucaucaucgucaucaucgugauccugcugucccucaucgccguggggcugcugcucuacugcaaggcccggugaggacuaguuauaagacugacuagcccgaugggccucccaacgggcccuccuccccuccuugcaccgagauuaauaaaaaaaaaaaaaaaaaaaaaaaaaaaaaaaaaaaaaaaaaaaaaaaaaaaaaaaaaaaaaaaaugcaucccccccccccccccccccccccccccccccaaaggcucuuuucagagccaccagaauu

SEQ ID NO: 2367 - RNA, 1762 nt, Artificial Sequence
  mRNA product Design i-3 comprising derived and/or modified sequence from HRSV(A2)__F-del_DSCav1_mut1 (opt1)
gggagaaagcuuaccauggagcugcucauccugaaggccaacgccaucaccaccauccugacggcggugaccuucugcuucgccagcggccagaacaucaccgaggaguucuaccaguccacgugcagcgccgucuccaagggguaccucggcgcccugcgcaccgggugguacaccagcgugaucaccaucgagcuguccaacaucaaggagaacaagugcaacggcaccgacgccaaggugaagcucaucaagcaggagcuggacaaguacaagaacgcggucacggagcugcagcuccugaugcagagcacccccgccaccggguccggcagcgccaucugcuccggcguggccgugugcaagguccugcaccucgagggggaggugaacaagaucaagagcgcgcugcuguccaccaacaaggccguggucagccucuccaacggcgugagcgugcugacguucaagguccuggaccucaagaacuacaucgacaagcagcugcugccgauccucaacaagcaguccugcagcauccccaacaucgagaccgugaucgaguuccagcagaagaacaaccggcugcuggagaucacccgcgaguucuccgugaacgccggggucaccacgcccgugagcaccuacaugcucaccaacuccgagcugcugagccucaucaacgacaugcccaucaccaacgaccagaagaagcugaugagcaacaacgugcagaucguccggcagcaguccuacagcaucaugugcaucaucaaggaggaggugcuggccuacgugguccagcucccgcuguacggcgugaucgacacgcccugcuggaagcugcacaccagcccccucugcaccaccaacacgaaggagggguccaacaucugccugacccgcaccgaccggggcugguacugcgacaacgccggcuccgugagcuucuucccccaggcggagaccugcaagguccaguccaaccgcguguucugcgacacgaugaacagccugacccucccguccgaggucaaccugugcaacguggacaucuucaaccccaaguacgacugcaagaucaugaccagcaagaccgacguguccagcuccgucaucacgagccugggggccaucguguccugcuacggcaagaccaagugcaccgccagcaacaagaaccgggggaucaucaagaccuucuccaacggcugcgacuacgugagcaacaagggcgucgacacgguguccguggggaacacccucuacugcgucaacaagcaggagggccagagccuguacgugaagggggagcccaucaucaacuucuacgacccccugguguucccgagcgacgaguucgacgccuccaucagccaggucaacgagaagaucaaccagucccucgccuucauccgcaagagcgacgagcugcugcacaacgugaacgcgggcaaguccaccaccaacaucaugaucaccacgaucaucaucgugaucaucgucauccuccugagccugaucgccguggggcuccugcuguacugcaaggcccggugaggacuaguuauaagacugacuagcccgaugggccucccaacgggcccuccuccccuccuugcaccgagauuaauaaaaaaaaaaaaaaaaaaaaaaaaaaaaaaaaaaaaaaaaaaaaaaaaaaaaaaaaaaaaaaaaugcaucccccccccccccccccccccccccccccccaaaggcucuuuucagagccaccagaauu

SEQ ID NO: 2368 - RNA, 1762 nt, Artificial Sequence
  mRNA product Design i-3 comprising derived and/or modified sequence from HRSV(A2)__F-del_DSCav1_mut1 (opt2)
gggagaaagcuuaccauggagcuccucauccucaaggccaacgccaucaccaccauccucaccgccgucaccuucugcuucgccuccggccagaacaucaccgaggaguucuaccaguccaccugcuccgccgucuccaagggcuaccucggcgcccuccgcaccggcugguacaccuccgucaucaccaucgagcucuccaacaucaaggagaacaagugcaacggcaccgacgccaaggucaagcucaucaagcaggagcucgacaaguacaagaacgccgucaccgagcuccagcuccucaugcaguccacccccgccaccggcuccggcuccgccaucugcuccggcgucgccgucugcaagguccuccaccucgagggcgaggucaacaagaucaaguccgcccuccucuccaccaacaaggccgucgucucccucuccaacggcgucuccguccucaccuucaagguccucgaccucaagaacuacaucgacaagcagcuccuccccauccucaacaagcaguccugcuccauccccaacaucgagaccgucaucgaguuccagcagaagaacaaccgccuccucgagaucacccgcgaguucuccgucaacgccggcgucaccacccccgucuccaccuacaugcucaccaacuccgagcuccucucccucaucaacgacaugcccaucaccaacgaccagaagaagcucauguccaacaacguccagaucguccgccagcaguccuacuccaucaugugcaucaucaaggaggagguccucgccuacgucguccagcucccccucuacggcgucaucgacacccccugcuggaagcuccacaccuccccccucugcaccaccaacaccaaggagggcuccaacaucugccucacccgcaccgaccgcggcugguacugcgacaacgccggcuccgucuccuucuucccccaggccgagaccugcaagguccaguccaaccgcgucuucugcgacaccaugaacucccucacccuccccuccgaggucaaccucugcaacgucgacaucuucaaccccaaguacgacugcaagaucaugaccuccaagaccgacgucuccuccuccgucaucaccucccucggcgccaucgucuccugcuacggcaagaccaagugcaccgccuccaacaagaaccgcggcaucaucaagaccuucuccaacggcugcgacuacgucuccaacaagggcgucgacaccgucuccgucggcaacacccucuacugcgucaacaagcaggagggccagucccucuacgucaagggcgagcccaucaucaacuucuacgacccccucgucuuccccuccgacgaguucgacgccuccaucucccaggucaacgagaagaucaaccagucccucgccuucauccgcaaguccgacgagcuccuccacaacgucaacgccggcaaguccaccaccaacaucaugaucaccaccaucaucaucgucaucaucgucauccuccucucccucaucgccgucggccuccuccucuacugcaaggcccgcugaggacuaguuauaagacugacuagcccgaugggccucccaacgggcccuccuccccuccuugcaccgagauuaauaaaaaaaaaaaaaaaaaaaaaaaaaaaaaaaaaaaaaaaaaaaaaaaaaaaaaaaaaaaaaaaaugcaucccccccccccccccccccccccccccccccaaaggcucuuuucagagccaccagaauu

SEQ ID NO: 2369 - RNA, 1762 nt, Artificial Sequence
  mRNA product Design i-3 comprising derived and/or modified sequence from HRSV(A2)__F-del_DSCav1_mut1 (opt3)
gggagaaagcuuaccauggagcugcucauccuuaaggccaacgcuauuaccacaauacugacugcagugacguucugcuuugccagcggccagaauaucaccgaagaguucuaccaauccacauguucugcggucucaaaaggguauuugggagcuuuaagaacugguugguacaccaguguuauuacaaucgaacugagcaacauuaaggagaauaaaugcaacggcaccgacgccaaggugaaacuaaucaagcaggaacucgauaaguauaaaaaugcaguaacugagcugcagcuucugaugcaguccacacccgccaccgggucuggaucggcuauauguucaggcguggcagucugcaagguguugcaccucgagggugaaguuaacaaaaucaagagcgcccugcugaguacgaauaaagcuguggucucccucucuaacggggugagcguauuaacuuuuaagguucuggaccuuaagaauuacauugauaaacaauugcugccuauccuaaacaagcaguccuguucaauuccaaauaucgagaccgugauagaguuccagcagaaaaacaauaggcuccuggaaauuacacgggaguuuagugucaacgccggagugacuaccccggugagcacauauaugcuuaccaauucugaacuguugucccucaucaacgacaugcccauuacgaacgaucaaaagaaacugaugucaaauaacguccagaucguucgccagcagagcuacaguaucaugugcauuauaaaggaggaaguguuagcguauguagugcaacugccucucuacggcgucaucgacacuccauguuggaaacuucauacaucuccccugugcaccacuaauacaaaggagggcuccaacauuuguuugacccgaacggaucgugggugguacugcgacaaugcaggaagcgugucguucuuuccucaggccgaaaccuguaagguucagucuaacagaguguucugcgauacaaugaacucccuaacucugccaucagaggucaaucucugcaauguggacaucuuuaaccccaaauaugauuguaagauaaugaccaguaaaacagacguaagcuccucuguuauuacuagccugggugcuaucgugucaugcuacggcaagaccaaauguacagccaguaauaagaacagggggaucauuaagaccuucuccaauggaugcgauuaugucagcaacaaaggcguggacacugucucuguggguaauacgcuuuacuguguuaacaagcaagaggggcagucacuguaugugaaaggagaaccuaucauuaacuuuuacgacccauugguauucccgagugaugaguuugacgcaagcauaucccaggucaaugaaaagaucaaccagucucucgcuuucauucggaaaucggaugagcuguuacacaaugugaacgccggcaagagcacaaccaauaucaugaucacuaccauuauaaucguuauuaucgugauucugcuaucccucaucgcggucggccugcuuuuguauugcaaggcccgcugaggacuaguuauaagacugacuagcccgaugggccucccaacgggcccuccuccccuccuugcaccgagauuaauaaaaaaaaaaaaaaaaaaaaaaaaaaaaaaaaaaaaaaaaaaaaaaaaaaaaaaaaaaaaaaaaugcaucccccccccccccccccccccccccccccccaaaggcucuuuucagagccaccagaauu

SEQ ID NO: 2370 - RNA, 1762 nt, Artificial Sequence
  mRNA product Design i-3 comprising derived and/or modified sequence from HRSV(A2)__F-del_DSCav1_mut1 (opt4)
gggagaaagcuuaccauggagcugcugauccugaaggccaacgccaucaccaccauccugaccgccgugaccuucugcuucgccagcggccagaacaucaccgaggaguucuaccagagcaccugcagcgccgugagcaagggcuaccugggcgcccugagaaccggcugguacaccagcgugaucaccaucgagcugagcaacaucaaggagaacaagugcaacggcaccgacgccaaggugaagcugaucaagcaggagcuggacaaguacaagaacgccgugaccgagcugcagcugcugaugcagagcacccccgccaccggcagcggcagcgccaucugcagcggcguggccgugugcaaggugcugcaccuggagggcgaggugaacaagaucaagagcgcccugcugagcaccaacaaggccguggugagccugagcaacggcgugagcgugcugaccuucaaggugcuggaccugaagaacuacaucgacaagcagcugcugcccauccugaacaagcagagcugcagcauccccaacaucgagaccgugaucgaguuccagcagaagaacaacagacugcuggagaucaccagagaguucagcgugaacgccggcgugaccacccccgugagcaccuacaugcugaccaacagcgagcugcugagccugaucaacgacaugcccaucaccaacgaccagaagaagcugaugagcaacaacgugcagaucgugagacagcagagcuacagcaucaugugcaucaucaaggaggaggugcuggccuacguggugcagcugccccuguacggcgugaucgacacccccugcuggaagcugcacaccagcccccugugcaccaccaacaccaaggagggcagcaacaucugccugaccagaaccgacagaggcugguacugcgacaacgccggcagcgugagcuucuucccccaggccgagaccugcaaggugcagagcaacagaguguucugcgacaccaugaacagccugacccugcccagcgaggugaaccugugcaacguggacaucuucaaccccaaguacgacugcaagaucaugaccagcaagaccgacgugagcagcagcgugaucaccagccugggcgccaucgugagcugcuacggcaagaccaagugcaccgccagcaacaagaacagaggcaucaucaagaccuucagcaacggcugcgacuacgugagcaacaagggcguggacaccgugagcgugggcaacacccuguacugcgugaacaagcaggagggccagagccuguacgugaagggcgagcccaucaucaacuucuacgacccccugguguuccccagcgacgaguucgacgccagcaucagccaggugaacgagaagaucaaccagagccuggccuucaucagaaagagcgacgagcugcugcacaacgugaacgccggcaagagcaccaccaacaucaugaucaccaccaucaucaucgugaucaucgugauccugcugagccugaucgccgugggccugcugcuguacugcaaggccagaugaggacuaguuauaagacugacuagcccgaugggccucccaacgggcccuccuccccuccuugcaccgagauuaauaaaaaaaaaaaaaaaaaaaaaaaaaaaaaaaaaaaaaaaaaaaaaaaaaaaaaaaaaaaaaaaaugcaucccccccccccccccccccccccccccccccaaaggcucuuuucagagccaccagaauu

SEQ ID NO: 2371 - RNA, 1762 nt, Artificial Sequence
  mRNA product Design i-3 comprising derived and/or modified sequence from HRSV(A2)__F-del_DSCav1_mut1 (opt5)
gggagaaagcuuaccauggagcugcucauccugaaggccaacgcuauuaccacaauccuuacggccgugaccuucugcuuugcgagcggccagaauauuacagaagaguucuaccaauccaccuguucugcugucagcaaaggguaucugggagcccucagaacaggcugguacaccuccguuaucacaauugaacugucuaacaucaaggagaauaaaugcaacgggaccgacgccaaggugaaacuuaucaagcaggaacuggauaaguauaaaaaugcugugacggagcuccagcugcugaugcagagcacccccgccacaggauccggcucugcuauuuguagcggggucgccgugugcaagguucuccaccuggagggagaagugaacaaaaucaaguccgcgcuucugagcaccaauaaagccgucgugucucucuccaacggcguuagcgugcugacauuuaagguccuugaccugaagaauuacauugauaaacaacuccugccuauccugaacaagcagucuuguuccauuccgaauaucgagaccgugauugaguuccagcagaaaaacaaucggcuccuggaaaucacgcgcgaguuuagcgugaacgcuggcgucacaacccccguuucuacauauaugcuuaccaauuccgaacugcucagccugaucaacgacaugccuauuaccaacgaucaaaagaaacuuauguccaauaacgugcagaucgugagacagcagucuuacagcauuaugugcaucauuaaggaggaaguccuggccuaugugguucaacucccccuguacggggugaucgacacaccuuguuggaaacugcauacgagcccccucugcaccacaaauaccaaggagggauccaacaucugucugacacggaccgaucgcggcugguacugcgacaaugcugggucugucuccuucuuuccucaggccgaaacguguaaggugcagagcaacagaguuuucugcgauacaaugaacucucuuacccugccgagcgaggugaaucucugcaaugucgacauuuuuaaccccaaauaugauuguaagaucaugaccuccaaaacagacgugucuagcuccgucauuaccagccugggagcgaucgugucuugcuacggcaagacaaaauguacggccuccaauaagaaccgggggauuaucaagaccuucagcaauggaugcgauuauguuucuaacaaaggcguggacacagucuccgugggcaauacccuuuacuguguuaacaagcaagaggggcagagccuguaugugaaaggagaaccuaucauuaacuuuuacgacccccucgucuucccuuccgaugaguuugacgcuucuaucagccaggugaaugaaaagauuaaccagucccuggccuucauccgcaaaucugaugagcugcuccacaaugugaacgcuggcaagagcacaaccaauauuaugaucacgaccauuaucaucguuauuaucgucauucugcuuucccugaucgccguggggcuccugcuguauugcaaggccagaugaggacuaguuauaagacugacuagcccgaugggccucccaacgggcccuccuccccuccuugcaccgagauuaauaaaaaaaaaaaaaaaaaaaaaaaaaaaaaaaaaaaaaaaaaaaaaaaaaaaaaaaaaaaaaaaaugcaucccccccccccccccccccccccccccccccaaaggcucuuuucagagccaccagaauu

SEQ ID NO: 2372 - RNA, 1762 nt, Artificial Sequence
  mRNA product Design i-3 comprising derived and/or modified sequence from HRSV(A2)__F-del_DSCav1_mut1 (opt6)
gggagaaagcuuaccauggaacuacucaucuuaaaagcaaacgcaauaacaacuauucuaaccgcaguaacauuuuguuucgcaucaggacaaaacauaaccgaagaauuuuaccaaucaacauguuccgcaguuucaaaaggauacuuaggcgcacuaagaacaggcugguacaccuccgugauaacaauagaauuaucaaacauaaaagaaaacaaauguaauggaacugacgccaaaguaaaacuaauaaaacaagaacuagacaaauauaaaaacgcaguaacugaacuacaauuacuaaugcaauccaccccagcaacaggcucaggcucagcaauuugcuccggagucgcugucugcaaaguacuacaucuugaaggcgaagucaauaaaauaaaaucagcacuucuaucaacaaacaaagcaguagucucacuaucaaacggaguaucaguacuaacauuuaaaguauuagaucuaaaaaacuauauagauaaacaacuacuacccauacucaauaaacaauccuguucaauaccaaauauagaaaccguaauagaauuucaacaaaaaaacaaucgacuauuagaaaucacccgagaauuuucagucaaugcaggcguaacaacaccaguaucaaccuacauguuaaccaacuccgaacuacuaucccucauaaacgacaugccaauaacaaacgaucaaaaaaaacuaauguccaacaacguacaaauagucagacaacaaucuuauucaauaaugugcaucauaaaagaagaaguucuagccuacguaguucaacuuccauuauacggcguaauugauacaccaugcuggaaacuacacacauccccacuauguacaacaaacacaaaagaaggaucaaacaucugcuuaacuagaacagacagaggaugguacugcgacaacgcaggaucagucucauucuuuccacaagcagaaacaugcaagguccaaucaaacagaguauucugcgacacaaugaacuccuuaacacuaccaucugaaguaaaccuauguaauguagacauauuuaacccaaaauacgacugcaaaauaaugaccucaaaaacagacguauccucaucaguaauuacaagccucggagccauaguaucaugcuacggaaaaacaaaauguacagcaucaaacaaaaacagaggaauaauaaaaacguucuccaacggaugcgacuauguaucaaacaaaggcguagacacaguaucagucggaaauacccuuuacugcguaaacaaacaagaaggccaaagucuauacguaaaaggagagccaauaauaaacuuuuaugacccccuuguauucccaucugacgaauuugaugcaucaauaucccaagucaacgaaaaaaucaaccaaucauuagccuuuauuagaaaaagugacgaacuauuacacaacguuaaugcagggaaaucaacaacaaauauaaugauuacaaccauaauuauaguuaucauaguuauacuacucucacuaaucgcaguaggauuacuauuauacugcaaagcaagauaaggacuaguuauaagacugacuagcccgaugggccucccaacgggcccuccuccccuccuugcaccgagauuaauaaaaaaaaaaaaaaaaaaaaaaaaaaaaaaaaaaaaaaaaaaaaaaaaaaaaaaaaaaaaaaaaugcaucccccccccccccccccccccccccccccccaaaggcucuuuucagagccaccagaauu

SEQ ID NO: 2373 - RNA, 1762 nt, Artificial Sequence
  mRNA product Design i-3 comprising derived and/or modified sequence from HRSV(A2)__F-del_DSCav1_mut1 (opt11)
gggagaaagcuuaccauggaacuacucauccuaaaagccaacgcaaucacaaccauacuuacagcuguuaccuucugcuucgcauccggccaaaauaucaccgaagaguucuaccaaucaaccugcuccgccgucagcaaaggauaccucggcgcccuccgaaccggaugguacacuucugucaucacaaucgaacucuccaacaucaaagaaaacaaaugcaacgguaccgacgcgaaagucaaacucaucaaacaagaacuagacaaguacaaaaacgccgucaccgaacugcaacuccucaugcaauccacaccagcaacgggaucaggauccgccaucugcucaggcgucgccgucugcaaaguccugcaccuagaaggagaaguaaacaaaauuaaauccgcccuacucuccaccaacaaagcagucgucucacuauccaacggcgucuccguccucaccuuuaagguccucgaccucaaaaauuauauagacaaacaacuccuccccauccuaaacaaacaaucaugcuccauccccaacauagaaaccgucaucgaauuucaacagaaaaacaaccgacucuuagaaauuacccgcgaguucagcgucaacgccggagucaccacacccgucucaaccuacaugcucaccaacucagaacuccucucacuaaucaaugauaugcccaucacaaacgaccaaaagaaacucauguccaacaacguacaaaucguucgccaacaaagcuacuccaucauguguaucauuaaagaagaaguccucgccuacgucguccaacuuccgcucuacggcguaaucgacacccccugcuggaaacuucacaccucgccccucugcaccacaaacaccaaagaaggcuccaacaucugccuaacccgcaccgaccgcggcugguacugcgacaacgccggcuccgucucauuuuucccccaggcggagaccugcaaaguccaauccaaccgcgucuucugcgacaccaugaacucucuuacccucccaucagaaguaaaccucugcaacgucgacaucuuuaaccccaaauacgauugcaagauaaugaccuccaaaacagacgucucaucguccgucaucaccucccuaggagcuaucgucuccugcuacggcaagaccaaaugcaccgcuuccaacaaaaaccgcggcaucaucaaaaccuucuccaacgggugcgacuacgucucuaacaaaggcguggacacaguauccguaggaaacacacuguacugcguaaacaaacaagagggccaaucgcuuuacgucaaaggcgagccaauuaucaacuucuacgacccgcucgucuucccaucagacgaguucgacgcauccaucucccaagucaacgagaaaaucaaucagucccucgccuucauacgcaaauccgacgaacuccuacauaacguaaacgccggcaaaucuaccacaaacaucaugaucacaaccaucaucaucguaaucaucgucauccuucucucgcucaucgccguaggacugcuacuuuacugcaaggcccgcuaaggacuaguuauaagacugacuagcccgaugggccucccaacgggcccuccuccccuccuugcaccgagauuaauaaaaaaaaaaaaaaaaaaaaaaaaaaaaaaaaaaaaaaaaaaaaaaaaaaaaaaaaaaaaaaaaugcaucccccccccccccccccccccccccccccccaaaggcucuuuucagagccaccagaauu

SEQ ID NO: 2374 - protein, 535 aa, Artificial Sequence
  derived and/or modified protein sequence (artificial) from HRSV(A2)__F_DSCav1_mut2
MELLILKANAITTILTAVTFCFASGQNITEEFYQSTCSAVSKGYLGALRTGWYTSVITIELSNIKENKCNGTDAKVKLIKQELDKYKNAVTDLQLLMQSTPATGSGSAICSGVAVCKVLHLEGEVNKIKSALLSTNKAVVSLSNGVSVLTFKVLDLKNYIDKQLLPILNKQSCSIPNIETVIEFQQKNNRLLEITREFSVNAGVTTPVSTYMLTNSELLSLINDMPITNDQKKLMSNNVQIVRQQSYSIMCIIKEEVLAYVVQLPLYGVIDTPCWKLHTSPLCTTNTKEGSNICLTRTDRGWYCDNAGSVSFFPQAETCKVQSNRVFCDTMNSLTLPSEVNLCNVDIFNPKYDCKIMTSKTDVSSSVITSLGAIVSCYGKTKCTASNKNRGIIKTFSNGCDYVSNKGVDTVSVGNTLYCVNKQEGQSLYVKGEPIINFYDPLVFPSDEFDASISQVNEKINQSLAFIRKSDELLHNVNAGKSTTNIMITTIIIVIIVILLSLIAVGLLLYCKARSTPVTLSKDQLSGINNIAFSN

SEQ ID NO: 2375 - RNA, 1608 nt, Artificial Sequence
  derived and/or modified CDS sequence (opt1) from HRSV(A2)__F_DSCav1_mut2
auggagcugcucauccugaaggccaacgccaucaccaccauccugacggcggugaccuucugcuucgccagcggccagaacaucaccgaggaguucuaccaguccacgugcagcgccgucuccaagggguaccucggcgcccugcggaccggcugguacaccuccgugaucaccaucgagcugagcaacaucaaggagaacaagugcaacgggaccgacgccaaggugaagcucaucaagcaggagcuggacaaguacaagaacgcggucacggaccugcagcuccugaugcaguccaccccggcaaccggcuccggcuccgccaucugcagcggcgucgccgugugcaaggugcugcaccucgagggggaggucaacaagaucaagagcgcccugcuguccaccaacaaggccguggugagccucuccaacggcgucagcgugcugaccuucaaggugcuggaccucaagaacuacaucgacaagcagcugcugcccauccugaacaagcagagcugcuccauccccaacaucgagacggugaucgaguuccagcagaagaacaaccggcuccuggagaucacccgcgaguucagcgugaacgccggggucaccacccccguguccacguacaugcugaccaacagcgagcuccugucccugaucaacgacaugccgaucaccaacgaccagaagaagcucaugagcaacaacgugcagaucguccggcagcaguccuacagcaucaugugcaucaucaaggaggaggugcuggcguacgugguccagcugccccucuacggcgugaucgacacccccugcuggaagcugcacacgagcccccugugcaccaccaacaccaaggagggguccaacaucugccucacgcgcaccgaccggggcugguacugcgacaacgccggcagcgucuccuucuucccgcaggccgagaccugcaaggugcagagcaaccgcguguucugcgacaccaugaacucccugacgcugcccagcgagguaaaccucugcaacgucgacaucuucaaccccaaguacgacugcaagaucaugaccuccaagaccgacgugagcuccagcgugaucaccucccugggggccaucgucagcugcuacggcaagacgaagugcaccgccagcaacaagaaccgggggaucaucaagaccuucuccaacggcugcgacuacgugagcaacaagggcguggacaccguguccgucgggaacacccuguacugcgugaacaagcaggagggccagagccucuacgugaagggggagcccaucaucaacuucuacgacccgcuggucuuccccuccgacgaguucgacgcgagcaucucccaggugaacgagaagaucaaccagagccuggccuucauccgcaaguccgacgagcugcuccacaacgugaacgccggcaagagcacgaccaacaucaugaucaccaccaucaucaucgucaucaucgugauccugcugucccucaucgccguggggcugcugcucuacugcaaggcccggagcacgcccgucacccuguccaaggaccagcugagcggcaucaacaacaucgcguucuccaacuga

SEQ ID NO: 2376 - RNA, 1608 nt, Artificial Sequence
  derived and/or modified CDS sequence (opt1) from HRSV(A2)__F_DSCav1_mut2
auggagcugcucauccugaaggccaacgccaucaccaccauccugacggcggugaccuucugcuucgccagcggccagaacaucaccgaggaguucuaccaguccacgugcagcgccgucuccaagggguaccucggcgcccugcgcaccgggugguacaccagcgugaucaccaucgagcuguccaacaucaaggagaacaagugcaacggcaccgacgccaaggugaagcucaucaagcaggagcuggacaaguacaagaacgcggucacggaccugcagcuccugaugcagagcacccccgccaccggguccggcagcgccaucugcuccggcguggccgugugcaagguccugcaccucgagggggaggugaacaagaucaagagcgcgcugcuguccaccaacaaggccguggucagccucuccaacggcgugagcgugcugacguucaagguccuggaccucaagaacuacaucgacaagcagcugcugccgauccucaacaagcaguccugcagcauccccaacaucgagaccgugaucgaguuccagcagaagaacaaccggcugcuggagaucacccgcgaguucuccgugaacgccggggucaccacgcccgugagcaccuacaugcucaccaacuccgagcugcugagccucaucaacgacaugcccaucaccaacgaccagaagaagcugaugagcaacaacgugcagaucguccggcagcaguccuacagcaucaugugcaucaucaaggaggaggugcuggccuacgugguccagcucccgcuguacggcgugaucgacacgcccugcuggaagcugcacaccagcccccucugcaccaccaacacgaaggagggguccaacaucugccugacccgcaccgaccggggcugguacugcgacaacgccggcuccgugagcuucuucccccaggcggagaccugcaagguccaguccaaccgcguguucugcgacacgaugaacagccugacccucccguccgaggucaaccugugcaacguggacaucuucaaccccaaguacgacugcaagaucaugaccagcaagaccgacguguccagcuccgucaucacgagccugggggccaucguguccugcuacggcaagaccaagugcaccgccagcaacaagaaccgggggaucaucaagaccuucuccaacggcugcgacuacgugagcaacaagggcgucgacacgguguccguggggaacacccucuacugcgucaacaagcaggagggccagagccuguacgugaagggggagcccaucaucaacuucuacgacccccugguguucccgagcgacgaguucgacgccuccaucagccaggucaacgagaagaucaaccagucccucgccuucauccgcaagagcgacgagcugcugcacaacgugaacgcgggcaaguccaccaccaacaucaugaucaccacgaucaucaucgugaucaucgucauccuccugagccugaucgccguggggcuccugcuguacugcaaggcccgguccacccccgugacccugagcaaggaccagcucuccggcaucaacaacaucgccuucagcaacuga

SEQ ID NO: 2377 - RNA, 1608 nt, Artificial Sequence
  derived and/or modified CDS sequence (opt2) from HRSV(A2)__F_DSCav1_mut2
auggagcuccucauccucaaggccaacgccaucaccaccauccucaccgccgucaccuucugcuucgccuccggccagaacaucaccgaggaguucuaccaguccaccugcuccgccgucuccaagggcuaccucggcgcccuccgcaccggcugguacaccuccgucaucaccaucgagcucuccaacaucaaggagaacaagugcaacggcaccgacgccaaggucaagcucaucaagcaggagcucgacaaguacaagaacgccgucaccgaccuccagcuccucaugcaguccacccccgccaccggcuccggcuccgccaucugcuccggcgucgccgucugcaagguccuccaccucgagggcgaggucaacaagaucaaguccgcccuccucuccaccaacaaggccgucgucucccucuccaacggcgucuccguccucaccuucaagguccucgaccucaagaacuacaucgacaagcagcuccuccccauccucaacaagcaguccugcuccauccccaacaucgagaccgucaucgaguuccagcagaagaacaaccgccuccucgagaucacccgcgaguucuccgucaacgccggcgucaccacccccgucuccaccuacaugcucaccaacuccgagcuccucucccucaucaacgacaugcccaucaccaacgaccagaagaagcucauguccaacaacguccagaucguccgccagcaguccuacuccaucaugugcaucaucaaggaggagguccucgccuacgucguccagcucccccucuacggcgucaucgacacccccugcuggaagcuccacaccuccccccucugcaccaccaacaccaaggagggcuccaacaucugccucacccgcaccgaccgcggcugguacugcgacaacgccggcuccgucuccuucuucccccaggccgagaccugcaagguccaguccaaccgcgucuucugcgacaccaugaacucccucacccuccccuccgaggucaaccucugcaacgucgacaucuucaaccccaaguacgacugcaagaucaugaccuccaagaccgacgucuccuccuccgucaucaccucccucggcgccaucgucuccugcuacggcaagaccaagugcaccgccuccaacaagaaccgcggcaucaucaagaccuucuccaacggcugcgacuacgucuccaacaagggcgucgacaccgucuccgucggcaacacccucuacugcgucaacaagcaggagggccagucccucuacgucaagggcgagcccaucaucaacuucuacgacccccucgucuuccccuccgacgaguucgacgccuccaucucccaggucaacgagaagaucaaccagucccucgccuucauccgcaaguccgacgagcuccuccacaacgucaacgccggcaaguccaccaccaacaucaugaucaccaccaucaucaucgucaucaucgucauccuccucucccucaucgccgucggccuccuccucuacugcaaggcccgcuccacccccgucacccucuccaaggaccagcucuccggcaucaacaacaucgccuucuccaacuga

SEQ ID NO: 2378 - RNA, 1608 nt, Artificial Sequence
  derived and/or modified CDS sequence (opt3) from HRSV(A2)__F_DSCav1_mut2
auggagcugcucauccuuaaggccaacgcuauuaccacaauacugacugcagugacguucugcuuugccagcggccagaauaucaccgaagaguucuaccaauccacauguucugcggucucaaaaggguauuugggagcuuuaagaacugguugguacaccaguguuauuacaaucgaacugagcaacauuaaggagaauaaaugcaacggcaccgacgccaaggugaaacuaaucaagcaggaacucgauaaguauaaaaaugcaguaacugaccugcagcuucugaugcaguccacacccgccaccgggucuggaucggcuauauguucaggcguggcagucugcaagguguugcaccucgagggugagguuaacaaaaucaagagcgcccugcugaguacgaauaaagcuguggucucccucucuaacggggugagcguauuaacuuuuaagguucuggaucuuaagaauuacauugacaaacaauugcugccuauccuaaacaagcaguccuguucaauuccaaauaucgaaaccgugauagaguuccagcagaaaaacaauaggcuccuggaaauuacacgggaguuuagugucaacgccggagugacuaccccggugagcacauauaugcuuaccaauucugagcuguugucccucaucaacgauaugcccauuacgaacgaccaaaagaaacugaugucaaauaacguccagaucguucgccagcagagcuacaguaucaugugcauuauaaaggaagagguguuagcguauguagugcaacugccucucuacggcgucaucgauacuccauguuggaaacuucauacaucuccccugugcaccacuaauacaaaggaaggcuccaacauuuguuugacccgaacggaccgugggugguacugcgauaaugcaggaagcgugucguucuuuccucaggccgagaccuguaagguucagucuaacagaguguucugcgacacaaugaacucccuaacucugccaucagaagucaaucucugcaauguggauaucuuuaaccccaaauaugacuguaagauaaugaccaguaaaacagauguaagcuccucuguuauuacuagccugggugcuaucgugucaugcuacggcaagaccaaauguacagccaguaauaagaacagggggaucauuaagaccuucuccaauggaugcgacuaugucagcaacaaaggcguggacacugucucuguggguaauacgcuuuacuguguuaacaagcaagaggggcagucacuguaugugaaaggagagccuaucauuaacuuuuacgauccauugguauucccgagugacgaauuugaugcaagcauaucccaggucaaugagaagaucaaccagucucucgcuuucauucggaaaucggacgaacuguuacacaaugugaacgccggcaagagcacaaccaauaucaugaucacuaccauuauaaucguuauuaucgugauucugcuaucccucaucgcggucggccugcuuuuguauugcaaggcccgcucaacacccgugacccugaguaaagaucaacucucugggauaaacaauaucgcauucagcaacuga

SEQ ID NO: 2379 - RNA, 1608 nt, Artificial Sequence
  derived and/or modified CDS sequence (opt4) from HRSV(A2)__F_DSCav1_mut2
auggagcugcugauccugaaggccaacgccaucaccaccauccugaccgccgugaccuucugcuucgccagcggccagaacaucaccgaggaguucuaccagagcaccugcagcgccgugagcaagggcuaccugggcgcccugagaaccggcugguacaccagcgugaucaccaucgagcugagcaacaucaaggagaacaagugcaacggcaccgacgccaaggugaagcugaucaagcaggagcuggacaaguacaagaacgccgugaccgaccugcagcugcugaugcagagcacccccgccaccggcagcggcagcgccaucugcagcggcguggccgugugcaaggugcugcaccuggagggcgaggugaacaagaucaagagcgcccugcugagcaccaacaaggccguggugagccugagcaacggcgugagcgugcugaccuucaaggugcuggaccugaagaacuacaucgacaagcagcugcugcccauccugaacaagcagagcugcagcauccccaacaucgagaccgugaucgaguuccagcagaagaacaacagacugcuggagaucaccagagaguucagcgugaacgccggcgugaccacccccgugagcaccuacaugcugaccaacagcgagcugcugagccugaucaacgacaugcccaucaccaacgaccagaagaagcugaugagcaacaacgugcagaucgugagacagcagagcuacagcaucaugugcaucaucaaggaggaggugcuggccuacguggugcagcugccccuguacggcgugaucgacacccccugcuggaagcugcacaccagcccccugugcaccaccaacaccaaggagggcagcaacaucugccugaccagaaccgacagaggcugguacugcgacaacgccggcagcgugagcuucuucccccaggccgagaccugcaaggugcagagcaacagaguguucugcgacaccaugaacagccugacccugcccagcgaggugaaccugugcaacguggacaucuucaaccccaaguacgacugcaagaucaugaccagcaagaccgacgugagcagcagcgugaucaccagccugggcgccaucgugagcugcuacggcaagaccaagugcaccgccagcaacaagaacagaggcaucaucaagaccuucagcaacggcugcgacuacgugagcaacaagggcguggacaccgugagcgugggcaacacccuguacugcgugaacaagcaggagggccagagccuguacgugaagggcgagcccaucaucaacuucuacgacccccugguguuccccagcgacgaguucgacgccagcaucagccaggugaacgagaagaucaaccagagccuggccuucaucagaaagagcgacgagcugcugcacaacgugaacgccggcaagagcaccaccaacaucaugaucaccaccaucaucaucgugaucaucgugauccugcugagccugaucgccgugggccugcugcuguacugcaaggccagaagcacccccgugacccugagcaaggaccagcugagcggcaucaacaacaucgccuucagcaacuga

SEQ ID NO: 2380 - RNA, 1608 nt, Artificial Sequence
  derived and/or modified CDS sequence (opt5) from HRSV(A2)__F_DSCav1_mut2
auggagcugcucauccugaaggccaacgcuauuaccacaauccuuacggccgugaccuucugcuuugcgagcggccagaauauuacagaagaguucuaccaauccaccuguucugcugucagcaaaggguaucugggagcccucagaacaggcugguacaccuccguuaucacaauugaacugucuaacaucaaggagaauaaaugcaacgggaccgacgccaaggugaaacuuaucaagcaggaacuggauaaguauaaaaaugcugugacggaccuccagcugcugaugcagagcacccccgccacaggauccggcucugcuauuuguagcggggucgccgugugcaagguucuccaccuggagggagaggugaacaaaaucaaguccgcgcuucugagcaccaauaaagccgucgugucucucuccaacggcguuagcgugcugacauuuaagguccuugaucugaagaauuacauugacaaacaacuccugccuauccugaacaagcagucuuguuccauuccgaauaucgaaaccgugauugaguuccagcagaaaaacaaucggcuccuggaaaucacgcgcgaguuuagcgugaacgcuggcgucacaacccccguuucuacauauaugcuuaccaauuccgagcugcucagccugaucaacgauaugccuauuaccaacgaccaaaagaaacuuauguccaauaacgugcagaucgugagacagcagucuuacagcauuaugugcaucauuaaggaagagguccuggccuaugugguucaacucccccuguacggggugaucgauacaccuuguuggaaacugcauacgagcccccucugcaccacaaauaccaaggaaggauccaacaucugucugacacggaccgaccgcggcugguacugcgauaaugcugggucugucuccuucuuuccucaggccgagacguguaaggugcagagcaacagaguuuucugcgacacaaugaacucucuuacccugccgagcgaagugaaucucugcaaugucgauauuuuuaaccccaaauaugacuguaagaucaugaccuccaaaacagaugugucuagcuccgucauuaccagccugggagcgaucgugucuugcuacggcaagacaaaauguacggccuccaauaagaaccgggggauuaucaagaccuucagcaauggaugcgacuauguuucuaacaaaggcguggacacagucuccgugggcaauacccuuuacuguguuaacaagcaagaggggcagagccuguaugugaaaggagagccuaucauuaacuuuuacgauccccucgucuucccuuccgacgaauuugaugcuucuaucagccaggugaaugagaagauuaaccagucccuggccuucauccgcaaaucugacgaacugcuccacaaugugaacgcuggcaagagcacaaccaauauuaugaucacgaccauuaucaucguuauuaucgucauucugcuuucccugaucgccguggggcuccugcuguauugcaaggccagaagcacacccgugacccuuucuaaagaucaacucuccggaauuaacaauaucgcuuucagcaacuga

SEQ ID NO: 2381 - RNA, 1608 nt, Artificial Sequence
  derived and/or modified CDS sequence (opt6) from HRSV(A2)__F_DSCav1_mut2
auggaacuacuaauccuaaaagcaaacgcaauuacaacuauacuuaccgccguaacauuuugcuucgcaucugggcaaaacauuaccgaagaauuuuaucaaucaacaugcucagcagucuccaaaggauaccuuggagcauuaagaaccggcugguauaccuccguaauaacaauugaacuaucuaauauaaaagaaaauaaauguaauggaacugacgcaaaaguuaaacuaauaaaacaagaacucgacaaauacaaaaacgccgucacagaccuacaacuacuaaugcaaucaacccccgcaacaggaucaggauccgcaaucugcagcggcgucgcaguuugcaaaguccuacauuuagaaggagaaguaaacaaaauaaaaucugcucuccucucuacaaacaaagcaguagugucacuuucaaacggaguaucaguucuaacauucaaaguacuagaccuaaaaaauuacauagacaaacaacuacuuccaauucuaaacaaacaauccuguuccauacccaacauagaaacaguaauagaauuucaacaaaaaaauaacagacuccuagaaauuacaagagaauuuuccgucaaugcaggaguaacaaccccaguaucaaccuacauguuaacuaacucagaacucuuaucacuaauaaacgacaugccaaucacuaaugaccaaaaaaaacucaugucaaauaacguacaaauaguccgacaacaaucauacuccaucaugugcauuauaaaagaagaaguacuagcauacgucguccaauuaccacuauacggcgucauagacacaccauguuggaaacuccacacaucaccacuaugcacuacaaauacaaaagaaggcuccaacaucugccuaacaagaacagacagagguugguauugcgacaacgcaggaucaguaucauuuuucccccaagcagaaacauguaaaguacaaucaaauagagucuucugcgacaccaugaacucauuaacacuaccuucagaagucaaccuaugcaacguagacaucuucaacccuaaauaugacugcaaaaucaugaccagcaaaaccgacguuucaucuuccguaauaacaucacuaggcgcaauagucucauguuacggcaaaacaaaauguacagcaucaaauaaaaaccguggaauaauaaaaacauuuucuaaugguugugacuacguaagcaauaaaggaguagauacaguaucagucggcaacaccuuauacuguguaaacaaacaagaaggccaaaguuuauacgucaaaggagaacccaucaucaacuucuacgacccauuaguauucccaucagacgaauuugaugcaagcauuucacaagucaacgaaaaaaucaaucaaucauuagcauucauccgaaaaucagacgaauuauuacacaacguaaacgccggaaaaucaaccacuaauauaaugauaaccacaauaaucaucguaauaauaguaauacuucucucacuaaucgcagucggacuccuucuauacugcaaagcaagaucuacaccaguaacacuauccaaagaucaacuaaguggcauaaacaacauagcauuuucuaacuaa

SEQ ID NO: 2382 - RNA, 1608 nt, Artificial Sequence
  derived and/or modified CDS sequence (opt11) from HRSV(A2)__F_DSCav1_mut2
auggaacuccucauccuaaaagccaacgcgaucaccacaauccugacagccgucaccuucugcuucgccuccggccaaaacaucaccgaagaguucuaccaauccacaugcuccgccgucuccaagggcuaccugggcgcacuucguacaggcugguacaccuccguaauaaccaucgaacucuccaacaucaaagaaaacaaaugcaacggcacagacgcaaaagucaaacucaucaagcaagaacuugacaaauacaaaaaugcagucaccgaccuucaacuccucaugcaaucuacccccgccacaggcuccggcuccgcuaucugcuccggcgucgccgucugcaaaguccuccaccucgaaggugaaguaaacaaaauaaaauccgcccuccucuccaccaacaaagccgucgucucccuaucaaacggcgucuccgugcucaccuucaagguucucgaccugaaaaacuacauagacaaacagcuccuaccaauccuuaacaaacagagcugcuccauuccgaauaucgaaacgguaaucgaauuucaacagaaaaacaaccgccuccucgaaauaacgcgagaguucuccguaaacgcuggcgucaccacacccgucagcaccuacaugcuaacgaacuccgaacucuugucgcucaucaacgacaugcccauaaccaacgaccaaaagaaacuaauguccaauaacguacaaaucguacgccaacaaucuuacuccaucaugugcaucauaaaagaagaaguacuagcuuacgucguccaacucccacuguacggagucaucgacacccccugcuggaaacuccacaccucuccccucugcaccaccaacaccaaagagggcuccaacauuugccugacacgcaccgaccgcggcugguacugcgacaacgcaggcuccgucucguucuucccccaagccgaaaccugcaaaguccaauccaaccgcgucuucugcgacaccaugaacucccucacccuccccuccgaagucaaucuaugcaacguagacaucuucaacccgaaauaugacugcaaaauuaugacaucuaaaaccgacguguccuccucagucaucacuucccuaggagccaucguuuccuguuacggcaagaccaaaugcaccgccagcaacaaaaaccgaggcaucaucaaaaccuucuccaacggaugugacuaugucuccaacaagggcgucgacaccgucagcgucggcaacacccucuacugcgucaacaaacaagaaggccaaucccucuacgucaaaggagagcccauaaucaacuucuacgacccccucgucuucccauccgacgaguucgacgccucaaucucccaagucaacgagaaaaucaaccaauccuuagccuucauccguaaguccgacgaacuccuucacaacgucaacgccgguaaaucuaccaccaacaucaugauaacaacaauaauuaucgucaucaucgucauccuccuuucccucaucgcggucgggcuauugcucuacugcaaagcccgguccaccccaguaacccucucuaaagaccaacucagcggaaucaauaacauagccuucagcaauuaa

SEQ ID NO: 2383 - RNA, 1884 nt, Artificial Sequence
  mRNA product Design a-1 comprising derived and/or modified sequence from HRSV(A2)__F_DSCav1_mut2 (opt1)
gggagagucccgcagucggcguccagcggcucugcuuguucgugugugugucguugcaggccuuauucaagcuuaccauggagcugcucauccugaaggccaacgccaucaccaccauccugacggcggugaccuucugcuucgccagcggccagaacaucaccgaggaguucuaccaguccacgugcagcgccgucuccaagggguaccucggcgcccugcggaccggcugguacaccuccgugaucaccaucgagcugagcaacaucaaggagaacaagugcaacgggaccgacgccaaggugaagcucaucaagcaggagcuggacaaguacaagaacgcggucacggaccugcagcuccugaugcaguccaccccggcaaccggcuccggcuccgccaucugcagcggcgucgccgugugcaaggugcugcaccucgagggggaggucaacaagaucaagagcgcccugcuguccaccaacaaggccguggugagccucuccaacggcgucagcgugcugaccuucaaggugcuggaccucaagaacuacaucgacaagcagcugcugcccauccugaacaagcagagcugcuccauccccaacaucgagacggugaucgaguuccagcagaagaacaaccggcuccuggagaucacccgcgaguucagcgugaacgccggggucaccacccccguguccacguacaugcugaccaacagcgagcuccugucccugaucaacgacaugccgaucaccaacgaccagaagaagcucaugagcaacaacgugcagaucguccggcagcaguccuacagcaucaugugcaucaucaaggaggaggugcuggcguacgugguccagcugccccucuacggcgugaucgacacccccugcuggaagcugcacacgagcccccugugcaccaccaacaccaaggagggguccaacaucugccucacgcgcaccgaccggggcugguacugcgacaacgccggcagcgucuccuucuucccgcaggccgagaccugcaaggugcagagcaaccgcguguucugcgacaccaugaacucccugacgcugcccagcgagguaaaccucugcaacgucgacaucuucaaccccaaguacgacugcaagaucaugaccuccaagaccgacgugagcuccagcgugaucaccucccugggggccaucgucagcugcuacggcaagacgaagugcaccgccagcaacaagaaccgggggaucaucaagaccuucuccaacggcugcgacuacgugagcaacaagggcguggacaccguguccgucgggaacacccuguacugcgugaacaagcaggagggccagagccucuacgugaagggggagcccaucaucaacuucuacgacccgcuggucuuccccuccgacgaguucgacgcgagcaucucccaggugaacgagaagaucaaccagagccuggccuucauccgcaaguccgacgagcugcuccacaacgugaacgccggcaagagcacgaccaacaucaugaucaccaccaucaucaucgucaucaucgugauccugcugucccucaucgccguggggcugcugcucuacugcaaggcccggagcacgcccgucacccuguccaaggaccagcugagcggcaucaacaacaucgcguucuccaacugaggacuagucccuguucccagagcccacuuuuuuuucuuuuuuugaaauaaaauagccugucuuucagaucuaaaaaaaaaaaaaaaaaaaaaaaaaaaaaaaaaaaaaaaaaaaaaaaaaaaaaaaaaaaaaaaaugcaucccccccccccccccccccccccccccccccaaaggcucuuuucagagccaccagaauu

SEQ ID NO: 2384 - RNA, 1884 nt, Artificial Sequence
  mRNA product Design a-1 comprising derived and/or modified sequence from HRSV(A2)__F_DSCav1_mut2 (opt1)
gggagagucccgcagucggcguccagcggcucugcuuguucgugugugugucguugcaggccuuauucaagcuuaccauggagcugcucauccugaaggccaacgccaucaccaccauccugacggcggugaccuucugcuucgccagcggccagaacaucaccgaggaguucuaccaguccacgugcagcgccgucuccaagggguaccucggcgcccugcgcaccgggugguacaccagcgugaucaccaucgagcuguccaacaucaaggagaacaagugcaacggcaccgacgccaaggugaagcucaucaagcaggagcuggacaaguacaagaacgcggucacggaccugcagcuccugaugcagagcacccccgccaccggguccggcagcgccaucugcuccggcguggccgugugcaagguccugcaccucgagggggaggugaacaagaucaagagcgcgcugcuguccaccaacaaggccguggucagccucuccaacggcgugagcgugcugacguucaagguccuggaccucaagaacuacaucgacaagcagcugcugccgauccucaacaagcaguccugcagcauccccaacaucgagaccgugaucgaguuccagcagaagaacaaccggcugcuggagaucacccgcgaguucuccgugaacgccggggucaccacgcccgugagcaccuacaugcucaccaacuccgagcugcugagccucaucaacgacaugcccaucaccaacgaccagaagaagcugaugagcaacaacgugcagaucguccggcagcaguccuacagcaucaugugcaucaucaaggaggaggugcuggccuacgugguccagcucccgcuguacggcgugaucgacacgcccugcuggaagcugcacaccagcccccucugcaccaccaacacgaaggagggguccaacaucugccugacccgcaccgaccggggcugguacugcgacaacgccggcuccgugagcuucuucccccaggcggagaccugcaagguccaguccaaccgcguguucugcgacacgaugaacagccugacccucccguccgaggucaaccugugcaacguggacaucuucaaccccaaguacgacugcaagaucaugaccagcaagaccgacguguccagcuccgucaucacgagccugggggccaucguguccugcuacggcaagaccaagugcaccgccagcaacaagaaccgggggaucaucaagaccuucuccaacggcugcgacuacgugagcaacaagggcgucgacacgguguccguggggaacacccucuacugcgucaacaagcaggagggccagagccuguacgugaagggggagcccaucaucaacuucuacgacccccugguguucccgagcgacgaguucgacgccuccaucagccaggucaacgagaagaucaaccagucccucgccuucauccgcaagagcgacgagcugcugcacaacgugaacgcgggcaaguccaccaccaacaucaugaucaccacgaucaucaucgugaucaucgucauccuccugagccugaucgccguggggcuccugcuguacugcaaggcccgguccacccccgugacccugagcaaggaccagcucuccggcaucaacaacaucgccuucagcaacugaggacuagucccuguucccagagcccacuuuuuuuucuuuuuuugaaauaaaauagccugucuuucagaucuaaaaaaaaaaaaaaaaaaaaaaaaaaaaaaaaaaaaaaaaaaaaaaaaaaaaaaaaaaaaaaaaugcaucccccccccccccccccccccccccccccccaaaggcucuuuucagagccaccagaauu

SEQ ID NO: 2385 - RNA, 1884 nt, Artificial Sequence
  mRNA product Design a-1 comprising derived and/or modified sequence from HRSV(A2)__F_DSCav1_mut2 (opt2)
gggagagucccgcagucggcguccagcggcucugcuuguucgugugugugucguugcaggccuuauucaagcuuaccauggagcuccucauccucaaggccaacgccaucaccaccauccucaccgccgucaccuucugcuucgccuccggccagaacaucaccgaggaguucuaccaguccaccugcuccgccgucuccaagggcuaccucggcgcccuccgcaccggcugguacaccuccgucaucaccaucgagcucuccaacaucaaggagaacaagugcaacggcaccgacgccaaggucaagcucaucaagcaggagcucgacaaguacaagaacgccgucaccgaccuccagcuccucaugcaguccacccccgccaccggcuccggcuccgccaucugcuccggcgucgccgucugcaagguccuccaccucgagggcgaggucaacaagaucaaguccgcccuccucuccaccaacaaggccgucgucucccucuccaacggcgucuccguccucaccuucaagguccucgaccucaagaacuacaucgacaagcagcuccuccccauccucaacaagcaguccugcuccauccccaacaucgagaccgucaucgaguuccagcagaagaacaaccgccuccucgagaucacccgcgaguucuccgucaacgccggcgucaccacccccgucuccaccuacaugcucaccaacuccgagcuccucucccucaucaacgacaugcccaucaccaacgaccagaagaagcucauguccaacaacguccagaucguccgccagcaguccuacuccaucaugugcaucaucaaggaggagguccucgccuacgucguccagcucccccucuacggcgucaucgacacccccugcuggaagcuccacaccuccccccucugcaccaccaacaccaaggagggcuccaacaucugccucacccgcaccgaccgcggcugguacugcgacaacgccggcuccgucuccuucuucccccaggccgagaccugcaagguccaguccaaccgcgucuucugcgacaccaugaacucccucacccuccccuccgaggucaaccucugcaacgucgacaucuucaaccccaaguacgacugcaagaucaugaccuccaagaccgacgucuccuccuccgucaucaccucccucggcgccaucgucuccugcuacggcaagaccaagugcaccgccuccaacaagaaccgcggcaucaucaagaccuucuccaacggcugcgacuacgucuccaacaagggcgucgacaccgucuccgucggcaacacccucuacugcgucaacaagcaggagggccagucccucuacgucaagggcgagcccaucaucaacuucuacgacccccucgucuuccccuccgacgaguucgacgccuccaucucccaggucaacgagaagaucaaccagucccucgccuucauccgcaaguccgacgagcuccuccacaacgucaacgccggcaaguccaccaccaacaucaugaucaccaccaucaucaucgucaucaucgucauccuccucucccucaucgccgucggccuccuccucuacugcaaggcccgcuccacccccgucacccucuccaaggaccagcucuccggcaucaacaacaucgccuucuccaacugaggacuagucccuguucccagagcccacuuuuuuuucuuuuuuugaaauaaaauagccugucuuucagaucuaaaaaaaaaaaaaaaaaaaaaaaaaaaaaaaaaaaaaaaaaaaaaaaaaaaaaaaaaaaaaaaaugcaucccccccccccccccccccccccccccccccaaaggcucuuuucagagccaccagaauu

SEQ ID NO: 2386 - RNA, 1884 nt, Artificial Sequence
  mRNA product Design a-1 comprising derived and/or modified sequence from HRSV(A2)__F_DSCav1_mut2 (opt3)
gggagagucccgcagucggcguccagcggcucugcuuguucgugugugugucguugcaggccuuauucaagcuuaccauggagcugcucauccuuaaggccaacgcuauuaccacaauacugacugcagugacguucugcuuugccagcggccagaauaucaccgaagaguucuaccaauccacauguucugcggucucaaaaggguauuugggagcuuuaagaacugguugguacaccaguguuauuacaaucgaacugagcaacauuaaggagaauaaaugcaacggcaccgacgccaaggugaaacuaaucaagcaggaacucgauaaguauaaaaaugcaguaacugaccugcagcuucugaugcaguccacacccgccaccgggucuggaucggcuauauguucaggcguggcagucugcaagguguugcaccucgagggugagguuaacaaaaucaagagcgcccugcugaguacgaauaaagcuguggucucccucucuaacggggugagcguauuaacuuuuaagguucuggaucuuaagaauuacauugacaaacaauugcugccuauccuaaacaagcaguccuguucaauuccaaauaucgaaaccgugauagaguuccagcagaaaaacaauaggcuccuggaaauuacacgggaguuuagugucaacgccggagugacuaccccggugagcacauauaugcuuaccaauucugagcuguugucccucaucaacgauaugcccauuacgaacgaccaaaagaaacugaugucaaauaacguccagaucguucgccagcagagcuacaguaucaugugcauuauaaaggaagagguguuagcguauguagugcaacugccucucuacggcgucaucgauacuccauguuggaaacuucauacaucuccccugugcaccacuaauacaaaggaaggcuccaacauuuguuugacccgaacggaccgugggugguacugcgauaaugcaggaagcgugucguucuuuccucaggccgagaccuguaagguucagucuaacagaguguucugcgacacaaugaacucccuaacucugccaucagaagucaaucucugcaauguggauaucuuuaaccccaaauaugacuguaagauaaugaccaguaaaacagauguaagcuccucuguuauuacuagccugggugcuaucgugucaugcuacggcaagaccaaauguacagccaguaauaagaacagggggaucauuaagaccuucuccaauggaugcgacuaugucagcaacaaaggcguggacacugucucuguggguaauacgcuuuacuguguuaacaagcaagaggggcagucacuguaugugaaaggagagccuaucauuaacuuuuacgauccauugguauucccgagugacgaauuugaugcaagcauaucccaggucaaugagaagaucaaccagucucucgcuuucauucggaaaucggacgaacuguuacacaaugugaacgccggcaagagcacaaccaauaucaugaucacuaccauuauaaucguuauuaucgugauucugcuaucccucaucgcggucggccugcuuuuguauugcaaggcccgcucaacacccgugacccugaguaaagaucaacucucugggauaaacaauaucgcauucagcaacugaggacuagucccuguucccagagcccacuuuuuuuucuuuuuuugaaauaaaauagccugucuuucagaucuaaaaaaaaaaaaaaaaaaaaaaaaaaaaaaaaaaaaaaaaaaaaaaaaaaaaaaaaaaaaaaaaugcaucccccccccccccccccccccccccccccccaaaggcucuuuucagagccaccagaauu

SEQ ID NO: 2387 - RNA, 1884 nt, Artificial Sequence
  mRNA product Design a-1 comprising derived and/or modified sequence from HRSV(A2)__F_DSCav1_mut2 (opt4)
gggagagucccgcagucggcguccagcggcucugcuuguucgugugugugucguugcaggccuuauucaagcuuaccauggagcugcugauccugaaggccaacgccaucaccaccauccugaccgccgugaccuucugcuucgccagcggccagaacaucaccgaggaguucuaccagagcaccugcagcgccgugagcaagggcuaccugggcgcccugagaaccggcugguacaccagcgugaucaccaucgagcugagcaacaucaaggagaacaagugcaacggcaccgacgccaaggugaagcugaucaagcaggagcuggacaaguacaagaacgccgugaccgaccugcagcugcugaugcagagcacccccgccaccggcagcggcagcgccaucugcagcggcguggccgugugcaaggugcugcaccuggagggcgaggugaacaagaucaagagcgcccugcugagcaccaacaaggccguggugagccugagcaacggcgugagcgugcugaccuucaaggugcuggaccugaagaacuacaucgacaagcagcugcugcccauccugaacaagcagagcugcagcauccccaacaucgagaccgugaucgaguuccagcagaagaacaacagacugcuggagaucaccagagaguucagcgugaacgccggcgugaccacccccgugagcaccuacaugcugaccaacagcgagcugcugagccugaucaacgacaugcccaucaccaacgaccagaagaagcugaugagcaacaacgugcagaucgugagacagcagagcuacagcaucaugugcaucaucaaggaggaggugcuggccuacguggugcagcugccccuguacggcgugaucgacacccccugcuggaagcugcacaccagcccccugugcaccaccaacaccaaggagggcagcaacaucugccugaccagaaccgacagaggcugguacugcgacaacgccggcagcgugagcuucuucccccaggccgagaccugcaaggugcagagcaacagaguguucugcgacaccaugaacagccugacccugcccagcgaggugaaccugugcaacguggacaucuucaaccccaaguacgacugcaagaucaugaccagcaagaccgacgugagcagcagcgugaucaccagccugggcgccaucgugagcugcuacggcaagaccaagugcaccgccagcaacaagaacagaggcaucaucaagaccuucagcaacggcugcgacuacgugagcaacaagggcguggacaccgugagcgugggcaacacccuguacugcgugaacaagcaggagggccagagccuguacgugaagggcgagcccaucaucaacuucuacgacccccugguguuccccagcgacgaguucgacgccagcaucagccaggugaacgagaagaucaaccagagccuggccuucaucagaaagagcgacgagcugcugcacaacgugaacgccggcaagagcaccaccaacaucaugaucaccaccaucaucaucgugaucaucgugauccugcugagccugaucgccgugggccugcugcuguacugcaaggccagaagcacccccgugacccugagcaaggaccagcugagcggcaucaacaacaucgccuucagcaacugaggacuagucccuguucccagagcccacuuuuuuuucuuuuuuugaaauaaaauagccugucuuucagaucuaaaaaaaaaaaaaaaaaaaaaaaaaaaaaaaaaaaaaaaaaaaaaaaaaaaaaaaaaaaaaaaaugcaucccccccccccccccccccccccccccccccaaaggcucuuuucagagccaccagaauu

SEQ ID NO: 2388 - RNA, 1884 nt, Artificial Sequence
  mRNA product Design a-1 comprising derived and/or modified sequence from HRSV(A2)__F_DSCav1_mut2 (opt5)
gggagagucccgcagucggcguccagcggcucugcuuguucgugugugugucguugcaggccuuauucaagcuuaccauggagcugcucauccugaaggccaacgcuauuaccacaauccuuacggccgugaccuucugcuuugcgagcggccagaauauuacagaagaguucuaccaauccaccuguucugcugucagcaaaggguaucugggagcccucagaacaggcugguacaccuccguuaucacaauugaacugucuaacaucaaggagaauaaaugcaacgggaccgacgccaaggugaaacuuaucaagcaggaacuggauaaguauaaaaaugcugugacggaccuccagcugcugaugcagagcacccccgccacaggauccggcucugcuauuuguagcggggucgccgugugcaagguucuccaccuggagggagaggugaacaaaaucaaguccgcgcuucugagcaccaauaaagccgucgugucucucuccaacggcguuagcgugcugacauuuaagguccuugaucugaagaauuacauugacaaacaacuccugccuauccugaacaagcagucuuguuccauuccgaauaucgaaaccgugauugaguuccagcagaaaaacaaucggcuccuggaaaucacgcgcgaguuuagcgugaacgcuggcgucacaacccccguuucuacauauaugcuuaccaauuccgagcugcucagccugaucaacgauaugccuauuaccaacgaccaaaagaaacuuauguccaauaacgugcagaucgugagacagcagucuuacagcauuaugugcaucauuaaggaagagguccuggccuaugugguucaacucccccuguacggggugaucgauacaccuuguuggaaacugcauacgagcccccucugcaccacaaauaccaaggaaggauccaacaucugucugacacggaccgaccgcggcugguacugcgauaaugcugggucugucuccuucuuuccucaggccgagacguguaaggugcagagcaacagaguuuucugcgacacaaugaacucucuuacccugccgagcgaagugaaucucugcaaugucgauauuuuuaaccccaaauaugacuguaagaucaugaccuccaaaacagaugugucuagcuccgucauuaccagccugggagcgaucgugucuugcuacggcaagacaaaauguacggccuccaauaagaaccgggggauuaucaagaccuucagcaauggaugcgacuauguuucuaacaaaggcguggacacagucuccgugggcaauacccuuuacuguguuaacaagcaagaggggcagagccuguaugugaaaggagagccuaucauuaacuuuuacgauccccucgucuucccuuccgacgaauuugaugcuucuaucagccaggugaaugagaagauuaaccagucccuggccuucauccgcaaaucugacgaacugcuccacaaugugaacgcuggcaagagcacaaccaauauuaugaucacgaccauuaucaucguuauuaucgucauucugcuuucccugaucgccguggggcuccugcuguauugcaaggccagaagcacacccgugacccuuucuaaagaucaacucuccggaauuaacaauaucgcuuucagcaacugaggacuagucccuguucccagagcccacuuuuuuuucuuuuuuugaaauaaaauagccugucuuucagaucuaaaaaaaaaaaaaaaaaaaaaaaaaaaaaaaaaaaaaaaaaaaaaaaaaaaaaaaaaaaaaaaaugcaucccccccccccccccccccccccccccccccaaaggcucuuuucagagccaccagaauu

SEQ ID NO: 2389 - RNA, 1884 nt, Artificial Sequence
  mRNA product Design a-1 comprising derived and/or modified sequence from HRSV(A2)__F_DSCav1_mut2 (opt6)
gggagagucccgcagucggcguccagcggcucugcuuguucgugugugugucguugcaggccuuauucaagcuuaccauggaacuacuaauccuaaaagcaaacgcaauuacaacuauacuuaccgccguaacauuuugcuucgcaucugggcaaaacauuaccgaagaauuuuaucaaucaacaugcucagcagucuccaaaggauaccuuggagcauuaagaaccggcugguauaccuccguaauaacaauugaacuaucuaauauaaaagaaaauaaauguaauggaacugacgcaaaaguuaaacuaauaaaacaagaacucgacaaauacaaaaacgccgucacagaccuacaacuacuaaugcaaucaacccccgcaacaggaucaggauccgcaaucugcagcggcgucgcaguuugcaaaguccuacauuuagaaggagaaguaaacaaaauaaaaucugcucuccucucuacaaacaaagcaguagugucacuuucaaacggaguaucaguucuaacauucaaaguacuagaccuaaaaaauuacauagacaaacaacuacuuccaauucuaaacaaacaauccuguuccauacccaacauagaaacaguaauagaauuucaacaaaaaaauaacagacuccuagaaauuacaagagaauuuuccgucaaugcaggaguaacaaccccaguaucaaccuacauguuaacuaacucagaacucuuaucacuaauaaacgacaugccaaucacuaaugaccaaaaaaaacucaugucaaauaacguacaaauaguccgacaacaaucauacuccaucaugugcauuauaaaagaagaaguacuagcauacgucguccaauuaccacuauacggcgucauagacacaccauguuggaaacuccacacaucaccacuaugcacuacaaauacaaaagaaggcuccaacaucugccuaacaagaacagacagagguugguauugcgacaacgcaggaucaguaucauuuuucccccaagcagaaacauguaaaguacaaucaaauagagucuucugcgacaccaugaacucauuaacacuaccuucagaagucaaccuaugcaacguagacaucuucaacccuaaauaugacugcaaaaucaugaccagcaaaaccgacguuucaucuuccguaauaacaucacuaggcgcaauagucucauguuacggcaaaacaaaauguacagcaucaaauaaaaaccguggaauaauaaaaacauuuucuaaugguugugacuacguaagcaauaaaggaguagauacaguaucagucggcaacaccuuauacuguguaaacaaacaagaaggccaaaguuuauacgucaaaggagaacccaucaucaacuucuacgacccauuaguauucccaucagacgaauuugaugcaagcauuucacaagucaacgaaaaaaucaaucaaucauuagcauucauccgaaaaucagacgaauuauuacacaacguaaacgccggaaaaucaaccacuaauauaaugauaaccacaauaaucaucguaauaauaguaauacuucucucacuaaucgcagucggacuccuucuauacugcaaagcaagaucuacaccaguaacacuauccaaagaucaacuaaguggcauaaacaacauagcauuuucuaacuaaggacuagucccuguucccagagcccacuuuuuuuucuuuuuuugaaauaaaauagccugucuuucagaucuaaaaaaaaaaaaaaaaaaaaaaaaaaaaaaaaaaaaaaaaaaaaaaaaaaaaaaaaaaaaaaaaugcaucccccccccccccccccccccccccccccccaaaggcucuuuucagagccaccagaauu

SEQ ID NO: 2390 - RNA, 1884 nt, Artificial Sequence
  mRNA product Design a-1 comprising derived and/or modified sequence from HRSV(A2)__F_DSCav1_mut2 (opt11)
gggagagucccgcagucggcguccagcggcucugcuuguucgugugugugucguugcaggccuuauucaagcuuaccauggaacuccucauccuaaaagccaacgcgaucaccacaauccugacagccgucaccuucugcuucgccuccggccaaaacaucaccgaagaguucuaccaauccacaugcuccgccgucuccaagggcuaccugggcgcacuucguacaggcugguacaccuccguaauaaccaucgaacucuccaacaucaaagaaaacaaaugcaacggcacagacgcaaaagucaaacucaucaagcaagaacuugacaaauacaaaaaugcagucaccgaccuucaacuccucaugcaaucuacccccgccacaggcuccggcuccgcuaucugcuccggcgucgccgucugcaaaguccuccaccucgaaggugaaguaaacaaaauaaaauccgcccuccucuccaccaacaaagccgucgucucccuaucaaacggcgucuccgugcucaccuucaagguucucgaccugaaaaacuacauagacaaacagcuccuaccaauccuuaacaaacagagcugcuccauuccgaauaucgaaacgguaaucgaauuucaacagaaaaacaaccgccuccucgaaauaacgcgagaguucuccguaaacgcuggcgucaccacacccgucagcaccuacaugcuaacgaacuccgaacucuugucgcucaucaacgacaugcccauaaccaacgaccaaaagaaacuaauguccaauaacguacaaaucguacgccaacaaucuuacuccaucaugugcaucauaaaagaagaaguacuagcuuacgucguccaacucccacuguacggagucaucgacacccccugcuggaaacuccacaccucuccccucugcaccaccaacaccaaagagggcuccaacauuugccugacacgcaccgaccgcggcugguacugcgacaacgcaggcuccgucucguucuucccccaagccgaaaccugcaaaguccaauccaaccgcgucuucugcgacaccaugaacucccucacccuccccuccgaagucaaucuaugcaacguagacaucuucaacccgaaauaugacugcaaaauuaugacaucuaaaaccgacguguccuccucagucaucacuucccuaggagccaucguuuccuguuacggcaagaccaaaugcaccgccagcaacaaaaaccgaggcaucaucaaaaccuucuccaacggaugugacuaugucuccaacaagggcgucgacaccgucagcgucggcaacacccucuacugcgucaacaaacaagaaggccaaucccucuacgucaaaggagagcccauaaucaacuucuacgacccccucgucuucccauccgacgaguucgacgccucaaucucccaagucaacgagaaaaucaaccaauccuuagccuucauccguaaguccgacgaacuccuucacaacgucaacgccgguaaaucuaccaccaacaucaugauaacaacaauaauuaucgucaucaucgucauccuccuuucccucaucgcggucgggcuauugcucuacugcaaagcccgguccaccccaguaacccucucuaaagaccaacucagcggaaucaauaacauagccuucagcaauuaaggacuagucccuguucccagagcccacuuuuuuuucuuuuuuugaaauaaaauagccugucuuucagaucuaaaaaaaaaaaaaaaaaaaaaaaaaaaaaaaaaaaaaaaaaaaaaaaaaaaaaaaaaaaaaaaaugcaucccccccccccccccccccccccccccccccaaaggcucuuuucagagccaccagaauu

SEQ ID NO: 2391 - RNA, 1903 nt, Artificial Sequence
  mRNA product Design a-2 comprising derived and/or modified sequence from HRSV(A2)__F_DSCav1_mut2 (opt1)
gggagaguccgcucagccagguugcagaagcggcuuagcguguguccuaaucuucucucugcguguagguaggccugugccgcaaacaagcuuaccauggagcugcucauccugaaggccaacgccaucaccaccauccugacggcggugaccuucugcuucgccagcggccagaacaucaccgaggaguucuaccaguccacgugcagcgccgucuccaagggguaccucggcgcccugcggaccggcugguacaccuccgugaucaccaucgagcugagcaacaucaaggagaacaagugcaacgggaccgacgccaaggugaagcucaucaagcaggagcuggacaaguacaagaacgcggucacggaccugcagcuccugaugcaguccaccccggcaaccggcuccggcuccgccaucugcagcggcgucgccgugugcaaggugcugcaccucgagggggaggucaacaagaucaagagcgcccugcuguccaccaacaaggccguggugagccucuccaacggcgucagcgugcugaccuucaaggugcuggaccucaagaacuacaucgacaagcagcugcugcccauccugaacaagcagagcugcuccauccccaacaucgagacggugaucgaguuccagcagaagaacaaccggcuccuggagaucacccgcgaguucagcgugaacgccggggucaccacccccguguccacguacaugcugaccaacagcgagcuccugucccugaucaacgacaugccgaucaccaacgaccagaagaagcucaugagcaacaacgugcagaucguccggcagcaguccuacagcaucaugugcaucaucaaggaggaggugcuggcguacgugguccagcugccccucuacggcgugaucgacacccccugcuggaagcugcacacgagcccccugugcaccaccaacaccaaggagggguccaacaucugccucacgcgcaccgaccggggcugguacugcgacaacgccggcagcgucuccuucuucccgcaggccgagaccugcaaggugcagagcaaccgcguguucugcgacaccaugaacucccugacgcugcccagcgagguaaaccucugcaacgucgacaucuucaaccccaaguacgacugcaagaucaugaccuccaagaccgacgugagcuccagcgugaucaccucccugggggccaucgucagcugcuacggcaagacgaagugcaccgccagcaacaagaaccgggggaucaucaagaccuucuccaacggcugcgacuacgugagcaacaagggcguggacaccguguccgucgggaacacccuguacugcgugaacaagcaggagggccagagccucuacgugaagggggagcccaucaucaacuucuacgacccgcuggucuuccccuccgacgaguucgacgcgagcaucucccaggugaacgagaagaucaaccagagccuggccuucauccgcaaguccgacgagcugcuccacaacgugaacgccggcaagagcacgaccaacaucaugaucaccaccaucaucaucgucaucaucgugauccugcugucccucaucgccguggggcugcugcucuacugcaaggcccggagcacgcccgucacccuguccaaggaccagcugagcggcaucaacaacaucgcguucuccaacugaggacuagucccuguucccagagcccacuuuuuuuucuuuuuuugaaauaaaauagccugucuuucagaucuaaaaaaaaaaaaaaaaaaaaaaaaaaaaaaaaaaaaaaaaaaaaaaaaaaaaaaaaaaaaaaaaugcaucccccccccccccccccccccccccccccccaaaggcucuuuucagagccaccagaauu

SEQ ID NO: 2392 - RNA, 1903 nt, Artificial Sequence
  mRNA product Design a-2 comprising derived and/or modified sequence from HRSV(A2)__F_DSCav1_mut2 (opt1)
gggagaguccgcucagccagguugcagaagcggcuuagcguguguccuaaucuucucucugcguguagguaggccugugccgcaaacaagcuuaccauggagcugcucauccugaaggccaacgccaucaccaccauccugacggcggugaccuucugcuucgccagcggccagaacaucaccgaggaguucuaccaguccacgugcagcgccgucuccaagggguaccucggcgcccugcgcaccgggugguacaccagcgugaucaccaucgagcuguccaacaucaaggagaacaagugcaacggcaccgacgccaaggugaagcucaucaagcaggagcuggacaaguacaagaacgcggucacggaccugcagcuccugaugcagagcacccccgccaccggguccggcagcgccaucugcuccggcguggccgugugcaagguccugcaccucgagggggaggugaacaagaucaagagcgcgcugcuguccaccaacaaggccguggucagccucuccaacggcgugagcgugcugacguucaagguccuggaccucaagaacuacaucgacaagcagcugcugccgauccucaacaagcaguccugcagcauccccaacaucgagaccgugaucgaguuccagcagaagaacaaccggcugcuggagaucacccgcgaguucuccgugaacgccggggucaccacgcccgugagcaccuacaugcucaccaacuccgagcugcugagccucaucaacgacaugcccaucaccaacgaccagaagaagcugaugagcaacaacgugcagaucguccggcagcaguccuacagcaucaugugcaucaucaaggaggaggugcuggccuacgugguccagcucccgcuguacggcgugaucgacacgcccugcuggaagcugcacaccagcccccucugcaccaccaacacgaaggagggguccaacaucugccugacccgcaccgaccggggcugguacugcgacaacgccggcuccgugagcuucuucccccaggcggagaccugcaagguccaguccaaccgcguguucugcgacacgaugaacagccugacccucccguccgaggucaaccugugcaacguggacaucuucaaccccaaguacgacugcaagaucaugaccagcaagaccgacguguccagcuccgucaucacgagccugggggccaucguguccugcuacggcaagaccaagugcaccgccagcaacaagaaccgggggaucaucaagaccuucuccaacggcugcgacuacgugagcaacaagggcgucgacacgguguccguggggaacacccucuacugcgucaacaagcaggagggccagagccuguacgugaagggggagcccaucaucaacuucuacgacccccugguguucccgagcgacgaguucgacgccuccaucagccaggucaacgagaagaucaaccagucccucgccuucauccgcaagagcgacgagcugcugcacaacgugaacgcgggcaaguccaccaccaacaucaugaucaccacgaucaucaucgugaucaucgucauccuccugagccugaucgccguggggcuccugcuguacugcaaggcccgguccacccccgugacccugagcaaggaccagcucuccggcaucaacaacaucgccuucagcaacugaggacuagucccuguucccagagcccacuuuuuuuucuuuuuuugaaauaaaauagccugucuuucagaucuaaaaaaaaaaaaaaaaaaaaaaaaaaaaaaaaaaaaaaaaaaaaaaaaaaaaaaaaaaaaaaaaugcaucccccccccccccccccccccccccccccccaaaggcucuuuucagagccaccagaauu

SEQ ID NO: 2393 - RNA, 1903 nt, Artificial Sequence
  mRNA product Design a-2 comprising derived and/or modified sequence from HRSV(A2)__F_DSCav1_mut2 (opt2)
gggagaguccgcucagccagguugcagaagcggcuuagcguguguccuaaucuucucucugcguguagguaggccugugccgcaaacaagcuuaccauggagcuccucauccucaaggccaacgccaucaccaccauccucaccgccgucaccuucugcuucgccuccggccagaacaucaccgaggaguucuaccaguccaccugcuccgccgucuccaagggcuaccucggcgcccuccgcaccggcugguacaccuccgucaucaccaucgagcucuccaacaucaaggagaacaagugcaacggcaccgacgccaaggucaagcucaucaagcaggagcucgacaaguacaagaacgccgucaccgaccuccagcuccucaugcaguccacccccgccaccggcuccggcuccgccaucugcuccggcgucgccgucugcaagguccuccaccucgagggcgaggucaacaagaucaaguccgcccuccucuccaccaacaaggccgucgucucccucuccaacggcgucuccguccucaccuucaagguccucgaccucaagaacuacaucgacaagcagcuccuccccauccucaacaagcaguccugcuccauccccaacaucgagaccgucaucgaguuccagcagaagaacaaccgccuccucgagaucacccgcgaguucuccgucaacgccggcgucaccacccccgucuccaccuacaugcucaccaacuccgagcuccucucccucaucaacgacaugcccaucaccaacgaccagaagaagcucauguccaacaacguccagaucguccgccagcaguccuacuccaucaugugcaucaucaaggaggagguccucgccuacgucguccagcucccccucuacggcgucaucgacacccccugcuggaagcuccacaccuccccccucugcaccaccaacaccaaggagggcuccaacaucugccucacccgcaccgaccgcggcugguacugcgacaacgccggcuccgucuccuucuucccccaggccgagaccugcaagguccaguccaaccgcgucuucugcgacaccaugaacucccucacccuccccuccgaggucaaccucugcaacgucgacaucuucaaccccaaguacgacugcaagaucaugaccuccaagaccgacgucuccuccuccgucaucaccucccucggcgccaucgucuccugcuacggcaagaccaagugcaccgccuccaacaagaaccgcggcaucaucaagaccuucuccaacggcugcgacuacgucuccaacaagggcgucgacaccgucuccgucggcaacacccucuacugcgucaacaagcaggagggccagucccucuacgucaagggcgagcccaucaucaacuucuacgacccccucgucuuccccuccgacgaguucgacgccuccaucucccaggucaacgagaagaucaaccagucccucgccuucauccgcaaguccgacgagcuccuccacaacgucaacgccggcaaguccaccaccaacaucaugaucaccaccaucaucaucgucaucaucgucauccuccucucccucaucgccgucggccuccuccucuacugcaaggcccgcuccacccccgucacccucuccaaggaccagcucuccggcaucaacaacaucgccuucuccaacugaggacuagucccuguucccagagcccacuuuuuuuucuuuuuuugaaauaaaauagccugucuuucagaucuaaaaaaaaaaaaaaaaaaaaaaaaaaaaaaaaaaaaaaaaaaaaaaaaaaaaaaaaaaaaaaaaugcaucccccccccccccccccccccccccccccccaaaggcucuuuucagagccaccagaauu

SEQ ID NO: 2394 - RNA, 1903 nt, Artificial Sequence
  mRNA product Design a-2 comprising derived and/or modified sequence from HRSV(A2)__F_DSCav1_mut2 (opt3)
gggagaguccgcucagccagguugcagaagcggcuuagcguguguccuaaucuucucucugcguguagguaggccugugccgcaaacaagcuuaccauggagcugcucauccuuaaggccaacgcuauuaccacaauacugacugcagugacguucugcuuugccagcggccagaauaucaccgaagaguucuaccaauccacauguucugcggucucaaaaggguauuugggagcuuuaagaacugguugguacaccaguguuauuacaaucgaacugagcaacauuaaggagaauaaaugcaacggcaccgacgccaaggugaaacuaaucaagcaggaacucgauaaguauaaaaaugcaguaacugaccugcagcuucugaugcaguccacacccgccaccgggucuggaucggcuauauguucaggcguggcagucugcaagguguugcaccucgagggugagguuaacaaaaucaagagcgcccugcugaguacgaauaaagcuguggucucccucucuaacggggugagcguauuaacuuuuaagguucuggaucuuaagaauuacauugacaaacaauugcugccuauccuaaacaagcaguccuguucaauuccaaauaucgaaaccgugauagaguuccagcagaaaaacaauaggcuccuggaaauuacacgggaguuuagugucaacgccggagugacuaccccggugagcacauauaugcuuaccaauucugagcuguugucccucaucaacgauaugcccauuacgaacgaccaaaagaaacugaugucaaauaacguccagaucguucgccagcagagcuacaguaucaugugcauuauaaaggaagagguguuagcguauguagugcaacugccucucuacggcgucaucgauacuccauguuggaaacuucauacaucuccccugugcaccacuaauacaaaggaaggcuccaacauuuguuugacccgaacggaccgugggugguacugcgauaaugcaggaagcgugucguucuuuccucaggccgagaccuguaagguucagucuaacagaguguucugcgacacaaugaacucccuaacucugccaucagaagucaaucucugcaauguggauaucuuuaaccccaaauaugacuguaagauaaugaccaguaaaacagauguaagcuccucuguuauuacuagccugggugcuaucgugucaugcuacggcaagaccaaauguacagccaguaauaagaacagggggaucauuaagaccuucuccaauggaugcgacuaugucagcaacaaaggcguggacacugucucuguggguaauacgcuuuacuguguuaacaagcaagaggggcagucacuguaugugaaaggagagccuaucauuaacuuuuacgauccauugguauucccgagugacgaauuugaugcaagcauaucccaggucaaugagaagaucaaccagucucucgcuuucauucggaaaucggacgaacuguuacacaaugugaacgccggcaagagcacaaccaauaucaugaucacuaccauuauaaucguuauuaucgugauucugcuaucccucaucgcggucggccugcuuuuguauugcaaggcccgcucaacacccgugacccugaguaaagaucaacucucugggauaaacaauaucgcauucagcaacugaggacuagucccuguucccagagcccacuuuuuuuucuuuuuuugaaauaaaauagccugucuuucagaucuaaaaaaaaaaaaaaaaaaaaaaaaaaaaaaaaaaaaaaaaaaaaaaaaaaaaaaaaaaaaaaaaugcaucccccccccccccccccccccccccccccccaaaggcucuuuucagagccaccagaauu

SEQ ID NO: 2395 - RNA, 1903 nt, Artificial Sequence
  mRNA product Design a-2 comprising derived and/or modified sequence from HRSV(A2)__F_DSCav1_mut2 (opt4)
gggagaguccgcucagccagguugcagaagcggcuuagcguguguccuaaucuucucucugcguguagguaggccugugccgcaaacaagcuuaccauggagcugcugauccugaaggccaacgccaucaccaccauccugaccgccgugaccuucugcuucgccagcggccagaacaucaccgaggaguucuaccagagcaccugcagcgccgugagcaagggcuaccugggcgcccugagaaccggcugguacaccagcgugaucaccaucgagcugagcaacaucaaggagaacaagugcaacggcaccgacgccaaggugaagcugaucaagcaggagcuggacaaguacaagaacgccgugaccgaccugcagcugcugaugcagagcacccccgccaccggcagcggcagcgccaucugcagcggcguggccgugugcaaggugcugcaccuggagggcgaggugaacaagaucaagagcgcccugcugagcaccaacaaggccguggugagccugagcaacggcgugagcgugcugaccuucaaggugcuggaccugaagaacuacaucgacaagcagcugcugcccauccugaacaagcagagcugcagcauccccaacaucgagaccgugaucgaguuccagcagaagaacaacagacugcuggagaucaccagagaguucagcgugaacgccggcgugaccacccccgugagcaccuacaugcugaccaacagcgagcugcugagccugaucaacgacaugcccaucaccaacgaccagaagaagcugaugagcaacaacgugcagaucgugagacagcagagcuacagcaucaugugcaucaucaaggaggaggugcuggccuacguggugcagcugccccuguacggcgugaucgacacccccugcuggaagcugcacaccagcccccugugcaccaccaacaccaaggagggcagcaacaucugccugaccagaaccgacagaggcugguacugcgacaacgccggcagcgugagcuucuucccccaggccgagaccugcaaggugcagagcaacagaguguucugcgacaccaugaacagccugacccugcccagcgaggugaaccugugcaacguggacaucuucaaccccaaguacgacugcaagaucaugaccagcaagaccgacgugagcagcagcgugaucaccagccugggcgccaucgugagcugcuacggcaagaccaagugcaccgccagcaacaagaacagaggcaucaucaagaccuucagcaacggcugcgacuacgugagcaacaagggcguggacaccgugagcgugggcaacacccuguacugcgugaacaagcaggagggccagagccuguacgugaagggcgagcccaucaucaacuucuacgacccccugguguuccccagcgacgaguucgacgccagcaucagccaggugaacgagaagaucaaccagagccuggccuucaucagaaagagcgacgagcugcugcacaacgugaacgccggcaagagcaccaccaacaucaugaucaccaccaucaucaucgugaucaucgugauccugcugagccugaucgccgugggccugcugcuguacugcaaggccagaagcacccccgugacccugagcaaggaccagcugagcggcaucaacaacaucgccuucagcaacugaggacuagucccuguucccagagcccacuuuuuuuucuuuuuuugaaauaaaauagccugucuuucagaucuaaaaaaaaaaaaaaaaaaaaaaaaaaaaaaaaaaaaaaaaaaaaaaaaaaaaaaaaaaaaaaaaugcaucccccccccccccccccccccccccccccccaaaggcucuuuucagagccaccagaauu

SEQ ID NO: 2396 - RNA, 1903 nt, Artificial Sequence
  mRNA product Design a-2 comprising derived and/or modified sequence from HRSV(A2)__F_DSCav1_mut2 (opt5)
gggagaguccgcucagccagguugcagaagcggcuuagcguguguccuaaucuucucucugcguguagguaggccugugccgcaaacaagcuuaccauggagcugcucauccugaaggccaacgcuauuaccacaauccuuacggccgugaccuucugcuuugcgagcggccagaauauuacagaagaguucuaccaauccaccuguucugcugucagcaaaggguaucugggagcccucagaacaggcugguacaccuccguuaucacaauugaacugucuaacaucaaggagaauaaaugcaacgggaccgacgccaaggugaaacuuaucaagcaggaacuggauaaguauaaaaaugcugugacggaccuccagcugcugaugcagagcacccccgccacaggauccggcucugcuauuuguagcggggucgccgugugcaagguucuccaccuggagggagaggugaacaaaaucaaguccgcgcuucugagcaccaauaaagccgucgugucucucuccaacggcguuagcgugcugacauuuaagguccuugaucugaagaauuacauugacaaacaacuccugccuauccugaacaagcagucuuguuccauuccgaauaucgaaaccgugauugaguuccagcagaaaaacaaucggcuccuggaaaucacgcgcgaguuuagcgugaacgcuggcgucacaacccccguuucuacauauaugcuuaccaauuccgagcugcucagccugaucaacgauaugccuauuaccaacgaccaaaagaaacuuauguccaauaacgugcagaucgugagacagcagucuuacagcauuaugugcaucauuaaggaagagguccuggccuaugugguucaacucccccuguacggggugaucgauacaccuuguuggaaacugcauacgagcccccucugcaccacaaauaccaaggaaggauccaacaucugucugacacggaccgaccgcggcugguacugcgauaaugcugggucugucuccuucuuuccucaggccgagacguguaaggugcagagcaacagaguuuucugcgacacaaugaacucucuuacccugccgagcgaagugaaucucugcaaugucgauauuuuuaaccccaaauaugacuguaagaucaugaccuccaaaacagaugugucuagcuccgucauuaccagccugggagcgaucgugucuugcuacggcaagacaaaauguacggccuccaauaagaaccgggggauuaucaagaccuucagcaauggaugcgacuauguuucuaacaaaggcguggacacagucuccgugggcaauacccuuuacuguguuaacaagcaagaggggcagagccuguaugugaaaggagagccuaucauuaacuuuuacgauccccucgucuucccuuccgacgaauuugaugcuucuaucagccaggugaaugagaagauuaaccagucccuggccuucauccgcaaaucugacgaacugcuccacaaugugaacgcuggcaagagcacaaccaauauuaugaucacgaccauuaucaucguuauuaucgucauucugcuuucccugaucgccguggggcuccugcuguauugcaaggccagaagcacacccgugacccuuucuaaagaucaacucuccggaauuaacaauaucgcuuucagcaacugaggacuagucccuguucccagagcccacuuuuuuuucuuuuuuugaaauaaaauagccugucuuucagaucuaaaaaaaaaaaaaaaaaaaaaaaaaaaaaaaaaaaaaaaaaaaaaaaaaaaaaaaaaaaaaaaaugcaucccccccccccccccccccccccccccccccaaaggcucuuuucagagccaccagaauu

SEQ ID NO: 2397 - RNA, 1903 nt, Artificial Sequence
  mRNA product Design a-2 comprising derived and/or modified sequence from HRSV(A2)__F_DSCav1_mut2 (opt6)
gggagaguccgcucagccagguugcagaagcggcuuagcguguguccuaaucuucucucugcguguagguaggccugugccgcaaacaagcuuaccauggaacuacuaauccuaaaagcaaacgcaauuacaacuauacuuaccgccguaacauuuugcuucgcaucugggcaaaacauuaccgaagaauuuuaucaaucaacaugcucagcagucuccaaaggauaccuuggagcauuaagaaccggcugguauaccuccguaauaacaauugaacuaucuaauauaaaagaaaauaaauguaauggaacugacgcaaaaguuaaacuaauaaaacaagaacucgacaaauacaaaaacgccgucacagaccuacaacuacuaaugcaaucaacccccgcaacaggaucaggauccgcaaucugcagcggcgucgcaguuugcaaaguccuacauuuagaaggagaaguaaacaaaauaaaaucugcucuccucucuacaaacaaagcaguagugucacuuucaaacggaguaucaguucuaacauucaaaguacuagaccuaaaaaauuacauagacaaacaacuacuuccaauucuaaacaaacaauccuguuccauacccaacauagaaacaguaauagaauuucaacaaaaaaauaacagacuccuagaaauuacaagagaauuuuccgucaaugcaggaguaacaaccccaguaucaaccuacauguuaacuaacucagaacucuuaucacuaauaaacgacaugccaaucacuaaugaccaaaaaaaacucaugucaaauaacguacaaauaguccgacaacaaucauacuccaucaugugcauuauaaaagaagaaguacuagcauacgucguccaauuaccacuauacggcgucauagacacaccauguuggaaacuccacacaucaccacuaugcacuacaaauacaaaagaaggcuccaacaucugccuaacaagaacagacagagguugguauugcgacaacgcaggaucaguaucauuuuucccccaagcagaaacauguaaaguacaaucaaauagagucuucugcgacaccaugaacucauuaacacuaccuucagaagucaaccuaugcaacguagacaucuucaacccuaaauaugacugcaaaaucaugaccagcaaaaccgacguuucaucuuccguaauaacaucacuaggcgcaauagucucauguuacggcaaaacaaaauguacagcaucaaauaaaaaccguggaauaauaaaaacauuuucuaaugguugugacuacguaagcaauaaaggaguagauacaguaucagucggcaacaccuuauacuguguaaacaaacaagaaggccaaaguuuauacgucaaaggagaacccaucaucaacuucuacgacccauuaguauucccaucagacgaauuugaugcaagcauuucacaagucaacgaaaaaaucaaucaaucauuagcauucauccgaaaaucagacgaauuauuacacaacguaaacgccggaaaaucaaccacuaauauaaugauaaccacaauaaucaucguaauaauaguaauacuucucucacuaaucgcagucggacuccuucuauacugcaaagcaagaucuacaccaguaacacuauccaaagaucaacuaaguggcauaaacaacauagcauuuucuaacuaaggacuagucccuguucccagagcccacuuuuuuuucuuuuuuugaaauaaaauagccugucuuucagaucuaaaaaaaaaaaaaaaaaaaaaaaaaaaaaaaaaaaaaaaaaaaaaaaaaaaaaaaaaaaaaaaaugcaucccccccccccccccccccccccccccccccaaaggcucuuuucagagccaccagaauu

SEQ ID NO: 2398 - RNA, 1903 nt, Artificial Sequence
  mRNA product Design a-2 comprising derived and/or modified sequence from HRSV(A2)__F_DSCav1_mut2 (opt11)
gggagaguccgcucagccagguugcagaagcggcuuagcguguguccuaaucuucucucugcguguagguaggccugugccgcaaacaagcuuaccauggaacuccucauccuaaaagccaacgcgaucaccacaauccugacagccgucaccuucugcuucgccuccggccaaaacaucaccgaagaguucuaccaauccacaugcuccgccgucuccaagggcuaccugggcgcacuucguacaggcugguacaccuccguaauaaccaucgaacucuccaacaucaaagaaaacaaaugcaacggcacagacgcaaaagucaaacucaucaagcaagaacuugacaaauacaaaaaugcagucaccgaccuucaacuccucaugcaaucuacccccgccacaggcuccggcuccgcuaucugcuccggcgucgccgucugcaaaguccuccaccucgaaggugaaguaaacaaaauaaaauccgcccuccucuccaccaacaaagccgucgucucccuaucaaacggcgucuccgugcucaccuucaagguucucgaccugaaaaacuacauagacaaacagcuccuaccaauccuuaacaaacagagcugcuccauuccgaauaucgaaacgguaaucgaauuucaacagaaaaacaaccgccuccucgaaauaacgcgagaguucuccguaaacgcuggcgucaccacacccgucagcaccuacaugcuaacgaacuccgaacucuugucgcucaucaacgacaugcccauaaccaacgaccaaaagaaacuaauguccaauaacguacaaaucguacgccaacaaucuuacuccaucaugugcaucauaaaagaagaaguacuagcuuacgucguccaacucccacuguacggagucaucgacacccccugcuggaaacuccacaccucuccccucugcaccaccaacaccaaagagggcuccaacauuugccugacacgcaccgaccgcggcugguacugcgacaacgcaggcuccgucucguucuucccccaagccgaaaccugcaaaguccaauccaaccgcgucuucugcgacaccaugaacucccucacccuccccuccgaagucaaucuaugcaacguagacaucuucaacccgaaauaugacugcaaaauuaugacaucuaaaaccgacguguccuccucagucaucacuucccuaggagccaucguuuccuguuacggcaagaccaaaugcaccgccagcaacaaaaaccgaggcaucaucaaaaccuucuccaacggaugugacuaugucuccaacaagggcgucgacaccgucagcgucggcaacacccucuacugcgucaacaaacaagaaggccaaucccucuacgucaaaggagagcccauaaucaacuucuacgacccccucgucuucccauccgacgaguucgacgccucaaucucccaagucaacgagaaaaucaaccaauccuuagccuucauccguaaguccgacgaacuccuucacaacgucaacgccgguaaaucuaccaccaacaucaugauaacaacaauaauuaucgucaucaucgucauccuccuuucccucaucgcggucgggcuauugcucuacugcaaagcccgguccaccccaguaacccucucuaaagaccaacucagcggaaucaauaacauagccuucagcaauuaaggacuagucccuguucccagagcccacuuuuuuuucuuuuuuugaaauaaaauagccugucuuucagaucuaaaaaaaaaaaaaaaaaaaaaaaaaaaaaaaaaaaaaaaaaaaaaaaaaaaaaaaaaaaaaaaaugcaucccccccccccccccccccccccccccccccaaaggcucuuuucagagccaccagaauu

SEQ ID NO: 2399 - RNA, 1981 nt, Artificial Sequence
  mRNA product Design a-3 comprising derived and/or modified sequence from HRSV(A2)__F_DSCav1_mut2 (opt1)
gggagagggcgcuuggcuugcaaggacccugagcugcggcauugaagcacacccaacccaacucgacugaagucagccucacugaaccggaucugagaaucuucucucucugggcuugccagggcucuccgaaccuagcuagcauccucuucaauuccaacuagaaagcuuaccauggagcugcucauccugaaggccaacgccaucaccaccauccugacggcggugaccuucugcuucgccagcggccagaacaucaccgaggaguucuaccaguccacgugcagcgccgucuccaagggguaccucggcgcccugcggaccggcugguacaccuccgugaucaccaucgagcugagcaacaucaaggagaacaagugcaacgggaccgacgccaaggugaagcucaucaagcaggagcuggacaaguacaagaacgcggucacggaccugcagcuccugaugcaguccaccccggcaaccggcuccggcuccgccaucugcagcggcgucgccgugugcaaggugcugcaccucgagggggaggucaacaagaucaagagcgcccugcuguccaccaacaaggccguggugagccucuccaacggcgucagcgugcugaccuucaaggugcuggaccucaagaacuacaucgacaagcagcugcugcccauccugaacaagcagagcugcuccauccccaacaucgagacggugaucgaguuccagcagaagaacaaccggcuccuggagaucacccgcgaguucagcgugaacgccggggucaccacccccguguccacguacaugcugaccaacagcgagcuccugucccugaucaacgacaugccgaucaccaacgaccagaagaagcucaugagcaacaacgugcagaucguccggcagcaguccuacagcaucaugugcaucaucaaggaggaggugcuggcguacgugguccagcugccccucuacggcgugaucgacacccccugcuggaagcugcacacgagcccccugugcaccaccaacaccaaggagggguccaacaucugccucacgcgcaccgaccggggcugguacugcgacaacgccggcagcgucuccuucuucccgcaggccgagaccugcaaggugcagagcaaccgcguguucugcgacaccaugaacucccugacgcugcccagcgagguaaaccucugcaacgucgacaucuucaaccccaaguacgacugcaagaucaugaccuccaagaccgacgugagcuccagcgugaucaccucccugggggccaucgucagcugcuacggcaagacgaagugcaccgccagcaacaagaaccgggggaucaucaagaccuucuccaacggcugcgacuacgugagcaacaagggcguggacaccguguccgucgggaacacccuguacugcgugaacaagcaggagggccagagccucuacgugaagggggagcccaucaucaacuucuacgacccgcuggucuuccccuccgacgaguucgacgcgagcaucucccaggugaacgagaagaucaaccagagccuggccuucauccgcaaguccgacgagcugcuccacaacgugaacgccggcaagagcacgaccaacaucaugaucaccaccaucaucaucgucaucaucgugauccugcugucccucaucgccguggggcugcugcucuacugcaaggcccggagcacgcccgucacccuguccaaggaccagcugagcggcaucaacaacaucgcguucuccaacugaggacuagucccuguucccagagcccacuuuuuuuucuuuuuuugaaauaaaauagccugucuuucagaucuaaaaaaaaaaaaaaaaaaaaaaaaaaaaaaaaaaaaaaaaaaaaaaaaaaaaaaaaaaaaaaaaugcaucccccccccccccccccccccccccccccccaaaggcucuuuucagagccaccagaauu

SEQ ID NO: 2400 - RNA, 1981 nt, Artificial Sequence
  mRNA product Design a-3 comprising derived and/or modified sequence from HRSV(A2)__F_DSCav1_mut2 (opt1)
gggagagggcgcuuggcuugcaaggacccugagcugcggcauugaagcacacccaacccaacucgacugaagucagccucacugaaccggaucugagaaucuucucucucugggcuugccagggcucuccgaaccuagcuagcauccucuucaauuccaacuagaaagcuuaccauggagcugcucauccugaaggccaacgccaucaccaccauccugacggcggugaccuucugcuucgccagcggccagaacaucaccgaggaguucuaccaguccacgugcagcgccgucuccaagggguaccucggcgcccugcgcaccgggugguacaccagcgugaucaccaucgagcuguccaacaucaaggagaacaagugcaacggcaccgacgccaaggugaagcucaucaagcaggagcuggacaaguacaagaacgcggucacggaccugcagcuccugaugcagagcacccccgccaccggguccggcagcgccaucugcuccggcguggccgugugcaagguccugcaccucgagggggaggugaacaagaucaagagcgcgcugcuguccaccaacaaggccguggucagccucuccaacggcgugagcgugcugacguucaagguccuggaccucaagaacuacaucgacaagcagcugcugccgauccucaacaagcaguccugcagcauccccaacaucgagaccgugaucgaguuccagcagaagaacaaccggcugcuggagaucacccgcgaguucuccgugaacgccggggucaccacgcccgugagcaccuacaugcucaccaacuccgagcugcugagccucaucaacgacaugcccaucaccaacgaccagaagaagcugaugagcaacaacgugcagaucguccggcagcaguccuacagcaucaugugcaucaucaaggaggaggugcuggccuacgugguccagcucccgcuguacggcgugaucgacacgcccugcuggaagcugcacaccagcccccucugcaccaccaacacgaaggagggguccaacaucugccugacccgcaccgaccggggcugguacugcgacaacgccggcuccgugagcuucuucccccaggcggagaccugcaagguccaguccaaccgcguguucugcgacacgaugaacagccugacccucccguccgaggucaaccugugcaacguggacaucuucaaccccaaguacgacugcaagaucaugaccagcaagaccgacguguccagcuccgucaucacgagccugggggccaucguguccugcuacggcaagaccaagugcaccgccagcaacaagaaccgggggaucaucaagaccuucuccaacggcugcgacuacgugagcaacaagggcgucgacacgguguccguggggaacacccucuacugcgucaacaagcaggagggccagagccuguacgugaagggggagcccaucaucaacuucuacgacccccugguguucccgagcgacgaguucgacgccuccaucagccaggucaacgagaagaucaaccagucccucgccuucauccgcaagagcgacgagcugcugcacaacgugaacgcgggcaaguccaccaccaacaucaugaucaccacgaucaucaucgugaucaucgucauccuccugagccugaucgccguggggcuccugcuguacugcaaggcccgguccacccccgugacccugagcaaggaccagcucuccggcaucaacaacaucgccuucagcaacugaggacuagucccuguucccagagcccacuuuuuuuucuuuuuuugaaauaaaauagccugucuuucagaucuaaaaaaaaaaaaaaaaaaaaaaaaaaaaaaaaaaaaaaaaaaaaaaaaaaaaaaaaaaaaaaaaugcaucccccccccccccccccccccccccccccccaaaggcucuuuucagagccaccagaauu

SEQ ID NO: 2401 - RNA, 1981 nt, Artificial Sequence
  mRNA product Design a-3 comprising derived and/or modified sequence from HRSV(A2)__F_DSCav1_mut2 (opt2)
gggagagggcgcuuggcuugcaaggacccugagcugcggcauugaagcacacccaacccaacucgacugaagucagccucacugaaccggaucugagaaucuucucucucugggcuugccagggcucuccgaaccuagcuagcauccucuucaauuccaacuagaaagcuuaccauggagcuccucauccucaaggccaacgccaucaccaccauccucaccgccgucaccuucugcuucgccuccggccagaacaucaccgaggaguucuaccaguccaccugcuccgccgucuccaagggcuaccucggcgcccuccgcaccggcugguacaccuccgucaucaccaucgagcucuccaacaucaaggagaacaagugcaacggcaccgacgccaaggucaagcucaucaagcaggagcucgacaaguacaagaacgccgucaccgaccuccagcuccucaugcaguccacccccgccaccggcuccggcuccgccaucugcuccggcgucgccgucugcaagguccuccaccucgagggcgaggucaacaagaucaaguccgcccuccucuccaccaacaaggccgucgucucccucuccaacggcgucuccguccucaccuucaagguccucgaccucaagaacuacaucgacaagcagcuccuccccauccucaacaagcaguccugcuccauccccaacaucgagaccgucaucgaguuccagcagaagaacaaccgccuccucgagaucacccgcgaguucuccgucaacgccggcgucaccacccccgucuccaccuacaugcucaccaacuccgagcuccucucccucaucaacgacaugcccaucaccaacgaccagaagaagcucauguccaacaacguccagaucguccgccagcaguccuacuccaucaugugcaucaucaaggaggagguccucgccuacgucguccagcucccccucuacggcgucaucgacacccccugcuggaagcuccacaccuccccccucugcaccaccaacaccaaggagggcuccaacaucugccucacccgcaccgaccgcggcugguacugcgacaacgccggcuccgucuccuucuucccccaggccgagaccugcaagguccaguccaaccgcgucuucugcgacaccaugaacucccucacccuccccuccgaggucaaccucugcaacgucgacaucuucaaccccaaguacgacugcaagaucaugaccuccaagaccgacgucuccuccuccgucaucaccucccucggcgccaucgucuccugcuacggcaagaccaagugcaccgccuccaacaagaaccgcggcaucaucaagaccuucuccaacggcugcgacuacgucuccaacaagggcgucgacaccgucuccgucggcaacacccucuacugcgucaacaagcaggagggccagucccucuacgucaagggcgagcccaucaucaacuucuacgacccccucgucuuccccuccgacgaguucgacgccuccaucucccaggucaacgagaagaucaaccagucccucgccuucauccgcaaguccgacgagcuccuccacaacgucaacgccggcaaguccaccaccaacaucaugaucaccaccaucaucaucgucaucaucgucauccuccucucccucaucgccgucggccuccuccucuacugcaaggcccgcuccacccccgucacccucuccaaggaccagcucuccggcaucaacaacaucgccuucuccaacugaggacuagucccuguucccagagcccacuuuuuuuucuuuuuuugaaauaaaauagccugucuuucagaucuaaaaaaaaaaaaaaaaaaaaaaaaaaaaaaaaaaaaaaaaaaaaaaaaaaaaaaaaaaaaaaaaugcaucccccccccccccccccccccccccccccccaaaggcucuuuucagagccaccagaauu

SEQ ID NO: 2402 - RNA, 1981 nt, Artificial Sequence
  mRNA product Design a-3 comprising derived and/or modified sequence from HRSV(A2)__F_DSCav1_mut2 (opt3)
gggagagggcgcuuggcuugcaaggacccugagcugcggcauugaagcacacccaacccaacucgacugaagucagccucacugaaccggaucugagaaucuucucucucugggcuugccagggcucuccgaaccuagcuagcauccucuucaauuccaacuagaaagcuuaccauggagcugcucauccuuaaggccaacgcuauuaccacaauacugacugcagugacguucugcuuugccagcggccagaauaucaccgaagaguucuaccaauccacauguucugcggucucaaaaggguauuugggagcuuuaagaacugguugguacaccaguguuauuacaaucgaacugagcaacauuaaggagaauaaaugcaacggcaccgacgccaaggugaaacuaaucaagcaggaacucgauaaguauaaaaaugcaguaacugaccugcagcuucugaugcaguccacacccgccaccgggucuggaucggcuauauguucaggcguggcagucugcaagguguugcaccucgagggugagguuaacaaaaucaagagcgcccugcugaguacgaauaaagcuguggucucccucucuaacggggugagcguauuaacuuuuaagguucuggaucuuaagaauuacauugacaaacaauugcugccuauccuaaacaagcaguccuguucaauuccaaauaucgaaaccgugauagaguuccagcagaaaaacaauaggcuccuggaaauuacacgggaguuuagugucaacgccggagugacuaccccggugagcacauauaugcuuaccaauucugagcuguugucccucaucaacgauaugcccauuacgaacgaccaaaagaaacugaugucaaauaacguccagaucguucgccagcagagcuacaguaucaugugcauuauaaaggaagagguguuagcguauguagugcaacugccucucuacggcgucaucgauacuccauguuggaaacuucauacaucuccccugugcaccacuaauacaaaggaaggcuccaacauuuguuugacccgaacggaccgugggugguacugcgauaaugcaggaagcgugucguucuuuccucaggccgagaccuguaagguucagucuaacagaguguucugcgacacaaugaacucccuaacucugccaucagaagucaaucucugcaauguggauaucuuuaaccccaaauaugacuguaagauaaugaccaguaaaacagauguaagcuccucuguuauuacuagccugggugcuaucgugucaugcuacggcaagaccaaauguacagccaguaauaagaacagggggaucauuaagaccuucuccaauggaugcgacuaugucagcaacaaaggcguggacacugucucuguggguaauacgcuuuacuguguuaacaagcaagaggggcagucacuguaugugaaaggagagccuaucauuaacuuuuacgauccauugguauucccgagugacgaauuugaugcaagcauaucccaggucaaugagaagaucaaccagucucucgcuuucauucggaaaucggacgaacuguuacacaaugugaacgccggcaagagcacaaccaauaucaugaucacuaccauuauaaucguuauuaucgugauucugcuaucccucaucgcggucggccugcuuuuguauugcaaggcccgcucaacacccgugacccugaguaaagaucaacucucugggauaaacaauaucgcauucagcaacugaggacuagucccuguucccagagcccacuuuuuuuucuuuuuuugaaauaaaauagccugucuuucagaucuaaaaaaaaaaaaaaaaaaaaaaaaaaaaaaaaaaaaaaaaaaaaaaaaaaaaaaaaaaaaaaaaugcaucccccccccccccccccccccccccccccccaaaggcucuuuucagagccaccagaauu

SEQ ID NO: 2403 - RNA, 1981 nt, Artificial Sequence
  mRNA product Design a-3 comprising derived and/or modified sequence from HRSV(A2)__F_DSCav1_mut2 (opt4)
gggagagggcgcuuggcuugcaaggacccugagcugcggcauugaagcacacccaacccaacucgacugaagucagccucacugaaccggaucugagaaucuucucucucugggcuugccagggcucuccgaaccuagcuagcauccucuucaauuccaacuagaaagcuuaccauggagcugcugauccugaaggccaacgccaucaccaccauccugaccgccgugaccuucugcuucgccagcggccagaacaucaccgaggaguucuaccagagcaccugcagcgccgugagcaagggcuaccugggcgcccugagaaccggcugguacaccagcgugaucaccaucgagcugagcaacaucaaggagaacaagugcaacggcaccgacgccaaggugaagcugaucaagcaggagcuggacaaguacaagaacgccgugaccgaccugcagcugcugaugcagagcacccccgccaccggcagcggcagcgccaucugcagcggcguggccgugugcaaggugcugcaccuggagggcgaggugaacaagaucaagagcgcccugcugagcaccaacaaggccguggugagccugagcaacggcgugagcgugcugaccuucaaggugcuggaccugaagaacuacaucgacaagcagcugcugcccauccugaacaagcagagcugcagcauccccaacaucgagaccgugaucgaguuccagcagaagaacaacagacugcuggagaucaccagagaguucagcgugaacgccggcgugaccacccccgugagcaccuacaugcugaccaacagcgagcugcugagccugaucaacgacaugcccaucaccaacgaccagaagaagcugaugagcaacaacgugcagaucgugagacagcagagcuacagcaucaugugcaucaucaaggaggaggugcuggccuacguggugcagcugccccuguacggcgugaucgacacccccugcuggaagcugcacaccagcccccugugcaccaccaacaccaaggagggcagcaacaucugccugaccagaaccgacagaggcugguacugcgacaacgccggcagcgugagcuucuucccccaggccgagaccugcaaggugcagagcaacagaguguucugcgacaccaugaacagccugacccugcccagcgaggugaaccugugcaacguggacaucuucaaccccaaguacgacugcaagaucaugaccagcaagaccgacgugagcagcagcgugaucaccagccugggcgccaucgugagcugcuacggcaagaccaagugcaccgccagcaacaagaacagaggcaucaucaagaccuucagcaacggcugcgacuacgugagcaacaagggcguggacaccgugagcgugggcaacacccuguacugcgugaacaagcaggagggccagagccuguacgugaagggcgagcccaucaucaacuucuacgacccccugguguuccccagcgacgaguucgacgccagcaucagccaggugaacgagaagaucaaccagagccuggccuucaucagaaagagcgacgagcugcugcacaacgugaacgccggcaagagcaccaccaacaucaugaucaccaccaucaucaucgugaucaucgugauccugcugagccugaucgccgugggccugcugcuguacugcaaggccagaagcacccccgugacccugagcaaggaccagcugagcggcaucaacaacaucgccuucagcaacugaggacuagucccuguucccagagcccacuuuuuuuucuuuuuuugaaauaaaauagccugucuuucagaucuaaaaaaaaaaaaaaaaaaaaaaaaaaaaaaaaaaaaaaaaaaaaaaaaaaaaaaaaaaaaaaaaugcaucccccccccccccccccccccccccccccccaaaggcucuuuucagagccaccagaauu

SEQ ID NO: 2404 - RNA, 1981 nt, Artificial Sequence
  mRNA product Design a-3 comprising derived and/or modified sequence from HRSV(A2)__F_DSCav1_mut2 (opt5)
gggagagggcgcuuggcuugcaaggacccugagcugcggcauugaagcacacccaacccaacucgacugaagucagccucacugaaccggaucugagaaucuucucucucugggcuugccagggcucuccgaaccuagcuagcauccucuucaauuccaacuagaaagcuuaccauggagcugcucauccugaaggccaacgcuauuaccacaauccuuacggccgugaccuucugcuuugcgagcggccagaauauuacagaagaguucuaccaauccaccuguucugcugucagcaaaggguaucugggagcccucagaacaggcugguacaccuccguuaucacaauugaacugucuaacaucaaggagaauaaaugcaacgggaccgacgccaaggugaaacuuaucaagcaggaacuggauaaguauaaaaaugcugugacggaccuccagcugcugaugcagagcacccccgccacaggauccggcucugcuauuuguagcggggucgccgugugcaagguucuccaccuggagggagaggugaacaaaaucaaguccgcgcuucugagcaccaauaaagccgucgugucucucuccaacggcguuagcgugcugacauuuaagguccuugaucugaagaauuacauugacaaacaacuccugccuauccugaacaagcagucuuguuccauuccgaauaucgaaaccgugauugaguuccagcagaaaaacaaucggcuccuggaaaucacgcgcgaguuuagcgugaacgcuggcgucacaacccccguuucuacauauaugcuuaccaauuccgagcugcucagccugaucaacgauaugccuauuaccaacgaccaaaagaaacuuauguccaauaacgugcagaucgugagacagcagucuuacagcauuaugugcaucauuaaggaagagguccuggccuaugugguucaacucccccuguacggggugaucgauacaccuuguuggaaacugcauacgagcccccucugcaccacaaauaccaaggaaggauccaacaucugucugacacggaccgaccgcggcugguacugcgauaaugcugggucugucuccuucuuuccucaggccgagacguguaaggugcagagcaacagaguuuucugcgacacaaugaacucucuuacccugccgagcgaagugaaucucugcaaugucgauauuuuuaaccccaaauaugacuguaagaucaugaccuccaaaacagaugugucuagcuccgucauuaccagccugggagcgaucgugucuugcuacggcaagacaaaauguacggccuccaauaagaaccgggggauuaucaagaccuucagcaauggaugcgacuauguuucuaacaaaggcguggacacagucuccgugggcaauacccuuuacuguguuaacaagcaagaggggcagagccuguaugugaaaggagagccuaucauuaacuuuuacgauccccucgucuucccuuccgacgaauuugaugcuucuaucagccaggugaaugagaagauuaaccagucccuggccuucauccgcaaaucugacgaacugcuccacaaugugaacgcuggcaagagcacaaccaauauuaugaucacgaccauuaucaucguuauuaucgucauucugcuuucccugaucgccguggggcuccugcuguauugcaaggccagaagcacacccgugacccuuucuaaagaucaacucuccggaauuaacaauaucgcuuucagcaacugaggacuagucccuguucccagagcccacuuuuuuuucuuuuuuugaaauaaaauagccugucuuucagaucuaaaaaaaaaaaaaaaaaaaaaaaaaaaaaaaaaaaaaaaaaaaaaaaaaaaaaaaaaaaaaaaaugcaucccccccccccccccccccccccccccccccaaaggcucuuuucagagccaccagaauu

SEQ ID NO: 2405 - RNA, 1981 nt, Artificial Sequence
  mRNA product Design a-3 comprising derived and/or modified sequence from HRSV(A2)__F_DSCav1_mut2 (opt6)
gggagagggcgcuuggcuugcaaggacccugagcugcggcauugaagcacacccaacccaacucgacugaagucagccucacugaaccggaucugagaaucuucucucucugggcuugccagggcucuccgaaccuagcuagcauccucuucaauuccaacuagaaagcuuaccauggaacuacuaauccuaaaagcaaacgcaauuacaacuauacuuaccgccguaacauuuugcuucgcaucugggcaaaacauuaccgaagaauuuuaucaaucaacaugcucagcagucuccaaaggauaccuuggagcauuaagaaccggcugguauaccuccguaauaacaauugaacuaucuaauauaaaagaaaauaaauguaauggaacugacgcaaaaguuaaacuaauaaaacaagaacucgacaaauacaaaaacgccgucacagaccuacaacuacuaaugcaaucaacccccgcaacaggaucaggauccgcaaucugcagcggcgucgcaguuugcaaaguccuacauuuagaaggagaaguaaacaaaauaaaaucugcucuccucucuacaaacaaagcaguagugucacuuucaaacggaguaucaguucuaacauucaaaguacuagaccuaaaaaauuacauagacaaacaacuacuuccaauucuaaacaaacaauccuguuccauacccaacauagaaacaguaauagaauuucaacaaaaaaauaacagacuccuagaaauuacaagagaauuuuccgucaaugcaggaguaacaaccccaguaucaaccuacauguuaacuaacucagaacucuuaucacuaauaaacgacaugccaaucacuaaugaccaaaaaaaacucaugucaaauaacguacaaauaguccgacaacaaucauacuccaucaugugcauuauaaaagaagaaguacuagcauacgucguccaauuaccacuauacggcgucauagacacaccauguuggaaacuccacacaucaccacuaugcacuacaaauacaaaagaaggcuccaacaucugccuaacaagaacagacagagguugguauugcgacaacgcaggaucaguaucauuuuucccccaagcagaaacauguaaaguacaaucaaauagagucuucugcgacaccaugaacucauuaacacuaccuucagaagucaaccuaugcaacguagacaucuucaacccuaaauaugacugcaaaaucaugaccagcaaaaccgacguuucaucuuccguaauaacaucacuaggcgcaauagucucauguuacggcaaaacaaaauguacagcaucaaauaaaaaccguggaauaauaaaaacauuuucuaaugguugugacuacguaagcaauaaaggaguagauacaguaucagucggcaacaccuuauacuguguaaacaaacaagaaggccaaaguuuauacgucaaaggagaacccaucaucaacuucuacgacccauuaguauucccaucagacgaauuugaugcaagcauuucacaagucaacgaaaaaaucaaucaaucauuagcauucauccgaaaaucagacgaauuauuacacaacguaaacgccggaaaaucaaccacuaauauaaugauaaccacaauaaucaucguaauaauaguaauacuucucucacuaaucgcagucggacuccuucuauacugcaaagcaagaucuacaccaguaacacuauccaaagaucaacuaaguggcauaaacaacauagcauuuucuaacuaaggacuagucccuguucccagagcccacuuuuuuuucuuuuuuugaaauaaaauagccugucuuucagaucuaaaaaaaaaaaaaaaaaaaaaaaaaaaaaaaaaaaaaaaaaaaaaaaaaaaaaaaaaaaaaaaaugcaucccccccccccccccccccccccccccccccaaaggcucuuuucagagccaccagaauu

SEQ ID NO: 2406 - RNA, 1981 nt, Artificial Sequence
  mRNA product Design a-3 comprising derived and/or modified sequence from HRSV(A2)__F_DSCav1_mut2 (opt11)
gggagagggcgcuuggcuugcaaggacccugagcugcggcauugaagcacacccaacccaacucgacugaagucagccucacugaaccggaucugagaaucuucucucucugggcuugccagggcucuccgaaccuagcuagcauccucuucaauuccaacuagaaagcuuaccauggaacuccucauccuaaaagccaacgcgaucaccacaauccugacagccgucaccuucugcuucgccuccggccaaaacaucaccgaagaguucuaccaauccacaugcuccgccgucuccaagggcuaccugggcgcacuucguacaggcugguacaccuccguaauaaccaucgaacucuccaacaucaaagaaaacaaaugcaacggcacagacgcaaaagucaaacucaucaagcaagaacuugacaaauacaaaaaugcagucaccgaccuucaacuccucaugcaaucuacccccgccacaggcuccggcuccgcuaucugcuccggcgucgccgucugcaaaguccuccaccucgaaggugaaguaaacaaaauaaaauccgcccuccucuccaccaacaaagccgucgucucccuaucaaacggcgucuccgugcucaccuucaagguucucgaccugaaaaacuacauagacaaacagcuccuaccaauccuuaacaaacagagcugcuccauuccgaauaucgaaacgguaaucgaauuucaacagaaaaacaaccgccuccucgaaauaacgcgagaguucuccguaaacgcuggcgucaccacacccgucagcaccuacaugcuaacgaacuccgaacucuugucgcucaucaacgacaugcccauaaccaacgaccaaaagaaacuaauguccaauaacguacaaaucguacgccaacaaucuuacuccaucaugugcaucauaaaagaagaaguacuagcuuacgucguccaacucccacuguacggagucaucgacacccccugcuggaaacuccacaccucuccccucugcaccaccaacaccaaagagggcuccaacauuugccugacacgcaccgaccgcggcugguacugcgacaacgcaggcuccgucucguucuucccccaagccgaaaccugcaaaguccaauccaaccgcgucuucugcgacaccaugaacucccucacccuccccuccgaagucaaucuaugcaacguagacaucuucaacccgaaauaugacugcaaaauuaugacaucuaaaaccgacguguccuccucagucaucacuucccuaggagccaucguuuccuguuacggcaagaccaaaugcaccgccagcaacaaaaaccgaggcaucaucaaaaccuucuccaacggaugugacuaugucuccaacaagggcgucgacaccgucagcgucggcaacacccucuacugcgucaacaaacaagaaggccaaucccucuacgucaaaggagagcccauaaucaacuucuacgacccccucgucuucccauccgacgaguucgacgccucaaucucccaagucaacgagaaaaucaaccaauccuuagccuucauccguaaguccgacgaacuccuucacaacgucaacgccgguaaaucuaccaccaacaucaugauaacaacaauaauuaucgucaucaucgucauccuccuuucccucaucgcggucgggcuauugcucuacugcaaagcccgguccaccccaguaacccucucuaaagaccaacucagcggaaucaauaacauagccuucagcaauuaaggacuagucccuguucccagagcccacuuuuuuuucuuuuuuugaaauaaaauagccugucuuucagaucuaaaaaaaaaaaaaaaaaaaaaaaaaaaaaaaaaaaaaaaaaaaaaaaaaaaaaaaaaaaaaaaaugcaucccccccccccccccccccccccccccccccaaaggcucuuuucagagccaccagaauu

SEQ ID NO: 2407 - RNA, 1930 nt, Artificial Sequence
  mRNA product Design a-4 comprising derived and/or modified sequence from HRSV(A2)__F_DSCav1_mut2 (opt1)
gggagacuccugucgggcggaaguaggaggaguagaguuuaaaaacaguacucuuuuuccgguucgggacguaguugaagcaacgacaagccggauaaccgcucuugagacaggaagcuuaccauggagcugcucauccugaaggccaacgccaucaccaccauccugacggcggugaccuucugcuucgccagcggccagaacaucaccgaggaguucuaccaguccacgugcagcgccgucuccaagggguaccucggcgcccugcggaccggcugguacaccuccgugaucaccaucgagcugagcaacaucaaggagaacaagugcaacgggaccgacgccaaggugaagcucaucaagcaggagcuggacaaguacaagaacgcggucacggaccugcagcuccugaugcaguccaccccggcaaccggcuccggcuccgccaucugcagcggcgucgccgugugcaaggugcugcaccucgagggggaggucaacaagaucaagagcgcccugcuguccaccaacaaggccguggugagccucuccaacggcgucagcgugcugaccuucaaggugcuggaccucaagaacuacaucgacaagcagcugcugcccauccugaacaagcagagcugcuccauccccaacaucgagacggugaucgaguuccagcagaagaacaaccggcuccuggagaucacccgcgaguucagcgugaacgccggggucaccacccccguguccacguacaugcugaccaacagcgagcuccugucccugaucaacgacaugccgaucaccaacgaccagaagaagcucaugagcaacaacgugcagaucguccggcagcaguccuacagcaucaugugcaucaucaaggaggaggugcuggcguacgugguccagcugccccucuacggcgugaucgacacccccugcuggaagcugcacacgagcccccugugcaccaccaacaccaaggagggguccaacaucugccucacgcgcaccgaccggggcugguacugcgacaacgccggcagcgucuccuucuucccgcaggccgagaccugcaaggugcagagcaaccgcguguucugcgacaccaugaacucccugacgcugcccagcgagguaaaccucugcaacgucgacaucuucaaccccaaguacgacugcaagaucaugaccuccaagaccgacgugagcuccagcgugaucaccucccugggggccaucgucagcugcuacggcaagacgaagugcaccgccagcaacaagaaccgggggaucaucaagaccuucuccaacggcugcgacuacgugagcaacaagggcguggacaccguguccgucgggaacacccuguacugcgugaacaagcaggagggccagagccucuacgugaagggggagcccaucaucaacuucuacgacccgcuggucuuccccuccgacgaguucgacgcgagcaucucccaggugaacgagaagaucaaccagagccuggccuucauccgcaaguccgacgagcugcuccacaacgugaacgccggcaagagcacgaccaacaucaugaucaccaccaucaucaucgucaucaucgugauccugcugucccucaucgccguggggcugcugcucuacugcaaggcccggagcacgcccgucacccuguccaaggaccagcugagcggcaucaacaacaucgcguucuccaacugaggacuagucccuguucccagagcccacuuuuuuuucuuuuuuugaaauaaaauagccugucuuucagaucuaaaaaaaaaaaaaaaaaaaaaaaaaaaaaaaaaaaaaaaaaaaaaaaaaaaaaaaaaaaaaaaaugcaucccccccccccccccccccccccccccccccaaaggcucuuuucagagccaccagaauu

SEQ ID NO: 2408 - RNA, 1930 nt, Artificial Sequence
  mRNA product Design a-4 comprising derived and/or modified sequence from HRSV(A2)__F_DSCav1_mut2 (opt1)
gggagacuccugucgggcggaaguaggaggaguagaguuuaaaaacaguacucuuuuuccgguucgggacguaguugaagcaacgacaagccggauaaccgcucuugagacaggaagcuuaccauggagcugcucauccugaaggccaacgccaucaccaccauccugacggcggugaccuucugcuucgccagcggccagaacaucaccgaggaguucuaccaguccacgugcagcgccgucuccaagggguaccucggcgcccugcgcaccgggugguacaccagcgugaucaccaucgagcuguccaacaucaaggagaacaagugcaacggcaccgacgccaaggugaagcucaucaagcaggagcuggacaaguacaagaacgcggucacggaccugcagcuccugaugcagagcacccccgccaccggguccggcagcgccaucugcuccggcguggccgugugcaagguccugcaccucgagggggaggugaacaagaucaagagcgcgcugcuguccaccaacaaggccguggucagccucuccaacggcgugagcgugcugacguucaagguccuggaccucaagaacuacaucgacaagcagcugcugccgauccucaacaagcaguccugcagcauccccaacaucgagaccgugaucgaguuccagcagaagaacaaccggcugcuggagaucacccgcgaguucuccgugaacgccggggucaccacgcccgugagcaccuacaugcucaccaacuccgagcugcugagccucaucaacgacaugcccaucaccaacgaccagaagaagcugaugagcaacaacgugcagaucguccggcagcaguccuacagcaucaugugcaucaucaaggaggaggugcuggccuacgugguccagcucccgcuguacggcgugaucgacacgcccugcuggaagcugcacaccagcccccucugcaccaccaacacgaaggagggguccaacaucugccugacccgcaccgaccggggcugguacugcgacaacgccggcuccgugagcuucuucccccaggcggagaccugcaagguccaguccaaccgcguguucugcgacacgaugaacagccugacccucccguccgaggucaaccugugcaacguggacaucuucaaccccaaguacgacugcaagaucaugaccagcaagaccgacguguccagcuccgucaucacgagccugggggccaucguguccugcuacggcaagaccaagugcaccgccagcaacaagaaccgggggaucaucaagaccuucuccaacggcugcgacuacgugagcaacaagggcgucgacacgguguccguggggaacacccucuacugcgucaacaagcaggagggccagagccuguacgugaagggggagcccaucaucaacuucuacgacccccugguguucccgagcgacgaguucgacgccuccaucagccaggucaacgagaagaucaaccagucccucgccuucauccgcaagagcgacgagcugcugcacaacgugaacgcgggcaaguccaccaccaacaucaugaucaccacgaucaucaucgugaucaucgucauccuccugagccugaucgccguggggcuccugcuguacugcaaggcccgguccacccccgugacccugagcaaggaccagcucuccggcaucaacaacaucgccuucagcaacugaggacuagucccuguucccagagcccacuuuuuuuucuuuuuuugaaauaaaauagccugucuuucagaucuaaaaaaaaaaaaaaaaaaaaaaaaaaaaaaaaaaaaaaaaaaaaaaaaaaaaaaaaaaaaaaaaugcaucccccccccccccccccccccccccccccccaaaggcucuuuucagagccaccagaauu

SEQ ID NO: 2409 - RNA, 1930 nt, Artificial Sequence
  mRNA product Design a-4 comprising derived and/or modified sequence from HRSV(A2)__F_DSCav1_mut2 (opt2)
gggagacuccugucgggcggaaguaggaggaguagaguuuaaaaacaguacucuuuuuccgguucgggacguaguugaagcaacgacaagccggauaaccgcucuugagacaggaagcuuaccauggagcuccucauccucaaggccaacgccaucaccaccauccucaccgccgucaccuucugcuucgccuccggccagaacaucaccgaggaguucuaccaguccaccugcuccgccgucuccaagggcuaccucggcgcccuccgcaccggcugguacaccuccgucaucaccaucgagcucuccaacaucaaggagaacaagugcaacggcaccgacgccaaggucaagcucaucaagcaggagcucgacaaguacaagaacgccgucaccgaccuccagcuccucaugcaguccacccccgccaccggcuccggcuccgccaucugcuccggcgucgccgucugcaagguccuccaccucgagggcgaggucaacaagaucaaguccgcccuccucuccaccaacaaggccgucgucucccucuccaacggcgucuccguccucaccuucaagguccucgaccucaagaacuacaucgacaagcagcuccuccccauccucaacaagcaguccugcuccauccccaacaucgagaccgucaucgaguuccagcagaagaacaaccgccuccucgagaucacccgcgaguucuccgucaacgccggcgucaccacccccgucuccaccuacaugcucaccaacuccgagcuccucucccucaucaacgacaugcccaucaccaacgaccagaagaagcucauguccaacaacguccagaucguccgccagcaguccuacuccaucaugugcaucaucaaggaggagguccucgccuacgucguccagcucccccucuacggcgucaucgacacccccugcuggaagcuccacaccuccccccucugcaccaccaacaccaaggagggcuccaacaucugccucacccgcaccgaccgcggcugguacugcgacaacgccggcuccgucuccuucuucccccaggccgagaccugcaagguccaguccaaccgcgucuucugcgacaccaugaacucccucacccuccccuccgaggucaaccucugcaacgucgacaucuucaaccccaaguacgacugcaagaucaugaccuccaagaccgacgucuccuccuccgucaucaccucccucggcgccaucgucuccugcuacggcaagaccaagugcaccgccuccaacaagaaccgcggcaucaucaagaccuucuccaacggcugcgacuacgucuccaacaagggcgucgacaccgucuccgucggcaacacccucuacugcgucaacaagcaggagggccagucccucuacgucaagggcgagcccaucaucaacuucuacgacccccucgucuuccccuccgacgaguucgacgccuccaucucccaggucaacgagaagaucaaccagucccucgccuucauccgcaaguccgacgagcuccuccacaacgucaacgccggcaaguccaccaccaacaucaugaucaccaccaucaucaucgucaucaucgucauccuccucucccucaucgccgucggccuccuccucuacugcaaggcccgcuccacccccgucacccucuccaaggaccagcucuccggcaucaacaacaucgccuucuccaacugaggacuagucccuguucccagagcccacuuuuuuuucuuuuuuugaaauaaaauagccugucuuucagaucuaaaaaaaaaaaaaaaaaaaaaaaaaaaaaaaaaaaaaaaaaaaaaaaaaaaaaaaaaaaaaaaaugcaucccccccccccccccccccccccccccccccaaaggcucuuuucagagccaccagaauu

SEQ ID NO: 2410 - RNA, 1930 nt, Artificial Sequence
  mRNA product Design a-4 comprising derived and/or modified sequence from HRSV(A2)__F_DSCav1_mut2 (opt3)
gggagacuccugucgggcggaaguaggaggaguagaguuuaaaaacaguacucuuuuuccgguucgggacguaguugaagcaacgacaagccggauaaccgcucuugagacaggaagcuuaccauggagcugcucauccuuaaggccaacgcuauuaccacaauacugacugcagugacguucugcuuugccagcggccagaauaucaccgaagaguucuaccaauccacauguucugcggucucaaaaggguauuugggagcuuuaagaacugguugguacaccaguguuauuacaaucgaacugagcaacauuaaggagaauaaaugcaacggcaccgacgccaaggugaaacuaaucaagcaggaacucgauaaguauaaaaaugcaguaacugaccugcagcuucugaugcaguccacacccgccaccgggucuggaucggcuauauguucaggcguggcagucugcaagguguugcaccucgagggugagguuaacaaaaucaagagcgcccugcugaguacgaauaaagcuguggucucccucucuaacggggugagcguauuaacuuuuaagguucuggaucuuaagaauuacauugacaaacaauugcugccuauccuaaacaagcaguccuguucaauuccaaauaucgaaaccgugauagaguuccagcagaaaaacaauaggcuccuggaaauuacacgggaguuuagugucaacgccggagugacuaccccggugagcacauauaugcuuaccaauucugagcuguugucccucaucaacgauaugcccauuacgaacgaccaaaagaaacugaugucaaauaacguccagaucguucgccagcagagcuacaguaucaugugcauuauaaaggaagagguguuagcguauguagugcaacugccucucuacggcgucaucgauacuccauguuggaaacuucauacaucuccccugugcaccacuaauacaaaggaaggcuccaacauuuguuugacccgaacggaccgugggugguacugcgauaaugcaggaagcgugucguucuuuccucaggccgagaccuguaagguucagucuaacagaguguucugcgacacaaugaacucccuaacucugccaucagaagucaaucucugcaauguggauaucuuuaaccccaaauaugacuguaagauaaugaccaguaaaacagauguaagcuccucuguuauuacuagccugggugcuaucgugucaugcuacggcaagaccaaauguacagccaguaauaagaacagggggaucauuaagaccuucuccaauggaugcgacuaugucagcaacaaaggcguggacacugucucuguggguaauacgcuuuacuguguuaacaagcaagaggggcagucacuguaugugaaaggagagccuaucauuaacuuuuacgauccauugguauucccgagugacgaauuugaugcaagcauaucccaggucaaugagaagaucaaccagucucucgcuuucauucggaaaucggacgaacuguuacacaaugugaacgccggcaagagcacaaccaauaucaugaucacuaccauuauaaucguuauuaucgugauucugcuaucccucaucgcggucggccugcuuuuguauugcaaggcccgcucaacacccgugacccugaguaaagaucaacucucugggauaaacaauaucgcauucagcaacugaggacuagucccuguucccagagcccacuuuuuuuucuuuuuuugaaauaaaauagccugucuuucagaucuaaaaaaaaaaaaaaaaaaaaaaaaaaaaaaaaaaaaaaaaaaaaaaaaaaaaaaaaaaaaaaaaugcaucccccccccccccccccccccccccccccccaaaggcucuuuucagagccaccagaauu

SEQ ID NO: 2411 - RNA, 1930 nt, Artificial Sequence
  mRNA product Design a-4 comprising derived and/or modified sequence from HRSV(A2)__F_DSCav1_mut2 (opt4)
gggagacuccugucgggcggaaguaggaggaguagaguuuaaaaacaguacucuuuuuccgguucgggacguaguugaagcaacgacaagccggauaaccgcucuugagacaggaagcuuaccauggagcugcugauccugaaggccaacgccaucaccaccauccugaccgccgugaccuucugcuucgccagcggccagaacaucaccgaggaguucuaccagagcaccugcagcgccgugagcaagggcuaccugggcgcccugagaaccggcugguacaccagcgugaucaccaucgagcugagcaacaucaaggagaacaagugcaacggcaccgacgccaaggugaagcugaucaagcaggagcuggacaaguacaagaacgccgugaccgaccugcagcugcugaugcagagcacccccgccaccggcagcggcagcgccaucugcagcggcguggccgugugcaaggugcugcaccuggagggcgaggugaacaagaucaagagcgcccugcugagcaccaacaaggccguggugagccugagcaacggcgugagcgugcugaccuucaaggugcuggaccugaagaacuacaucgacaagcagcugcugcccauccugaacaagcagagcugcagcauccccaacaucgagaccgugaucgaguuccagcagaagaacaacagacugcuggagaucaccagagaguucagcgugaacgccggcgugaccacccccgugagcaccuacaugcugaccaacagcgagcugcugagccugaucaacgacaugcccaucaccaacgaccagaagaagcugaugagcaacaacgugcagaucgugagacagcagagcuacagcaucaugugcaucaucaaggaggaggugcuggccuacguggugcagcugccccuguacggcgugaucgacacccccugcuggaagcugcacaccagcccccugugcaccaccaacaccaaggagggcagcaacaucugccugaccagaaccgacagaggcugguacugcgacaacgccggcagcgugagcuucuucccccaggccgagaccugcaaggugcagagcaacagaguguucugcgacaccaugaacagccugacccugcccagcgaggugaaccugugcaacguggacaucuucaaccccaaguacgacugcaagaucaugaccagcaagaccgacgugagcagcagcgugaucaccagccugggcgccaucgugagcugcuacggcaagaccaagugcaccgccagcaacaagaacagaggcaucaucaagaccuucagcaacggcugcgacuacgugagcaacaagggcguggacaccgugagcgugggcaacacccuguacugcgugaacaagcaggagggccagagccuguacgugaagggcgagcccaucaucaacuucuacgacccccugguguuccccagcgacgaguucgacgccagcaucagccaggugaacgagaagaucaaccagagccuggccuucaucagaaagagcgacgagcugcugcacaacgugaacgccggcaagagcaccaccaacaucaugaucaccaccaucaucaucgugaucaucgugauccugcugagccugaucgccgugggccugcugcuguacugcaaggccagaagcacccccgugacccugagcaaggaccagcugagcggcaucaacaacaucgccuucagcaacugaggacuagucccuguucccagagcccacuuuuuuuucuuuuuuugaaauaaaauagccugucuuucagaucuaaaaaaaaaaaaaaaaaaaaaaaaaaaaaaaaaaaaaaaaaaaaaaaaaaaaaaaaaaaaaaaaugcaucccccccccccccccccccccccccccccccaaaggcucuuuucagagccaccagaauu

SEQ ID NO: 2412 - RNA, 1930 nt, Artificial Sequence
  mRNA product Design a-4 comprising derived and/or modified sequence from HRSV(A2)__F_DSCav1_mut2 (opt5)
gggagacuccugucgggcggaaguaggaggaguagaguuuaaaaacaguacucuuuuuccgguucgggacguaguugaagcaacgacaagccggauaaccgcucuugagacaggaagcuuaccauggagcugcucauccugaaggccaacgcuauuaccacaauccuuacggccgugaccuucugcuuugcgagcggccagaauauuacagaagaguucuaccaauccaccuguucugcugucagcaaaggguaucugggagcccucagaacaggcugguacaccuccguuaucacaauugaacugucuaacaucaaggagaauaaaugcaacgggaccgacgccaaggugaaacuuaucaagcaggaacuggauaaguauaaaaaugcugugacggaccuccagcugcugaugcagagcacccccgccacaggauccggcucugcuauuuguagcggggucgccgugugcaagguucuccaccuggagggagaggugaacaaaaucaaguccgcgcuucugagcaccaauaaagccgucgugucucucuccaacggcguuagcgugcugacauuuaagguccuugaucugaagaauuacauugacaaacaacuccugccuauccugaacaagcagucuuguuccauuccgaauaucgaaaccgugauugaguuccagcagaaaaacaaucggcuccuggaaaucacgcgcgaguuuagcgugaacgcuggcgucacaacccccguuucuacauauaugcuuaccaauuccgagcugcucagccugaucaacgauaugccuauuaccaacgaccaaaagaaacuuauguccaauaacgugcagaucgugagacagcagucuuacagcauuaugugcaucauuaaggaagagguccuggccuaugugguucaacucccccuguacggggugaucgauacaccuuguuggaaacugcauacgagcccccucugcaccacaaauaccaaggaaggauccaacaucugucugacacggaccgaccgcggcugguacugcgauaaugcugggucugucuccuucuuuccucaggccgagacguguaaggugcagagcaacagaguuuucugcgacacaaugaacucucuuacccugccgagcgaagugaaucucugcaaugucgauauuuuuaaccccaaauaugacuguaagaucaugaccuccaaaacagaugugucuagcuccgucauuaccagccugggagcgaucgugucuugcuacggcaagacaaaauguacggccuccaauaagaaccgggggauuaucaagaccuucagcaauggaugcgacuauguuucuaacaaaggcguggacacagucuccgugggcaauacccuuuacuguguuaacaagcaagaggggcagagccuguaugugaaaggagagccuaucauuaacuuuuacgauccccucgucuucccuuccgacgaauuugaugcuucuaucagccaggugaaugagaagauuaaccagucccuggccuucauccgcaaaucugacgaacugcuccacaaugugaacgcuggcaagagcacaaccaauauuaugaucacgaccauuaucaucguuauuaucgucauucugcuuucccugaucgccguggggcuccugcuguauugcaaggccagaagcacacccgugacccuuucuaaagaucaacucuccggaauuaacaauaucgcuuucagcaacugaggacuagucccuguucccagagcccacuuuuuuuucuuuuuuugaaauaaaauagccugucuuucagaucuaaaaaaaaaaaaaaaaaaaaaaaaaaaaaaaaaaaaaaaaaaaaaaaaaaaaaaaaaaaaaaaaugcaucccccccccccccccccccccccccccccccaaaggcucuuuucagagccaccagaauu

SEQ ID NO: 2413 - RNA, 1930 nt, Artificial Sequence
  mRNA product Design a-4 comprising derived and/or modified sequence from HRSV(A2)__F_DSCav1_mut2 (opt6)
gggagacuccugucgggcggaaguaggaggaguagaguuuaaaaacaguacucuuuuuccgguucgggacguaguugaagcaacgacaagccggauaaccgcucuugagacaggaagcuuaccauggaacuacuaauccuaaaagcaaacgcaauuacaacuauacuuaccgccguaacauuuugcuucgcaucugggcaaaacauuaccgaagaauuuuaucaaucaacaugcucagcagucuccaaaggauaccuuggagcauuaagaaccggcugguauaccuccguaauaacaauugaacuaucuaauauaaaagaaaauaaauguaauggaacugacgcaaaaguuaaacuaauaaaacaagaacucgacaaauacaaaaacgccgucacagaccuacaacuacuaaugcaaucaacccccgcaacaggaucaggauccgcaaucugcagcggcgucgcaguuugcaaaguccuacauuuagaaggagaaguaaacaaaauaaaaucugcucuccucucuacaaacaaagcaguagugucacuuucaaacggaguaucaguucuaacauucaaaguacuagaccuaaaaaauuacauagacaaacaacuacuuccaauucuaaacaaacaauccuguuccauacccaacauagaaacaguaauagaauuucaacaaaaaaauaacagacuccuagaaauuacaagagaauuuuccgucaaugcaggaguaacaaccccaguaucaaccuacauguuaacuaacucagaacucuuaucacuaauaaacgacaugccaaucacuaaugaccaaaaaaaacucaugucaaauaacguacaaauaguccgacaacaaucauacuccaucaugugcauuauaaaagaagaaguacuagcauacgucguccaauuaccacuauacggcgucauagacacaccauguuggaaacuccacacaucaccacuaugcacuacaaauacaaaagaaggcuccaacaucugccuaacaagaacagacagagguugguauugcgacaacgcaggaucaguaucauuuuucccccaagcagaaacauguaaaguacaaucaaauagagucuucugcgacaccaugaacucauuaacacuaccuucagaagucaaccuaugcaacguagacaucuucaacccuaaauaugacugcaaaaucaugaccagcaaaaccgacguuucaucuuccguaauaacaucacuaggcgcaauagucucauguuacggcaaaacaaaauguacagcaucaaauaaaaaccguggaauaauaaaaacauuuucuaaugguugugacuacguaagcaauaaaggaguagauacaguaucagucggcaacaccuuauacuguguaaacaaacaagaaggccaaaguuuauacgucaaaggagaacccaucaucaacuucuacgacccauuaguauucccaucagacgaauuugaugcaagcauuucacaagucaacgaaaaaaucaaucaaucauuagcauucauccgaaaaucagacgaauuauuacacaacguaaacgccggaaaaucaaccacuaauauaaugauaaccacaauaaucaucguaauaauaguaauacuucucucacuaaucgcagucggacuccuucuauacugcaaagcaagaucuacaccaguaacacuauccaaagaucaacuaaguggcauaaacaacauagcauuuucuaacuaaggacuagucccuguucccagagcccacuuuuuuuucuuuuuuugaaauaaaauagccugucuuucagaucuaaaaaaaaaaaaaaaaaaaaaaaaaaaaaaaaaaaaaaaaaaaaaaaaaaaaaaaaaaaaaaaaugcaucccccccccccccccccccccccccccccccaaaggcucuuuucagagccaccagaauu

SEQ ID NO: 2414 - RNA, 1930 nt, Artificial Sequence
  mRNA product Design a-4 comprising derived and/or modified sequence from HRSV(A2)__F_DSCav1_mut2 (opt11)
gggagacuccugucgggcggaaguaggaggaguagaguuuaaaaacaguacucuuuuuccgguucgggacguaguugaagcaacgacaagccggauaaccgcucuugagacaggaagcuuaccauggaacuccucauccuaaaagccaacgcgaucaccacaauccugacagccgucaccuucugcuucgccuccggccaaaacaucaccgaagaguucuaccaauccacaugcuccgccgucuccaagggcuaccugggcgcacuucguacaggcugguacaccuccguaauaaccaucgaacucuccaacaucaaagaaaacaaaugcaacggcacagacgcaaaagucaaacucaucaagcaagaacuugacaaauacaaaaaugcagucaccgaccuucaacuccucaugcaaucuacccccgccacaggcuccggcuccgcuaucugcuccggcgucgccgucugcaaaguccuccaccucgaaggugaaguaaacaaaauaaaauccgcccuccucuccaccaacaaagccgucgucucccuaucaaacggcgucuccgugcucaccuucaagguucucgaccugaaaaacuacauagacaaacagcuccuaccaauccuuaacaaacagagcugcuccauuccgaauaucgaaacgguaaucgaauuucaacagaaaaacaaccgccuccucgaaauaacgcgagaguucuccguaaacgcuggcgucaccacacccgucagcaccuacaugcuaacgaacuccgaacucuugucgcucaucaacgacaugcccauaaccaacgaccaaaagaaacuaauguccaauaacguacaaaucguacgccaacaaucuuacuccaucaugugcaucauaaaagaagaaguacuagcuuacgucguccaacucccacuguacggagucaucgacacccccugcuggaaacuccacaccucuccccucugcaccaccaacaccaaagagggcuccaacauuugccugacacgcaccgaccgcggcugguacugcgacaacgcaggcuccgucucguucuucccccaagccgaaaccugcaaaguccaauccaaccgcgucuucugcgacaccaugaacucccucacccuccccuccgaagucaaucuaugcaacguagacaucuucaacccgaaauaugacugcaaaauuaugacaucuaaaaccgacguguccuccucagucaucacuucccuaggagccaucguuuccuguuacggcaagaccaaaugcaccgccagcaacaaaaaccgaggcaucaucaaaaccuucuccaacggaugugacuaugucuccaacaagggcgucgacaccgucagcgucggcaacacccucuacugcgucaacaaacaagaaggccaaucccucuacgucaaaggagagcccauaaucaacuucuacgacccccucgucuucccauccgacgaguucgacgccucaaucucccaagucaacgagaaaaucaaccaauccuuagccuucauccguaaguccgacgaacuccuucacaacgucaacgccgguaaaucuaccaccaacaucaugauaacaacaauaauuaucgucaucaucgucauccuccuuucccucaucgcggucgggcuauugcucuacugcaaagcccgguccaccccaguaacccucucuaaagaccaacucagcggaaucaauaacauagccuucagcaauuaaggacuagucccuguucccagagcccacuuuuuuuucuuuuuuugaaauaaaauagccugucuuucagaucuaaaaaaaaaaaaaaaaaaaaaaaaaaaaaaaaaaaaaaaaaaaaaaaaaaaaaaaaaaaaaaaaugcaucccccccccccccccccccccccccccccccaaaggcucuuuucagagccaccagaauu

SEQ ID NO: 2415 - RNA, 1876 nt, Artificial Sequence
  mRNA product Design a-5 comprising derived and/or modified sequence from HRSV(A2)__F_DSCav1_mut2 (opt1)
gggagacuuucccauucuguagcagaauuugguguugccuguggucuuggucccgcggagaagcuuaccauggagcugcucauccugaaggccaacgccaucaccaccauccugacggcggugaccuucugcuucgccagcggccagaacaucaccgaggaguucuaccaguccacgugcagcgccgucuccaagggguaccucggcgcccugcggaccggcugguacaccuccgugaucaccaucgagcugagcaacaucaaggagaacaagugcaacgggaccgacgccaaggugaagcucaucaagcaggagcuggacaaguacaagaacgcggucacggaccugcagcuccugaugcaguccaccccggcaaccggcuccggcuccgccaucugcagcggcgucgccgugugcaaggugcugcaccucgagggggaggucaacaagaucaagagcgcccugcuguccaccaacaaggccguggugagccucuccaacggcgucagcgugcugaccuucaaggugcuggaccucaagaacuacaucgacaagcagcugcugcccauccugaacaagcagagcugcuccauccccaacaucgagacggugaucgaguuccagcagaagaacaaccggcuccuggagaucacccgcgaguucagcgugaacgccggggucaccacccccguguccacguacaugcugaccaacagcgagcuccugucccugaucaacgacaugccgaucaccaacgaccagaagaagcucaugagcaacaacgugcagaucguccggcagcaguccuacagcaucaugugcaucaucaaggaggaggugcuggcguacgugguccagcugccccucuacggcgugaucgacacccccugcuggaagcugcacacgagcccccugugcaccaccaacaccaaggagggguccaacaucugccucacgcgcaccgaccggggcugguacugcgacaacgccggcagcgucuccuucuucccgcaggccgagaccugcaaggugcagagcaaccgcguguucugcgacaccaugaacucccugacgcugcccagcgagguaaaccucugcaacgucgacaucuucaaccccaaguacgacugcaagaucaugaccuccaagaccgacgugagcuccagcgugaucaccucccugggggccaucgucagcugcuacggcaagacgaagugcaccgccagcaacaagaaccgggggaucaucaagaccuucuccaacggcugcgacuacgugagcaacaagggcguggacaccguguccgucgggaacacccuguacugcgugaacaagcaggagggccagagccucuacgugaagggggagcccaucaucaacuucuacgacccgcuggucuuccccuccgacgaguucgacgcgagcaucucccaggugaacgagaagaucaaccagagccuggccuucauccgcaaguccgacgagcugcuccacaacgugaacgccggcaagagcacgaccaacaucaugaucaccaccaucaucaucgucaucaucgugauccugcugucccucaucgccguggggcugcugcucuacugcaaggcccggagcacgcccgucacccuguccaaggaccagcugagcggcaucaacaacaucgcguucuccaacugaggacuagucccuguucccagagcccacuuuuuuuucuuuuuuugaaauaaaauagccugucuuucagaucuaaaaaaaaaaaaaaaaaaaaaaaaaaaaaaaaaaaaaaaaaaaaaaaaaaaaaaaaaaaaaaaaugcaucccccccccccccccccccccccccccccccaaaggcucuuuucagagccaccagaauu

SEQ ID NO: 2416 - RNA, 1876 nt, Artificial Sequence
  mRNA product Design a-5 comprising derived and/or modified sequence from HRSV(A2)__F_DSCav1_mut2 (opt1)
gggagacuuucccauucuguagcagaauuugguguugccuguggucuuggucccgcggagaagcuuaccauggagcugcucauccugaaggccaacgccaucaccaccauccugacggcggugaccuucugcuucgccagcggccagaacaucaccgaggaguucuaccaguccacgugcagcgccgucuccaagggguaccucggcgcccugcgcaccgggugguacaccagcgugaucaccaucgagcuguccaacaucaaggagaacaagugcaacggcaccgacgccaaggugaagcucaucaagcaggagcuggacaaguacaagaacgcggucacggaccugcagcuccugaugcagagcacccccgccaccggguccggcagcgccaucugcuccggcguggccgugugcaagguccugcaccucgagggggaggugaacaagaucaagagcgcgcugcuguccaccaacaaggccguggucagccucuccaacggcgugagcgugcugacguucaagguccuggaccucaagaacuacaucgacaagcagcugcugccgauccucaacaagcaguccugcagcauccccaacaucgagaccgugaucgaguuccagcagaagaacaaccggcugcuggagaucacccgcgaguucuccgugaacgccggggucaccacgcccgugagcaccuacaugcucaccaacuccgagcugcugagccucaucaacgacaugcccaucaccaacgaccagaagaagcugaugagcaacaacgugcagaucguccggcagcaguccuacagcaucaugugcaucaucaaggaggaggugcuggccuacgugguccagcucccgcuguacggcgugaucgacacgcccugcuggaagcugcacaccagcccccucugcaccaccaacacgaaggagggguccaacaucugccugacccgcaccgaccggggcugguacugcgacaacgccggcuccgugagcuucuucccccaggcggagaccugcaagguccaguccaaccgcguguucugcgacacgaugaacagccugacccucccguccgaggucaaccugugcaacguggacaucuucaaccccaaguacgacugcaagaucaugaccagcaagaccgacguguccagcuccgucaucacgagccugggggccaucguguccugcuacggcaagaccaagugcaccgccagcaacaagaaccgggggaucaucaagaccuucuccaacggcugcgacuacgugagcaacaagggcgucgacacgguguccguggggaacacccucuacugcgucaacaagcaggagggccagagccuguacgugaagggggagcccaucaucaacuucuacgacccccugguguucccgagcgacgaguucgacgccuccaucagccaggucaacgagaagaucaaccagucccucgccuucauccgcaagagcgacgagcugcugcacaacgugaacgcgggcaaguccaccaccaacaucaugaucaccacgaucaucaucgugaucaucgucauccuccugagccugaucgccguggggcuccugcuguacugcaaggcccgguccacccccgugacccugagcaaggaccagcucuccggcaucaacaacaucgccuucagcaacugaggacuagucccuguucccagagcccacuuuuuuuucuuuuuuugaaauaaaauagccugucuuucagaucuaaaaaaaaaaaaaaaaaaaaaaaaaaaaaaaaaaaaaaaaaaaaaaaaaaaaaaaaaaaaaaaaugcaucccccccccccccccccccccccccccccccaaaggcucuuuucagagccaccagaauu

SEQ ID NO: 2417 - RNA, 1876 nt, Artificial Sequence
  mRNA product Design a-5 comprising derived and/or modified sequence from HRSV(A2)__F_DSCav1_mut2 (opt2)
gggagacuuucccauucuguagcagaauuugguguugccuguggucuuggucccgcggagaagcuuaccauggagcuccucauccucaaggccaacgccaucaccaccauccucaccgccgucaccuucugcuucgccuccggccagaacaucaccgaggaguucuaccaguccaccugcuccgccgucuccaagggcuaccucggcgcccuccgcaccggcugguacaccuccgucaucaccaucgagcucuccaacaucaaggagaacaagugcaacggcaccgacgccaaggucaagcucaucaagcaggagcucgacaaguacaagaacgccgucaccgaccuccagcuccucaugcaguccacccccgccaccggcuccggcuccgccaucugcuccggcgucgccgucugcaagguccuccaccucgagggcgaggucaacaagaucaaguccgcccuccucuccaccaacaaggccgucgucucccucuccaacggcgucuccguccucaccuucaagguccucgaccucaagaacuacaucgacaagcagcuccuccccauccucaacaagcaguccugcuccauccccaacaucgagaccgucaucgaguuccagcagaagaacaaccgccuccucgagaucacccgcgaguucuccgucaacgccggcgucaccacccccgucuccaccuacaugcucaccaacuccgagcuccucucccucaucaacgacaugcccaucaccaacgaccagaagaagcucauguccaacaacguccagaucguccgccagcaguccuacuccaucaugugcaucaucaaggaggagguccucgccuacgucguccagcucccccucuacggcgucaucgacacccccugcuggaagcuccacaccuccccccucugcaccaccaacaccaaggagggcuccaacaucugccucacccgcaccgaccgcggcugguacugcgacaacgccggcuccgucuccuucuucccccaggccgagaccugcaagguccaguccaaccgcgucuucugcgacaccaugaacucccucacccuccccuccgaggucaaccucugcaacgucgacaucuucaaccccaaguacgacugcaagaucaugaccuccaagaccgacgucuccuccuccgucaucaccucccucggcgccaucgucuccugcuacggcaagaccaagugcaccgccuccaacaagaaccgcggcaucaucaagaccuucuccaacggcugcgacuacgucuccaacaagggcgucgacaccgucuccgucggcaacacccucuacugcgucaacaagcaggagggccagucccucuacgucaagggcgagcccaucaucaacuucuacgacccccucgucuuccccuccgacgaguucgacgccuccaucucccaggucaacgagaagaucaaccagucccucgccuucauccgcaaguccgacgagcuccuccacaacgucaacgccggcaaguccaccaccaacaucaugaucaccaccaucaucaucgucaucaucgucauccuccucucccucaucgccgucggccuccuccucuacugcaaggcccgcuccacccccgucacccucuccaaggaccagcucuccggcaucaacaacaucgccuucuccaacugaggacuagucccuguucccagagcccacuuuuuuuucuuuuuuugaaauaaaauagccugucuuucagaucuaaaaaaaaaaaaaaaaaaaaaaaaaaaaaaaaaaaaaaaaaaaaaaaaaaaaaaaaaaaaaaaaugcaucccccccccccccccccccccccccccccccaaaggcucuuuucagagccaccagaauu

SEQ ID NO: 2418 - RNA, 1876 nt, Artificial Sequence
  mRNA product Design a-5 comprising derived and/or modified sequence from HRSV(A2)__F_DSCav1_mut2 (opt3)
gggagacuuucccauucuguagcagaauuugguguugccuguggucuuggucccgcggagaagcuuaccauggagcugcucauccuuaaggccaacgcuauuaccacaauacugacugcagugacguucugcuuugccagcggccagaauaucaccgaagaguucuaccaauccacauguucugcggucucaaaaggguauuugggagcuuuaagaacugguugguacaccaguguuauuacaaucgaacugagcaacauuaaggagaauaaaugcaacggcaccgacgccaaggugaaacuaaucaagcaggaacucgauaaguauaaaaaugcaguaacugaccugcagcuucugaugcaguccacacccgccaccgggucuggaucggcuauauguucaggcguggcagucugcaagguguugcaccucgagggugagguuaacaaaaucaagagcgcccugcugaguacgaauaaagcuguggucucccucucuaacggggugagcguauuaacuuuuaagguucuggaucuuaagaauuacauugacaaacaauugcugccuauccuaaacaagcaguccuguucaauuccaaauaucgaaaccgugauagaguuccagcagaaaaacaauaggcuccuggaaauuacacgggaguuuagugucaacgccggagugacuaccccggugagcacauauaugcuuaccaauucugagcuguugucccucaucaacgauaugcccauuacgaacgaccaaaagaaacugaugucaaauaacguccagaucguucgccagcagagcuacaguaucaugugcauuauaaaggaagagguguuagcguauguagugcaacugccucucuacggcgucaucgauacuccauguuggaaacuucauacaucuccccugugcaccacuaauacaaaggaaggcuccaacauuuguuugacccgaacggaccgugggugguacugcgauaaugcaggaagcgugucguucuuuccucaggccgagaccuguaagguucagucuaacagaguguucugcgacacaaugaacucccuaacucugccaucagaagucaaucucugcaauguggauaucuuuaaccccaaauaugacuguaagauaaugaccaguaaaacagauguaagcuccucuguuauuacuagccugggugcuaucgugucaugcuacggcaagaccaaauguacagccaguaauaagaacagggggaucauuaagaccuucuccaauggaugcgacuaugucagcaacaaaggcguggacacugucucuguggguaauacgcuuuacuguguuaacaagcaagaggggcagucacuguaugugaaaggagagccuaucauuaacuuuuacgauccauugguauucccgagugacgaauuugaugcaagcauaucccaggucaaugagaagaucaaccagucucucgcuuucauucggaaaucggacgaacuguuacacaaugugaacgccggcaagagcacaaccaauaucaugaucacuaccauuauaaucguuauuaucgugauucugcuaucccucaucgcggucggccugcuuuuguauugcaaggcccgcucaacacccgugacccugaguaaagaucaacucucugggauaaacaauaucgcauucagcaacugaggacuagucccuguucccagagcccacuuuuuuuucuuuuuuugaaauaaaauagccugucuuucagaucuaaaaaaaaaaaaaaaaaaaaaaaaaaaaaaaaaaaaaaaaaaaaaaaaaaaaaaaaaaaaaaaaugcaucccccccccccccccccccccccccccccccaaaggcucuuuucagagccaccagaauu

SEQ ID NO: 2419 - RNA, 1876 nt, Artificial Sequence
  mRNA product Design a-5 comprising derived and/or modified sequence from HRSV(A2)__F_DSCav1_mut2 (opt4)
gggagacuuucccauucuguagcagaauuugguguugccuguggucuuggucccgcggagaagcuuaccauggagcugcugauccugaaggccaacgccaucaccaccauccugaccgccgugaccuucugcuucgccagcggccagaacaucaccgaggaguucuaccagagcaccugcagcgccgugagcaagggcuaccugggcgcccugagaaccggcugguacaccagcgugaucaccaucgagcugagcaacaucaaggagaacaagugcaacggcaccgacgccaaggugaagcugaucaagcaggagcuggacaaguacaagaacgccgugaccgaccugcagcugcugaugcagagcacccccgccaccggcagcggcagcgccaucugcagcggcguggccgugugcaaggugcugcaccuggagggcgaggugaacaagaucaagagcgcccugcugagcaccaacaaggccguggugagccugagcaacggcgugagcgugcugaccuucaaggugcuggaccugaagaacuacaucgacaagcagcugcugcccauccugaacaagcagagcugcagcauccccaacaucgagaccgugaucgaguuccagcagaagaacaacagacugcuggagaucaccagagaguucagcgugaacgccggcgugaccacccccgugagcaccuacaugcugaccaacagcgagcugcugagccugaucaacgacaugcccaucaccaacgaccagaagaagcugaugagcaacaacgugcagaucgugagacagcagagcuacagcaucaugugcaucaucaaggaggaggugcuggccuacguggugcagcugccccuguacggcgugaucgacacccccugcuggaagcugcacaccagcccccugugcaccaccaacaccaaggagggcagcaacaucugccugaccagaaccgacagaggcugguacugcgacaacgccggcagcgugagcuucuucccccaggccgagaccugcaaggugcagagcaacagaguguucugcgacaccaugaacagccugacccugcccagcgaggugaaccugugcaacguggacaucuucaaccccaaguacgacugcaagaucaugaccagcaagaccgacgugagcagcagcgugaucaccagccugggcgccaucgugagcugcuacggcaagaccaagugcaccgccagcaacaagaacagaggcaucaucaagaccuucagcaacggcugcgacuacgugagcaacaagggcguggacaccgugagcgugggcaacacccuguacugcgugaacaagcaggagggccagagccuguacgugaagggcgagcccaucaucaacuucuacgacccccugguguuccccagcgacgaguucgacgccagcaucagccaggugaacgagaagaucaaccagagccuggccuucaucagaaagagcgacgagcugcugcacaacgugaacgccggcaagagcaccaccaacaucaugaucaccaccaucaucaucgugaucaucgugauccugcugagccugaucgccgugggccugcugcuguacugcaaggccagaagcacccccgugacccugagcaaggaccagcugagcggcaucaacaacaucgccuucagcaacugaggacuagucccuguucccagagcccacuuuuuuuucuuuuuuugaaauaaaauagccugucuuucagaucuaaaaaaaaaaaaaaaaaaaaaaaaaaaaaaaaaaaaaaaaaaaaaaaaaaaaaaaaaaaaaaaaugcaucccccccccccccccccccccccccccccccaaaggcucuuuucagagccaccagaauu

SEQ ID NO: 2420 - RNA, 1876 nt, Artificial Sequence
  mRNA product Design a-5 comprising derived and/or modified sequence from HRSV(A2)__F_DSCav1_mut2 (opt5)
gggagacuuucccauucuguagcagaauuugguguugccuguggucuuggucccgcggagaagcuuaccauggagcugcucauccugaaggccaacgcuauuaccacaauccuuacggccgugaccuucugcuuugcgagcggccagaauauuacagaagaguucuaccaauccaccuguucugcugucagcaaaggguaucugggagcccucagaacaggcugguacaccuccguuaucacaauugaacugucuaacaucaaggagaauaaaugcaacgggaccgacgccaaggugaaacuuaucaagcaggaacuggauaaguauaaaaaugcugugacggaccuccagcugcugaugcagagcacccccgccacaggauccggcucugcuauuuguagcggggucgccgugugcaagguucuccaccuggagggagaggugaacaaaaucaaguccgcgcuucugagcaccaauaaagccgucgugucucucuccaacggcguuagcgugcugacauuuaagguccuugaucugaagaauuacauugacaaacaacuccugccuauccugaacaagcagucuuguuccauuccgaauaucgaaaccgugauugaguuccagcagaaaaacaaucggcuccuggaaaucacgcgcgaguuuagcgugaacgcuggcgucacaacccccguuucuacauauaugcuuaccaauuccgagcugcucagccugaucaacgauaugccuauuaccaacgaccaaaagaaacuuauguccaauaacgugcagaucgugagacagcagucuuacagcauuaugugcaucauuaaggaagagguccuggccuaugugguucaacucccccuguacggggugaucgauacaccuuguuggaaacugcauacgagcccccucugcaccacaaauaccaaggaaggauccaacaucugucugacacggaccgaccgcggcugguacugcgauaaugcugggucugucuccuucuuuccucaggccgagacguguaaggugcagagcaacagaguuuucugcgacacaaugaacucucuuacccugccgagcgaagugaaucucugcaaugucgauauuuuuaaccccaaauaugacuguaagaucaugaccuccaaaacagaugugucuagcuccgucauuaccagccugggagcgaucgugucuugcuacggcaagacaaaauguacggccuccaauaagaaccgggggauuaucaagaccuucagcaauggaugcgacuauguuucuaacaaaggcguggacacagucuccgugggcaauacccuuuacuguguuaacaagcaagaggggcagagccuguaugugaaaggagagccuaucauuaacuuuuacgauccccucgucuucccuuccgacgaauuugaugcuucuaucagccaggugaaugagaagauuaaccagucccuggccuucauccgcaaaucugacgaacugcuccacaaugugaacgcuggcaagagcacaaccaauauuaugaucacgaccauuaucaucguuauuaucgucauucugcuuucccugaucgccguggggcuccugcuguauugcaaggccagaagcacacccgugacccuuucuaaagaucaacucuccggaauuaacaauaucgcuuucagcaacugaggacuagucccuguucccagagcccacuuuuuuuucuuuuuuugaaauaaaauagccugucuuucagaucuaaaaaaaaaaaaaaaaaaaaaaaaaaaaaaaaaaaaaaaaaaaaaaaaaaaaaaaaaaaaaaaaugcaucccccccccccccccccccccccccccccccaaaggcucuuuucagagccaccagaauu

SEQ ID NO: 2421 - RNA, 1876 nt, Artificial Sequence
  mRNA product Design a-5 comprising derived and/or modified sequence from HRSV(A2)__F_DSCav1_mut2 (opt6)
gggagacuuucccauucuguagcagaauuugguguugccuguggucuuggucccgcggagaagcuuaccauggaacuacuaauccuaaaagcaaacgcaauuacaacuauacuuaccgccguaacauuuugcuucgcaucugggcaaaacauuaccgaagaauuuuaucaaucaacaugcucagcagucuccaaaggauaccuuggagcauuaagaaccggcugguauaccuccguaauaacaauugaacuaucuaauauaaaagaaaauaaauguaauggaacugacgcaaaaguuaaacuaauaaaacaagaacucgacaaauacaaaaacgccgucacagaccuacaacuacuaaugcaaucaacccccgcaacaggaucaggauccgcaaucugcagcggcgucgcaguuugcaaaguccuacauuuagaaggagaaguaaacaaaauaaaaucugcucuccucucuacaaacaaagcaguagugucacuuucaaacggaguaucaguucuaacauucaaaguacuagaccuaaaaaauuacauagacaaacaacuacuuccaauucuaaacaaacaauccuguuccauacccaacauagaaacaguaauagaauuucaacaaaaaaauaacagacuccuagaaauuacaagagaauuuuccgucaaugcaggaguaacaaccccaguaucaaccuacauguuaacuaacucagaacucuuaucacuaauaaacgacaugccaaucacuaaugaccaaaaaaaacucaugucaaauaacguacaaauaguccgacaacaaucauacuccaucaugugcauuauaaaagaagaaguacuagcauacgucguccaauuaccacuauacggcgucauagacacaccauguuggaaacuccacacaucaccacuaugcacuacaaauacaaaagaaggcuccaacaucugccuaacaagaacagacagagguugguauugcgacaacgcaggaucaguaucauuuuucccccaagcagaaacauguaaaguacaaucaaauagagucuucugcgacaccaugaacucauuaacacuaccuucagaagucaaccuaugcaacguagacaucuucaacccuaaauaugacugcaaaaucaugaccagcaaaaccgacguuucaucuuccguaauaacaucacuaggcgcaauagucucauguuacggcaaaacaaaauguacagcaucaaauaaaaaccguggaauaauaaaaacauuuucuaaugguugugacuacguaagcaauaaaggaguagauacaguaucagucggcaacaccuuauacuguguaaacaaacaagaaggccaaaguuuauacgucaaaggagaacccaucaucaacuucuacgacccauuaguauucccaucagacgaauuugaugcaagcauuucacaagucaacgaaaaaaucaaucaaucauuagcauucauccgaaaaucagacgaauuauuacacaacguaaacgccggaaaaucaaccacuaauauaaugauaaccacaauaaucaucguaauaauaguaauacuucucucacuaaucgcagucggacuccuucuauacugcaaagcaagaucuacaccaguaacacuauccaaagaucaacuaaguggcauaaacaacauagcauuuucuaacuaaggacuagucccuguucccagagcccacuuuuuuuucuuuuuuugaaauaaaauagccugucuuucagaucuaaaaaaaaaaaaaaaaaaaaaaaaaaaaaaaaaaaaaaaaaaaaaaaaaaaaaaaaaaaaaaaaugcaucccccccccccccccccccccccccccccccaaaggcucuuuucagagccaccagaauu

SEQ ID NO: 2422 - RNA, 1876 nt, Artificial Sequence
  mRNA product Design a-5 comprising derived and/or modified sequence from HRSV(A2)__F_DSCav1_mut2 (opt11)
gggagacuuucccauucuguagcagaauuugguguugccuguggucuuggucccgcggagaagcuuaccauggaacuccucauccuaaaagccaacgcgaucaccacaauccugacagccgucaccuucugcuucgccuccggccaaaacaucaccgaagaguucuaccaauccacaugcuccgccgucuccaagggcuaccugggcgcacuucguacaggcugguacaccuccguaauaaccaucgaacucuccaacaucaaagaaaacaaaugcaacggcacagacgcaaaagucaaacucaucaagcaagaacuugacaaauacaaaaaugcagucaccgaccuucaacuccucaugcaaucuacccccgccacaggcuccggcuccgcuaucugcuccggcgucgccgucugcaaaguccuccaccucgaaggugaaguaaacaaaauaaaauccgcccuccucuccaccaacaaagccgucgucucccuaucaaacggcgucuccgugcucaccuucaagguucucgaccugaaaaacuacauagacaaacagcuccuaccaauccuuaacaaacagagcugcuccauuccgaauaucgaaacgguaaucgaauuucaacagaaaaacaaccgccuccucgaaauaacgcgagaguucuccguaaacgcuggcgucaccacacccgucagcaccuacaugcuaacgaacuccgaacucuugucgcucaucaacgacaugcccauaaccaacgaccaaaagaaacuaauguccaauaacguacaaaucguacgccaacaaucuuacuccaucaugugcaucauaaaagaagaaguacuagcuuacgucguccaacucccacuguacggagucaucgacacccccugcuggaaacuccacaccucuccccucugcaccaccaacaccaaagagggcuccaacauuugccugacacgcaccgaccgcggcugguacugcgacaacgcaggcuccgucucguucuucccccaagccgaaaccugcaaaguccaauccaaccgcgucuucugcgacaccaugaacucccucacccuccccuccgaagucaaucuaugcaacguagacaucuucaacccgaaauaugacugcaaaauuaugacaucuaaaaccgacguguccuccucagucaucacuucccuaggagccaucguuuccuguuacggcaagaccaaaugcaccgccagcaacaaaaaccgaggcaucaucaaaaccuucuccaacggaugugacuaugucuccaacaagggcgucgacaccgucagcgucggcaacacccucuacugcgucaacaaacaagaaggccaaucccucuacgucaaaggagagcccauaaucaacuucuacgacccccucgucuucccauccgacgaguucgacgccucaaucucccaagucaacgagaaaaucaaccaauccuuagccuucauccguaaguccgacgaacuccuucacaacgucaacgccgguaaaucuaccaccaacaucaugauaacaacaauaauuaucgucaucaucgucauccuccuuucccucaucgcggucgggcuauugcucuacugcaaagcccgguccaccccaguaacccucucuaaagaccaacucagcggaaucaauaacauagccuucagcaauuaaggacuagucccuguucccagagcccacuuuuuuuucuuuuuuugaaauaaaauagccugucuuucagaucuaaaaaaaaaaaaaaaaaaaaaaaaaaaaaaaaaaaaaaaaaaaaaaaaaaaaaaaaaaaaaaaaugcaucccccccccccccccccccccccccccccccaaaggcucuuuucagagccaccagaauu

SEQ ID NO: 2423 - RNA, 2057 nt, Artificial Sequence
  mRNA product Design b-1 comprising derived and/or modified sequence from HRSV(A2)__F_DSCav1_mut2 (opt1)
gggagacggagacggccugcaggaccugcucucucagcccucagccgaggccuacgccgagccgagugcgcagccgacgaccgggaggagccgcagccuucaacucugagguacugugauccgcgcugcccgccgggccgccccaguccgcugcugcggcaccuccuucccucgcgcccucuucgcucgccagcgccuucccugugagccugcgucaccgcggccgccaagcuuaccauggagcugcucauccugaaggccaacgccaucaccaccauccugacggcggugaccuucugcuucgccagcggccagaacaucaccgaggaguucuaccaguccacgugcagcgccgucuccaagggguaccucggcgcccugcggaccggcugguacaccuccgugaucaccaucgagcugagcaacaucaaggagaacaagugcaacgggaccgacgccaaggugaagcucaucaagcaggagcuggacaaguacaagaacgcggucacggaccugcagcuccugaugcaguccaccccggcaaccggcuccggcuccgccaucugcagcggcgucgccgugugcaaggugcugcaccucgagggggaggucaacaagaucaagagcgcccugcuguccaccaacaaggccguggugagccucuccaacggcgucagcgugcugaccuucaaggugcuggaccucaagaacuacaucgacaagcagcugcugcccauccugaacaagcagagcugcuccauccccaacaucgagacggugaucgaguuccagcagaagaacaaccggcuccuggagaucacccgcgaguucagcgugaacgccggggucaccacccccguguccacguacaugcugaccaacagcgagcuccugucccugaucaacgacaugccgaucaccaacgaccagaagaagcucaugagcaacaacgugcagaucguccggcagcaguccuacagcaucaugugcaucaucaaggaggaggugcuggcguacgugguccagcugccccucuacggcgugaucgacacccccugcuggaagcugcacacgagcccccugugcaccaccaacaccaaggagggguccaacaucugccucacgcgcaccgaccggggcugguacugcgacaacgccggcagcgucuccuucuucccgcaggccgagaccugcaaggugcagagcaaccgcguguucugcgacaccaugaacucccugacgcugcccagcgagguaaaccucugcaacgucgacaucuucaaccccaaguacgacugcaagaucaugaccuccaagaccgacgugagcuccagcgugaucaccucccugggggccaucgucagcugcuacggcaagacgaagugcaccgccagcaacaagaaccgggggaucaucaagaccuucuccaacggcugcgacuacgugagcaacaagggcguggacaccguguccgucgggaacacccuguacugcgugaacaagcaggagggccagagccucuacgugaagggggagcccaucaucaacuucuacgacccgcuggucuuccccuccgacgaguucgacgcgagcaucucccaggugaacgagaagaucaaccagagccuggccuucauccgcaaguccgacgagcugcuccacaacgugaacgccggcaagagcacgaccaacaucaugaucaccaccaucaucaucgucaucaucgugauccugcugucccucaucgccguggggcugcugcucuacugcaaggcccggagcacgcccgucacccuguccaaggaccagcugagcggcaucaacaacaucgcguucuccaacugaggacuaguguccaccugucccuccugggcugcuggauugucucguuuuccugccaaauaaacaggaucagcgcuuuacagaucuaaaaaaaaaaaaaaaaaaaaaaaaaaaaaaaaaaaaaaaaaaaaaaaaaaaaaaaaaaaaaaaaugcaucccccccccccccccccccccccccccccccaaaggcucuuuucagagccaccagaauu

SEQ ID NO: 2424 - RNA, 2057 nt, Artificial Sequence
  mRNA product Design b-1 comprising derived and/or modified sequence from HRSV(A2)__F_DSCav1_mut2 (opt1)
gggagacggagacggccugcaggaccugcucucucagcccucagccgaggccuacgccgagccgagugcgcagccgacgaccgggaggagccgcagccuucaacucugagguacugugauccgcgcugcccgccgggccgccccaguccgcugcugcggcaccuccuucccucgcgcccucuucgcucgccagcgccuucccugugagccugcgucaccgcggccgccaagcuuaccauggagcugcucauccugaaggccaacgccaucaccaccauccugacggcggugaccuucugcuucgccagcggccagaacaucaccgaggaguucuaccaguccacgugcagcgccgucuccaagggguaccucggcgcccugcgcaccgggugguacaccagcgugaucaccaucgagcuguccaacaucaaggagaacaagugcaacggcaccgacgccaaggugaagcucaucaagcaggagcuggacaaguacaagaacgcggucacggaccugcagcuccugaugcagagcacccccgccaccggguccggcagcgccaucugcuccggcguggccgugugcaagguccugcaccucgagggggaggugaacaagaucaagagcgcgcugcuguccaccaacaaggccguggucagccucuccaacggcgugagcgugcugacguucaagguccuggaccucaagaacuacaucgacaagcagcugcugccgauccucaacaagcaguccugcagcauccccaacaucgagaccgugaucgaguuccagcagaagaacaaccggcugcuggagaucacccgcgaguucuccgugaacgccggggucaccacgcccgugagcaccuacaugcucaccaacuccgagcugcugagccucaucaacgacaugcccaucaccaacgaccagaagaagcugaugagcaacaacgugcagaucguccggcagcaguccuacagcaucaugugcaucaucaaggaggaggugcuggccuacgugguccagcucccgcuguacggcgugaucgacacgcccugcuggaagcugcacaccagcccccucugcaccaccaacacgaaggagggguccaacaucugccugacccgcaccgaccggggcugguacugcgacaacgccggcuccgugagcuucuucccccaggcggagaccugcaagguccaguccaaccgcguguucugcgacacgaugaacagccugacccucccguccgaggucaaccugugcaacguggacaucuucaaccccaaguacgacugcaagaucaugaccagcaagaccgacguguccagcuccgucaucacgagccugggggccaucguguccugcuacggcaagaccaagugcaccgccagcaacaagaaccgggggaucaucaagaccuucuccaacggcugcgacuacgugagcaacaagggcgucgacacgguguccguggggaacacccucuacugcgucaacaagcaggagggccagagccuguacgugaagggggagcccaucaucaacuucuacgacccccugguguucccgagcgacgaguucgacgccuccaucagccaggucaacgagaagaucaaccagucccucgccuucauccgcaagagcgacgagcugcugcacaacgugaacgcgggcaaguccaccaccaacaucaugaucaccacgaucaucaucgugaucaucgucauccuccugagccugaucgccguggggcuccugcuguacugcaaggcccgguccacccccgugacccugagcaaggaccagcucuccggcaucaacaacaucgccuucagcaacugaggacuaguguccaccugucccuccugggcugcuggauugucucguuuuccugccaaauaaacaggaucagcgcuuuacagaucuaaaaaaaaaaaaaaaaaaaaaaaaaaaaaaaaaaaaaaaaaaaaaaaaaaaaaaaaaaaaaaaaugcaucccccccccccccccccccccccccccccccaaaggcucuuuucagagccaccagaauu

SEQ ID NO: 2425 - RNA, 2057 nt, Artificial Sequence
  mRNA product Design b-1 comprising derived and/or modified sequence from HRSV(A2)__F_DSCav1_mut2 (opt2)
gggagacggagacggccugcaggaccugcucucucagcccucagccgaggccuacgccgagccgagugcgcagccgacgaccgggaggagccgcagccuucaacucugagguacugugauccgcgcugcccgccgggccgccccaguccgcugcugcggcaccuccuucccucgcgcccucuucgcucgccagcgccuucccugugagccugcgucaccgcggccgccaagcuuaccauggagcuccucauccucaaggccaacgccaucaccaccauccucaccgccgucaccuucugcuucgccuccggccagaacaucaccgaggaguucuaccaguccaccugcuccgccgucuccaagggcuaccucggcgcccuccgcaccggcugguacaccuccgucaucaccaucgagcucuccaacaucaaggagaacaagugcaacggcaccgacgccaaggucaagcucaucaagcaggagcucgacaaguacaagaacgccgucaccgaccuccagcuccucaugcaguccacccccgccaccggcuccggcuccgccaucugcuccggcgucgccgucugcaagguccuccaccucgagggcgaggucaacaagaucaaguccgcccuccucuccaccaacaaggccgucgucucccucuccaacggcgucuccguccucaccuucaagguccucgaccucaagaacuacaucgacaagcagcuccuccccauccucaacaagcaguccugcuccauccccaacaucgagaccgucaucgaguuccagcagaagaacaaccgccuccucgagaucacccgcgaguucuccgucaacgccggcgucaccacccccgucuccaccuacaugcucaccaacuccgagcuccucucccucaucaacgacaugcccaucaccaacgaccagaagaagcucauguccaacaacguccagaucguccgccagcaguccuacuccaucaugugcaucaucaaggaggagguccucgccuacgucguccagcucccccucuacggcgucaucgacacccccugcuggaagcuccacaccuccccccucugcaccaccaacaccaaggagggcuccaacaucugccucacccgcaccgaccgcggcugguacugcgacaacgccggcuccgucuccuucuucccccaggccgagaccugcaagguccaguccaaccgcgucuucugcgacaccaugaacucccucacccuccccuccgaggucaaccucugcaacgucgacaucuucaaccccaaguacgacugcaagaucaugaccuccaagaccgacgucuccuccuccgucaucaccucccucggcgccaucgucuccugcuacggcaagaccaagugcaccgccuccaacaagaaccgcggcaucaucaagaccuucuccaacggcugcgacuacgucuccaacaagggcgucgacaccgucuccgucggcaacacccucuacugcgucaacaagcaggagggccagucccucuacgucaagggcgagcccaucaucaacuucuacgacccccucgucuuccccuccgacgaguucgacgccuccaucucccaggucaacgagaagaucaaccagucccucgccuucauccgcaaguccgacgagcuccuccacaacgucaacgccggcaaguccaccaccaacaucaugaucaccaccaucaucaucgucaucaucgucauccuccucucccucaucgccgucggccuccuccucuacugcaaggcccgcuccacccccgucacccucuccaaggaccagcucuccggcaucaacaacaucgccuucuccaacugaggacuaguguccaccugucccuccugggcugcuggauugucucguuuuccugccaaauaaacaggaucagcgcuuuacagaucuaaaaaaaaaaaaaaaaaaaaaaaaaaaaaaaaaaaaaaaaaaaaaaaaaaaaaaaaaaaaaaaaugcaucccccccccccccccccccccccccccccccaaaggcucuuuucagagccaccagaauu

SEQ ID NO: 2426 - RNA, 2057 nt, Artificial Sequence
  mRNA product Design b-1 comprising derived and/or modified sequence from HRSV(A2)__F_DSCav1_mut2 (opt3)
gggagacggagacggccugcaggaccugcucucucagcccucagccgaggccuacgccgagccgagugcgcagccgacgaccgggaggagccgcagccuucaacucugagguacugugauccgcgcugcccgccgggccgccccaguccgcugcugcggcaccuccuucccucgcgcccucuucgcucgccagcgccuucccugugagccugcgucaccgcggccgccaagcuuaccauggagcugcucauccuuaaggccaacgcuauuaccacaauacugacugcagugacguucugcuuugccagcggccagaauaucaccgaagaguucuaccaauccacauguucugcggucucaaaaggguauuugggagcuuuaagaacugguugguacaccaguguuauuacaaucgaacugagcaacauuaaggagaauaaaugcaacggcaccgacgccaaggugaaacuaaucaagcaggaacucgauaaguauaaaaaugcaguaacugaccugcagcuucugaugcaguccacacccgccaccgggucuggaucggcuauauguucaggcguggcagucugcaagguguugcaccucgagggugagguuaacaaaaucaagagcgcccugcugaguacgaauaaagcuguggucucccucucuaacggggugagcguauuaacuuuuaagguucuggaucuuaagaauuacauugacaaacaauugcugccuauccuaaacaagcaguccuguucaauuccaaauaucgaaaccgugauagaguuccagcagaaaaacaauaggcuccuggaaauuacacgggaguuuagugucaacgccggagugacuaccccggugagcacauauaugcuuaccaauucugagcuguugucccucaucaacgauaugcccauuacgaacgaccaaaagaaacugaugucaaauaacguccagaucguucgccagcagagcuacaguaucaugugcauuauaaaggaagagguguuagcguauguagugcaacugccucucuacggcgucaucgauacuccauguuggaaacuucauacaucuccccugugcaccacuaauacaaaggaaggcuccaacauuuguuugacccgaacggaccgugggugguacugcgauaaugcaggaagcgugucguucuuuccucaggccgagaccuguaagguucagucuaacagaguguucugcgacacaaugaacucccuaacucugccaucagaagucaaucucugcaauguggauaucuuuaaccccaaauaugacuguaagauaaugaccaguaaaacagauguaagcuccucuguuauuacuagccugggugcuaucgugucaugcuacggcaagaccaaauguacagccaguaauaagaacagggggaucauuaagaccuucuccaauggaugcgacuaugucagcaacaaaggcguggacacugucucuguggguaauacgcuuuacuguguuaacaagcaagaggggcagucacuguaugugaaaggagagccuaucauuaacuuuuacgauccauugguauucccgagugacgaauuugaugcaagcauaucccaggucaaugagaagaucaaccagucucucgcuuucauucggaaaucggacgaacuguuacacaaugugaacgccggcaagagcacaaccaauaucaugaucacuaccauuauaaucguuauuaucgugauucugcuaucccucaucgcggucggccugcuuuuguauugcaaggcccgcucaacacccgugacccugaguaaagaucaacucucugggauaaacaauaucgcauucagcaacugaggacuaguguccaccugucccuccugggcugcuggauugucucguuuuccugccaaauaaacaggaucagcgcuuuacagaucuaaaaaaaaaaaaaaaaaaaaaaaaaaaaaaaaaaaaaaaaaaaaaaaaaaaaaaaaaaaaaaaaugcaucccccccccccccccccccccccccccccccaaaggcucuuuucagagccaccagaauu

SEQ ID NO: 2427 - RNA, 2057 nt, Artificial Sequence
  mRNA product Design b-1 comprising derived and/or modified sequence from HRSV(A2)__F_DSCav1_mut2 (opt4)
gggagacggagacggccugcaggaccugcucucucagcccucagccgaggccuacgccgagccgagugcgcagccgacgaccgggaggagccgcagccuucaacucugagguacugugauccgcgcugcccgccgggccgccccaguccgcugcugcggcaccuccuucccucgcgcccucuucgcucgccagcgccuucccugugagccugcgucaccgcggccgccaagcuuaccauggagcugcugauccugaaggccaacgccaucaccaccauccugaccgccgugaccuucugcuucgccagcggccagaacaucaccgaggaguucuaccagagcaccugcagcgccgugagcaagggcuaccugggcgcccugagaaccggcugguacaccagcgugaucaccaucgagcugagcaacaucaaggagaacaagugcaacggcaccgacgccaaggugaagcugaucaagcaggagcuggacaaguacaagaacgccgugaccgaccugcagcugcugaugcagagcacccccgccaccggcagcggcagcgccaucugcagcggcguggccgugugcaaggugcugcaccuggagggcgaggugaacaagaucaagagcgcccugcugagcaccaacaaggccguggugagccugagcaacggcgugagcgugcugaccuucaaggugcuggaccugaagaacuacaucgacaagcagcugcugcccauccugaacaagcagagcugcagcauccccaacaucgagaccgugaucgaguuccagcagaagaacaacagacugcuggagaucaccagagaguucagcgugaacgccggcgugaccacccccgugagcaccuacaugcugaccaacagcgagcugcugagccugaucaacgacaugcccaucaccaacgaccagaagaagcugaugagcaacaacgugcagaucgugagacagcagagcuacagcaucaugugcaucaucaaggaggaggugcuggccuacguggugcagcugccccuguacggcgugaucgacacccccugcuggaagcugcacaccagcccccugugcaccaccaacaccaaggagggcagcaacaucugccugaccagaaccgacagaggcugguacugcgacaacgccggcagcgugagcuucuucccccaggccgagaccugcaaggugcagagcaacagaguguucugcgacaccaugaacagccugacccugcccagcgaggugaaccugugcaacguggacaucuucaaccccaaguacgacugcaagaucaugaccagcaagaccgacgugagcagcagcgugaucaccagccugggcgccaucgugagcugcuacggcaagaccaagugcaccgccagcaacaagaacagaggcaucaucaagaccuucagcaacggcugcgacuacgugagcaacaagggcguggacaccgugagcgugggcaacacccuguacugcgugaacaagcaggagggccagagccuguacgugaagggcgagcccaucaucaacuucuacgacccccugguguuccccagcgacgaguucgacgccagcaucagccaggugaacgagaagaucaaccagagccuggccuucaucagaaagagcgacgagcugcugcacaacgugaacgccggcaagagcaccaccaacaucaugaucaccaccaucaucaucgugaucaucgugauccugcugagccugaucgccgugggccugcugcuguacugcaaggccagaagcacccccgugacccugagcaaggaccagcugagcggcaucaacaacaucgccuucagcaacugaggacuaguguccaccugucccuccugggcugcuggauugucucguuuuccugccaaauaaacaggaucagcgcuuuacagaucuaaaaaaaaaaaaaaaaaaaaaaaaaaaaaaaaaaaaaaaaaaaaaaaaaaaaaaaaaaaaaaaaugcaucccccccccccccccccccccccccccccccaaaggcucuuuucagagccaccagaauu

SEQ ID NO: 2428 - RNA, 2057 nt, Artificial Sequence
  mRNA product Design b-1 comprising derived and/or modified sequence from HRSV(A2)__F_DSCav1_mut2 (opt5)
gggagacggagacggccugcaggaccugcucucucagcccucagccgaggccuacgccgagccgagugcgcagccgacgaccgggaggagccgcagccuucaacucugagguacugugauccgcgcugcccgccgggccgccccaguccgcugcugcggcaccuccuucccucgcgcccucuucgcucgccagcgccuucccugugagccugcgucaccgcggccgccaagcuuaccauggagcugcucauccugaaggccaacgcuauuaccacaauccuuacggccgugaccuucugcuuugcgagcggccagaauauuacagaagaguucuaccaauccaccuguucugcugucagcaaaggguaucugggagcccucagaacaggcugguacaccuccguuaucacaauugaacugucuaacaucaaggagaauaaaugcaacgggaccgacgccaaggugaaacuuaucaagcaggaacuggauaaguauaaaaaugcugugacggaccuccagcugcugaugcagagcacccccgccacaggauccggcucugcuauuuguagcggggucgccgugugcaagguucuccaccuggagggagaggugaacaaaaucaaguccgcgcuucugagcaccaauaaagccgucgugucucucuccaacggcguuagcgugcugacauuuaagguccuugaucugaagaauuacauugacaaacaacuccugccuauccugaacaagcagucuuguuccauuccgaauaucgaaaccgugauugaguuccagcagaaaaacaaucggcuccuggaaaucacgcgcgaguuuagcgugaacgcuggcgucacaacccccguuucuacauauaugcuuaccaauuccgagcugcucagccugaucaacgauaugccuauuaccaacgaccaaaagaaacuuauguccaauaacgugcagaucgugagacagcagucuuacagcauuaugugcaucauuaaggaagagguccuggccuaugugguucaacucccccuguacggggugaucgauacaccuuguuggaaacugcauacgagcccccucugcaccacaaauaccaaggaaggauccaacaucugucugacacggaccgaccgcggcugguacugcgauaaugcugggucugucuccuucuuuccucaggccgagacguguaaggugcagagcaacagaguuuucugcgacacaaugaacucucuuacccugccgagcgaagugaaucucugcaaugucgauauuuuuaaccccaaauaugacuguaagaucaugaccuccaaaacagaugugucuagcuccgucauuaccagccugggagcgaucgugucuugcuacggcaagacaaaauguacggccuccaauaagaaccgggggauuaucaagaccuucagcaauggaugcgacuauguuucuaacaaaggcguggacacagucuccgugggcaauacccuuuacuguguuaacaagcaagaggggcagagccuguaugugaaaggagagccuaucauuaacuuuuacgauccccucgucuucccuuccgacgaauuugaugcuucuaucagccaggugaaugagaagauuaaccagucccuggccuucauccgcaaaucugacgaacugcuccacaaugugaacgcuggcaagagcacaaccaauauuaugaucacgaccauuaucaucguuauuaucgucauucugcuuucccugaucgccguggggcuccugcuguauugcaaggccagaagcacacccgugacccuuucuaaagaucaacucuccggaauuaacaauaucgcuuucagcaacugaggacuaguguccaccugucccuccugggcugcuggauugucucguuuuccugccaaauaaacaggaucagcgcuuuacagaucuaaaaaaaaaaaaaaaaaaaaaaaaaaaaaaaaaaaaaaaaaaaaaaaaaaaaaaaaaaaaaaaaugcaucccccccccccccccccccccccccccccccaaaggcucuuuucagagccaccagaauu

SEQ ID NO: 2429 - RNA, 2057 nt, Artificial Sequence
  mRNA product Design b-1 comprising derived and/or modified sequence from HRSV(A2)__F_DSCav1_mut2 (opt6)
gggagacggagacggccugcaggaccugcucucucagcccucagccgaggccuacgccgagccgagugcgcagccgacgaccgggaggagccgcagccuucaacucugagguacugugauccgcgcugcccgccgggccgccccaguccgcugcugcggcaccuccuucccucgcgcccucuucgcucgccagcgccuucccugugagccugcgucaccgcggccgccaagcuuaccauggaacuacuaauccuaaaagcaaacgcaauuacaacuauacuuaccgccguaacauuuugcuucgcaucugggcaaaacauuaccgaagaauuuuaucaaucaacaugcucagcagucuccaaaggauaccuuggagcauuaagaaccggcugguauaccuccguaauaacaauugaacuaucuaauauaaaagaaaauaaauguaauggaacugacgcaaaaguuaaacuaauaaaacaagaacucgacaaauacaaaaacgccgucacagaccuacaacuacuaaugcaaucaacccccgcaacaggaucaggauccgcaaucugcagcggcgucgcaguuugcaaaguccuacauuuagaaggagaaguaaacaaaauaaaaucugcucuccucucuacaaacaaagcaguagugucacuuucaaacggaguaucaguucuaacauucaaaguacuagaccuaaaaaauuacauagacaaacaacuacuuccaauucuaaacaaacaauccuguuccauacccaacauagaaacaguaauagaauuucaacaaaaaaauaacagacuccuagaaauuacaagagaauuuuccgucaaugcaggaguaacaaccccaguaucaaccuacauguuaacuaacucagaacucuuaucacuaauaaacgacaugccaaucacuaaugaccaaaaaaaacucaugucaaauaacguacaaauaguccgacaacaaucauacuccaucaugugcauuauaaaagaagaaguacuagcauacgucguccaauuaccacuauacggcgucauagacacaccauguuggaaacuccacacaucaccacuaugcacuacaaauacaaaagaaggcuccaacaucugccuaacaagaacagacagagguugguauugcgacaacgcaggaucaguaucauuuuucccccaagcagaaacauguaaaguacaaucaaauagagucuucugcgacaccaugaacucauuaacacuaccuucagaagucaaccuaugcaacguagacaucuucaacccuaaauaugacugcaaaaucaugaccagcaaaaccgacguuucaucuuccguaauaacaucacuaggcgcaauagucucauguuacggcaaaacaaaauguacagcaucaaauaaaaaccguggaauaauaaaaacauuuucuaaugguugugacuacguaagcaauaaaggaguagauacaguaucagucggcaacaccuuauacuguguaaacaaacaagaaggccaaaguuuauacgucaaaggagaacccaucaucaacuucuacgacccauuaguauucccaucagacgaauuugaugcaagcauuucacaagucaacgaaaaaaucaaucaaucauuagcauucauccgaaaaucagacgaauuauuacacaacguaaacgccggaaaaucaaccacuaauauaaugauaaccacaauaaucaucguaauaauaguaauacuucucucacuaaucgcagucggacuccuucuauacugcaaagcaagaucuacaccaguaacacuauccaaagaucaacuaaguggcauaaacaacauagcauuuucuaacuaaggacuaguguccaccugucccuccugggcugcuggauugucucguuuuccugccaaauaaacaggaucagcgcuuuacagaucuaaaaaaaaaaaaaaaaaaaaaaaaaaaaaaaaaaaaaaaaaaaaaaaaaaaaaaaaaaaaaaaaugcaucccccccccccccccccccccccccccccccaaaggcucuuuucagagccaccagaauu

SEQ ID NO: 2430 - RNA, 2057 nt, Artificial Sequence
  mRNA product Design b-1 comprising derived and/or modified sequence from HRSV(A2)__F_DSCav1_mut2 (opt11)
gggagacggagacggccugcaggaccugcucucucagcccucagccgaggccuacgccgagccgagugcgcagccgacgaccgggaggagccgcagccuucaacucugagguacugugauccgcgcugcccgccgggccgccccaguccgcugcugcggcaccuccuucccucgcgcccucuucgcucgccagcgccuucccugugagccugcgucaccgcggccgccaagcuuaccauggaacuccucauccuaaaagccaacgcgaucaccacaauccugacagccgucaccuucugcuucgccuccggccaaaacaucaccgaagaguucuaccaauccacaugcuccgccgucuccaagggcuaccugggcgcacuucguacaggcugguacaccuccguaauaaccaucgaacucuccaacaucaaagaaaacaaaugcaacggcacagacgcaaaagucaaacucaucaagcaagaacuugacaaauacaaaaaugcagucaccgaccuucaacuccucaugcaaucuacccccgccacaggcuccggcuccgcuaucugcuccggcgucgccgucugcaaaguccuccaccucgaaggugaaguaaacaaaauaaaauccgcccuccucuccaccaacaaagccgucgucucccuaucaaacggcgucuccgugcucaccuucaagguucucgaccugaaaaacuacauagacaaacagcuccuaccaauccuuaacaaacagagcugcuccauuccgaauaucgaaacgguaaucgaauuucaacagaaaaacaaccgccuccucgaaauaacgcgagaguucuccguaaacgcuggcgucaccacacccgucagcaccuacaugcuaacgaacuccgaacucuugucgcucaucaacgacaugcccauaaccaacgaccaaaagaaacuaauguccaauaacguacaaaucguacgccaacaaucuuacuccaucaugugcaucauaaaagaagaaguacuagcuuacgucguccaacucccacuguacggagucaucgacacccccugcuggaaacuccacaccucuccccucugcaccaccaacaccaaagagggcuccaacauuugccugacacgcaccgaccgcggcugguacugcgacaacgcaggcuccgucucguucuucccccaagccgaaaccugcaaaguccaauccaaccgcgucuucugcgacaccaugaacucccucacccuccccuccgaagucaaucuaugcaacguagacaucuucaacccgaaauaugacugcaaaauuaugacaucuaaaaccgacguguccuccucagucaucacuucccuaggagccaucguuuccuguuacggcaagaccaaaugcaccgccagcaacaaaaaccgaggcaucaucaaaaccuucuccaacggaugugacuaugucuccaacaagggcgucgacaccgucagcgucggcaacacccucuacugcgucaacaaacaagaaggccaaucccucuacgucaaaggagagcccauaaucaacuucuacgacccccucgucuucccauccgacgaguucgacgccucaaucucccaagucaacgagaaaaucaaccaauccuuagccuucauccguaaguccgacgaacuccuucacaacgucaacgccgguaaaucuaccaccaacaucaugauaacaacaauaauuaucgucaucaucgucauccuccuuucccucaucgcggucgggcuauugcucuacugcaaagcccgguccaccccaguaacccucucuaaagaccaacucagcggaaucaauaacauagccuucagcaauuaaggacuaguguccaccugucccuccugggcugcuggauugucucguuuuccugccaaauaaacaggaucagcgcuuuacagaucuaaaaaaaaaaaaaaaaaaaaaaaaaaaaaaaaaaaaaaaaaaaaaaaaaaaaaaaaaaaaaaaaugcaucccccccccccccccccccccccccccccccaaaggcucuuuucagagccaccagaauu

SEQ ID NO: 2431 - RNA, 1877 nt, Artificial Sequence
  mRNA product Design b-2 comprising derived and/or modified sequence from HRSV(A2)__F_DSCav1_mut2 (opt1)
gggagagccucugcuggaguccggggaguggcguuggcugcuagagcgaagcuuaccauggagcugcucauccugaaggccaacgccaucaccaccauccugacggcggugaccuucugcuucgccagcggccagaacaucaccgaggaguucuaccaguccacgugcagcgccgucuccaagggguaccucggcgcccugcggaccggcugguacaccuccgugaucaccaucgagcugagcaacaucaaggagaacaagugcaacgggaccgacgccaaggugaagcucaucaagcaggagcuggacaaguacaagaacgcggucacggaccugcagcuccugaugcaguccaccccggcaaccggcuccggcuccgccaucugcagcggcgucgccgugugcaaggugcugcaccucgagggggaggucaacaagaucaagagcgcccugcuguccaccaacaaggccguggugagccucuccaacggcgucagcgugcugaccuucaaggugcuggaccucaagaacuacaucgacaagcagcugcugcccauccugaacaagcagagcugcuccauccccaacaucgagacggugaucgaguuccagcagaagaacaaccggcuccuggagaucacccgcgaguucagcgugaacgccggggucaccacccccguguccacguacaugcugaccaacagcgagcuccugucccugaucaacgacaugccgaucaccaacgaccagaagaagcucaugagcaacaacgugcagaucguccggcagcaguccuacagcaucaugugcaucaucaaggaggaggugcuggcguacgugguccagcugccccucuacggcgugaucgacacccccugcuggaagcugcacacgagcccccugugcaccaccaacaccaaggagggguccaacaucugccucacgcgcaccgaccggggcugguacugcgacaacgccggcagcgucuccuucuucccgcaggccgagaccugcaaggugcagagcaaccgcguguucugcgacaccaugaacucccugacgcugcccagcgagguaaaccucugcaacgucgacaucuucaaccccaaguacgacugcaagaucaugaccuccaagaccgacgugagcuccagcgugaucaccucccugggggccaucgucagcugcuacggcaagacgaagugcaccgccagcaacaagaaccgggggaucaucaagaccuucuccaacggcugcgacuacgugagcaacaagggcguggacaccguguccgucgggaacacccuguacugcgugaacaagcaggagggccagagccucuacgugaagggggagcccaucaucaacuucuacgacccgcuggucuuccccuccgacgaguucgacgcgagcaucucccaggugaacgagaagaucaaccagagccuggccuucauccgcaaguccgacgagcugcuccacaacgugaacgccggcaagagcacgaccaacaucaugaucaccaccaucaucaucgucaucaucgugauccugcugucccucaucgccguggggcugcugcucuacugcaaggcccggagcacgcccgucacccuguccaaggaccagcugagcggcaucaacaacaucgcguucuccaacugaggacuaguguccaccugucccuccugggcugcuggauugucucguuuuccugccaaauaaacaggaucagcgcuuuacagaucuaaaaaaaaaaaaaaaaaaaaaaaaaaaaaaaaaaaaaaaaaaaaaaaaaaaaaaaaaaaaaaaaugcaucccccccccccccccccccccccccccccccaaaggcucuuuucagagccaccagaauu

SEQ ID NO: 2432 - RNA, 1877 nt, Artificial Sequence
  mRNA product Design b-2 comprising derived and/or modified sequence from HRSV(A2)__F_DSCav1_mut2 (opt1)
gggagagccucugcuggaguccggggaguggcguuggcugcuagagcgaagcuuaccauggagcugcucauccugaaggccaacgccaucaccaccauccugacggcggugaccuucugcuucgccagcggccagaacaucaccgaggaguucuaccaguccacgugcagcgccgucuccaagggguaccucggcgcccugcgcaccgggugguacaccagcgugaucaccaucgagcuguccaacaucaaggagaacaagugcaacggcaccgacgccaaggugaagcucaucaagcaggagcuggacaaguacaagaacgcggucacggaccugcagcuccugaugcagagcacccccgccaccggguccggcagcgccaucugcuccggcguggccgugugcaagguccugcaccucgagggggaggugaacaagaucaagagcgcgcugcuguccaccaacaaggccguggucagccucuccaacggcgugagcgugcugacguucaagguccuggaccucaagaacuacaucgacaagcagcugcugccgauccucaacaagcaguccugcagcauccccaacaucgagaccgugaucgaguuccagcagaagaacaaccggcugcuggagaucacccgcgaguucuccgugaacgccggggucaccacgcccgugagcaccuacaugcucaccaacuccgagcugcugagccucaucaacgacaugcccaucaccaacgaccagaagaagcugaugagcaacaacgugcagaucguccggcagcaguccuacagcaucaugugcaucaucaaggaggaggugcuggccuacgugguccagcucccgcuguacggcgugaucgacacgcccugcuggaagcugcacaccagcccccucugcaccaccaacacgaaggagggguccaacaucugccugacccgcaccgaccggggcugguacugcgacaacgccggcuccgugagcuucuucccccaggcggagaccugcaagguccaguccaaccgcguguucugcgacacgaugaacagccugacccucccguccgaggucaaccugugcaacguggacaucuucaaccccaaguacgacugcaagaucaugaccagcaagaccgacguguccagcuccgucaucacgagccugggggccaucguguccugcuacggcaagaccaagugcaccgccagcaacaagaaccgggggaucaucaagaccuucuccaacggcugcgacuacgugagcaacaagggcgucgacacgguguccguggggaacacccucuacugcgucaacaagcaggagggccagagccuguacgugaagggggagcccaucaucaacuucuacgacccccugguguucccgagcgacgaguucgacgccuccaucagccaggucaacgagaagaucaaccagucccucgccuucauccgcaagagcgacgagcugcugcacaacgugaacgcgggcaaguccaccaccaacaucaugaucaccacgaucaucaucgugaucaucgucauccuccugagccugaucgccguggggcuccugcuguacugcaaggcccgguccacccccgugacccugagcaaggaccagcucuccggcaucaacaacaucgccuucagcaacugaggacuaguguccaccugucccuccugggcugcuggauugucucguuuuccugccaaauaaacaggaucagcgcuuuacagaucuaaaaaaaaaaaaaaaaaaaaaaaaaaaaaaaaaaaaaaaaaaaaaaaaaaaaaaaaaaaaaaaaugcaucccccccccccccccccccccccccccccccaaaggcucuuuucagagccaccagaauu

SEQ ID NO: 2433 - RNA, 1877 nt, Artificial Sequence
  mRNA product Design b-2 comprising derived and/or modified sequence from HRSV(A2)__F_DSCav1_mut2 (opt2)
gggagagccucugcuggaguccggggaguggcguuggcugcuagagcgaagcuuaccauggagcuccucauccucaaggccaacgccaucaccaccauccucaccgccgucaccuucugcuucgccuccggccagaacaucaccgaggaguucuaccaguccaccugcuccgccgucuccaagggcuaccucggcgcccuccgcaccggcugguacaccuccgucaucaccaucgagcucuccaacaucaaggagaacaagugcaacggcaccgacgccaaggucaagcucaucaagcaggagcucgacaaguacaagaacgccgucaccgaccuccagcuccucaugcaguccacccccgccaccggcuccggcuccgccaucugcuccggcgucgccgucugcaagguccuccaccucgagggcgaggucaacaagaucaaguccgcccuccucuccaccaacaaggccgucgucucccucuccaacggcgucuccguccucaccuucaagguccucgaccucaagaacuacaucgacaagcagcuccuccccauccucaacaagcaguccugcuccauccccaacaucgagaccgucaucgaguuccagcagaagaacaaccgccuccucgagaucacccgcgaguucuccgucaacgccggcgucaccacccccgucuccaccuacaugcucaccaacuccgagcuccucucccucaucaacgacaugcccaucaccaacgaccagaagaagcucauguccaacaacguccagaucguccgccagcaguccuacuccaucaugugcaucaucaaggaggagguccucgccuacgucguccagcucccccucuacggcgucaucgacacccccugcuggaagcuccacaccuccccccucugcaccaccaacaccaaggagggcuccaacaucugccucacccgcaccgaccgcggcugguacugcgacaacgccggcuccgucuccuucuucccccaggccgagaccugcaagguccaguccaaccgcgucuucugcgacaccaugaacucccucacccuccccuccgaggucaaccucugcaacgucgacaucuucaaccccaaguacgacugcaagaucaugaccuccaagaccgacgucuccuccuccgucaucaccucccucggcgccaucgucuccugcuacggcaagaccaagugcaccgccuccaacaagaaccgcggcaucaucaagaccuucuccaacggcugcgacuacgucuccaacaagggcgucgacaccgucuccgucggcaacacccucuacugcgucaacaagcaggagggccagucccucuacgucaagggcgagcccaucaucaacuucuacgacccccucgucuuccccuccgacgaguucgacgccuccaucucccaggucaacgagaagaucaaccagucccucgccuucauccgcaaguccgacgagcuccuccacaacgucaacgccggcaaguccaccaccaacaucaugaucaccaccaucaucaucgucaucaucgucauccuccucucccucaucgccgucggccuccuccucuacugcaaggcccgcuccacccccgucacccucuccaaggaccagcucuccggcaucaacaacaucgccuucuccaacugaggacuaguguccaccugucccuccugggcugcuggauugucucguuuuccugccaaauaaacaggaucagcgcuuuacagaucuaaaaaaaaaaaaaaaaaaaaaaaaaaaaaaaaaaaaaaaaaaaaaaaaaaaaaaaaaaaaaaaaugcaucccccccccccccccccccccccccccccccaaaggcucuuuucagagccaccagaauu

SEQ ID NO: 2434 - RNA, 1877 nt, Artificial Sequence
  mRNA product Design b-2 comprising derived and/or modified sequence from HRSV(A2)__F_DSCav1_mut2 (opt3)
gggagagccucugcuggaguccggggaguggcguuggcugcuagagcgaagcuuaccauggagcugcucauccuuaaggccaacgcuauuaccacaauacugacugcagugacguucugcuuugccagcggccagaauaucaccgaagaguucuaccaauccacauguucugcggucucaaaaggguauuugggagcuuuaagaacugguugguacaccaguguuauuacaaucgaacugagcaacauuaaggagaauaaaugcaacggcaccgacgccaaggugaaacuaaucaagcaggaacucgauaaguauaaaaaugcaguaacugaccugcagcuucugaugcaguccacacccgccaccgggucuggaucggcuauauguucaggcguggcagucugcaagguguugcaccucgagggugagguuaacaaaaucaagagcgcccugcugaguacgaauaaagcuguggucucccucucuaacggggugagcguauuaacuuuuaagguucuggaucuuaagaauuacauugacaaacaauugcugccuauccuaaacaagcaguccuguucaauuccaaauaucgaaaccgugauagaguuccagcagaaaaacaauaggcuccuggaaauuacacgggaguuuagugucaacgccggagugacuaccccggugagcacauauaugcuuaccaauucugagcuguugucccucaucaacgauaugcccauuacgaacgaccaaaagaaacugaugucaaauaacguccagaucguucgccagcagagcuacaguaucaugugcauuauaaaggaagagguguuagcguauguagugcaacugccucucuacggcgucaucgauacuccauguuggaaacuucauacaucuccccugugcaccacuaauacaaaggaaggcuccaacauuuguuugacccgaacggaccgugggugguacugcgauaaugcaggaagcgugucguucuuuccucaggccgagaccuguaagguucagucuaacagaguguucugcgacacaaugaacucccuaacucugccaucagaagucaaucucugcaauguggauaucuuuaaccccaaauaugacuguaagauaaugaccaguaaaacagauguaagcuccucuguuauuacuagccugggugcuaucgugucaugcuacggcaagaccaaauguacagccaguaauaagaacagggggaucauuaagaccuucuccaauggaugcgacuaugucagcaacaaaggcguggacacugucucuguggguaauacgcuuuacuguguuaacaagcaagaggggcagucacuguaugugaaaggagagccuaucauuaacuuuuacgauccauugguauucccgagugacgaauuugaugcaagcauaucccaggucaaugagaagaucaaccagucucucgcuuucauucggaaaucggacgaacuguuacacaaugugaacgccggcaagagcacaaccaauaucaugaucacuaccauuauaaucguuauuaucgugauucugcuaucccucaucgcggucggccugcuuuuguauugcaaggcccgcucaacacccgugacccugaguaaagaucaacucucugggauaaacaauaucgcauucagcaacugaggacuaguguccaccugucccuccugggcugcuggauugucucguuuuccugccaaauaaacaggaucagcgcuuuacagaucuaaaaaaaaaaaaaaaaaaaaaaaaaaaaaaaaaaaaaaaaaaaaaaaaaaaaaaaaaaaaaaaaugcaucccccccccccccccccccccccccccccccaaaggcucuuuucagagccaccagaauu

SEQ ID NO: 2435 - RNA, 1877 nt, Artificial Sequence
  mRNA product Design b-2 comprising derived and/or modified sequence from HRSV(A2)__F_DSCav1_mut2 (opt4)
gggagagccucugcuggaguccggggaguggcguuggcugcuagagcgaagcuuaccauggagcugcugauccugaaggccaacgccaucaccaccauccugaccgccgugaccuucugcuucgccagcggccagaacaucaccgaggaguucuaccagagcaccugcagcgccgugagcaagggcuaccugggcgcccugagaaccggcugguacaccagcgugaucaccaucgagcugagcaacaucaaggagaacaagugcaacggcaccgacgccaaggugaagcugaucaagcaggagcuggacaaguacaagaacgccgugaccgaccugcagcugcugaugcagagcacccccgccaccggcagcggcagcgccaucugcagcggcguggccgugugcaaggugcugcaccuggagggcgaggugaacaagaucaagagcgcccugcugagcaccaacaaggccguggugagccugagcaacggcgugagcgugcugaccuucaaggugcuggaccugaagaacuacaucgacaagcagcugcugcccauccugaacaagcagagcugcagcauccccaacaucgagaccgugaucgaguuccagcagaagaacaacagacugcuggagaucaccagagaguucagcgugaacgccggcgugaccacccccgugagcaccuacaugcugaccaacagcgagcugcugagccugaucaacgacaugcccaucaccaacgaccagaagaagcugaugagcaacaacgugcagaucgugagacagcagagcuacagcaucaugugcaucaucaaggaggaggugcuggccuacguggugcagcugccccuguacggcgugaucgacacccccugcuggaagcugcacaccagcccccugugcaccaccaacaccaaggagggcagcaacaucugccugaccagaaccgacagaggcugguacugcgacaacgccggcagcgugagcuucuucccccaggccgagaccugcaaggugcagagcaacagaguguucugcgacaccaugaacagccugacccugcccagcgaggugaaccugugcaacguggacaucuucaaccccaaguacgacugcaagaucaugaccagcaagaccgacgugagcagcagcgugaucaccagccugggcgccaucgugagcugcuacggcaagaccaagugcaccgccagcaacaagaacagaggcaucaucaagaccuucagcaacggcugcgacuacgugagcaacaagggcguggacaccgugagcgugggcaacacccuguacugcgugaacaagcaggagggccagagccuguacgugaagggcgagcccaucaucaacuucuacgacccccugguguuccccagcgacgaguucgacgccagcaucagccaggugaacgagaagaucaaccagagccuggccuucaucagaaagagcgacgagcugcugcacaacgugaacgccggcaagagcaccaccaacaucaugaucaccaccaucaucaucgugaucaucgugauccugcugagccugaucgccgugggccugcugcuguacugcaaggccagaagcacccccgugacccugagcaaggaccagcugagcggcaucaacaacaucgccuucagcaacugaggacuaguguccaccugucccuccugggcugcuggauugucucguuuuccugccaaauaaacaggaucagcgcuuuacagaucuaaaaaaaaaaaaaaaaaaaaaaaaaaaaaaaaaaaaaaaaaaaaaaaaaaaaaaaaaaaaaaaaugcaucccccccccccccccccccccccccccccccaaaggcucuuuucagagccaccagaauu

SEQ ID NO: 2436 - RNA, 1877 nt, Artificial Sequence
  mRNA product Design b-2 comprising derived and/or modified sequence from HRSV(A2)__F_DSCav1_mut2 (opt5)
gggagagccucugcuggaguccggggaguggcguuggcugcuagagcgaagcuuaccauggagcugcucauccugaaggccaacgcuauuaccacaauccuuacggccgugaccuucugcuuugcgagcggccagaauauuacagaagaguucuaccaauccaccuguucugcugucagcaaaggguaucugggagcccucagaacaggcugguacaccuccguuaucacaauugaacugucuaacaucaaggagaauaaaugcaacgggaccgacgccaaggugaaacuuaucaagcaggaacuggauaaguauaaaaaugcugugacggaccuccagcugcugaugcagagcacccccgccacaggauccggcucugcuauuuguagcggggucgccgugugcaagguucuccaccuggagggagaggugaacaaaaucaaguccgcgcuucugagcaccaauaaagccgucgugucucucuccaacggcguuagcgugcugacauuuaagguccuugaucugaagaauuacauugacaaacaacuccugccuauccugaacaagcagucuuguuccauuccgaauaucgaaaccgugauugaguuccagcagaaaaacaaucggcuccuggaaaucacgcgcgaguuuagcgugaacgcuggcgucacaacccccguuucuacauauaugcuuaccaauuccgagcugcucagccugaucaacgauaugccuauuaccaacgaccaaaagaaacuuauguccaauaacgugcagaucgugagacagcagucuuacagcauuaugugcaucauuaaggaagagguccuggccuaugugguucaacucccccuguacggggugaucgauacaccuuguuggaaacugcauacgagcccccucugcaccacaaauaccaaggaaggauccaacaucugucugacacggaccgaccgcggcugguacugcgauaaugcugggucugucuccuucuuuccucaggccgagacguguaaggugcagagcaacagaguuuucugcgacacaaugaacucucuuacccugccgagcgaagugaaucucugcaaugucgauauuuuuaaccccaaauaugacuguaagaucaugaccuccaaaacagaugugucuagcuccgucauuaccagccugggagcgaucgugucuugcuacggcaagacaaaauguacggccuccaauaagaaccgggggauuaucaagaccuucagcaauggaugcgacuauguuucuaacaaaggcguggacacagucuccgugggcaauacccuuuacuguguuaacaagcaagaggggcagagccuguaugugaaaggagagccuaucauuaacuuuuacgauccccucgucuucccuuccgacgaauuugaugcuucuaucagccaggugaaugagaagauuaaccagucccuggccuucauccgcaaaucugacgaacugcuccacaaugugaacgcuggcaagagcacaaccaauauuaugaucacgaccauuaucaucguuauuaucgucauucugcuuucccugaucgccguggggcuccugcuguauugcaaggccagaagcacacccgugacccuuucuaaagaucaacucuccggaauuaacaauaucgcuuucagcaacugaggacuaguguccaccugucccuccugggcugcuggauugucucguuuuccugccaaauaaacaggaucagcgcuuuacagaucuaaaaaaaaaaaaaaaaaaaaaaaaaaaaaaaaaaaaaaaaaaaaaaaaaaaaaaaaaaaaaaaaugcaucccccccccccccccccccccccccccccccaaaggcucuuuucagagccaccagaauu

SEQ ID NO: 2437 - RNA, 1877 nt, Artificial Sequence
  mRNA product Design b-2 comprising derived and/or modified sequence from HRSV(A2)__F_DSCav1_mut2 (opt6)
gggagagccucugcuggaguccggggaguggcguuggcugcuagagcgaagcuuaccauggaacuacuaauccuaaaagcaaacgcaauuacaacuauacuuaccgccguaacauuuugcuucgcaucugggcaaaacauuaccgaagaauuuuaucaaucaacaugcucagcagucuccaaaggauaccuuggagcauuaagaaccggcugguauaccuccguaauaacaauugaacuaucuaauauaaaagaaaauaaauguaauggaacugacgcaaaaguuaaacuaauaaaacaagaacucgacaaauacaaaaacgccgucacagaccuacaacuacuaaugcaaucaacccccgcaacaggaucaggauccgcaaucugcagcggcgucgcaguuugcaaaguccuacauuuagaaggagaaguaaacaaaauaaaaucugcucuccucucuacaaacaaagcaguagugucacuuucaaacggaguaucaguucuaacauucaaaguacuagaccuaaaaaauuacauagacaaacaacuacuuccaauucuaaacaaacaauccuguuccauacccaacauagaaacaguaauagaauuucaacaaaaaaauaacagacuccuagaaauuacaagagaauuuuccgucaaugcaggaguaacaaccccaguaucaaccuacauguuaacuaacucagaacucuuaucacuaauaaacgacaugccaaucacuaaugaccaaaaaaaacucaugucaaauaacguacaaauaguccgacaacaaucauacuccaucaugugcauuauaaaagaagaaguacuagcauacgucguccaauuaccacuauacggcgucauagacacaccauguuggaaacuccacacaucaccacuaugcacuacaaauacaaaagaaggcuccaacaucugccuaacaagaacagacagagguugguauugcgacaacgcaggaucaguaucauuuuucccccaagcagaaacauguaaaguacaaucaaauagagucuucugcgacaccaugaacucauuaacacuaccuucagaagucaaccuaugcaacguagacaucuucaacccuaaauaugacugcaaaaucaugaccagcaaaaccgacguuucaucuuccguaauaacaucacuaggcgcaauagucucauguuacggcaaaacaaaauguacagcaucaaauaaaaaccguggaauaauaaaaacauuuucuaaugguugugacuacguaagcaauaaaggaguagauacaguaucagucggcaacaccuuauacuguguaaacaaacaagaaggccaaaguuuauacgucaaaggagaacccaucaucaacuucuacgacccauuaguauucccaucagacgaauuugaugcaagcauuucacaagucaacgaaaaaaucaaucaaucauuagcauucauccgaaaaucagacgaauuauuacacaacguaaacgccggaaaaucaaccacuaauauaaugauaaccacaauaaucaucguaauaauaguaauacuucucucacuaaucgcagucggacuccuucuauacugcaaagcaagaucuacaccaguaacacuauccaaagaucaacuaaguggcauaaacaacauagcauuuucuaacuaaggacuaguguccaccugucccuccugggcugcuggauugucucguuuuccugccaaauaaacaggaucagcgcuuuacagaucuaaaaaaaaaaaaaaaaaaaaaaaaaaaaaaaaaaaaaaaaaaaaaaaaaaaaaaaaaaaaaaaaugcaucccccccccccccccccccccccccccccccaaaggcucuuuucagagccaccagaauu

SEQ ID NO: 2438 - RNA, 1877 nt, Artificial Sequence
  mRNA product Design b-2 comprising derived and/or modified sequence from HRSV(A2)__F_DSCav1_mut2 (opt11)
gggagagccucugcuggaguccggggaguggcguuggcugcuagagcgaagcuuaccauggaacuccucauccuaaaagccaacgcgaucaccacaauccugacagccgucaccuucugcuucgccuccggccaaaacaucaccgaagaguucuaccaauccacaugcuccgccgucuccaagggcuaccugggcgcacuucguacaggcugguacaccuccguaauaaccaucgaacucuccaacaucaaagaaaacaaaugcaacggcacagacgcaaaagucaaacucaucaagcaagaacuugacaaauacaaaaaugcagucaccgaccuucaacuccucaugcaaucuacccccgccacaggcuccggcuccgcuaucugcuccggcgucgccgucugcaaaguccuccaccucgaaggugaaguaaacaaaauaaaauccgcccuccucuccaccaacaaagccgucgucucccuaucaaacggcgucuccgugcucaccuucaagguucucgaccugaaaaacuacauagacaaacagcuccuaccaauccuuaacaaacagagcugcuccauuccgaauaucgaaacgguaaucgaauuucaacagaaaaacaaccgccuccucgaaauaacgcgagaguucuccguaaacgcuggcgucaccacacccgucagcaccuacaugcuaacgaacuccgaacucuugucgcucaucaacgacaugcccauaaccaacgaccaaaagaaacuaauguccaauaacguacaaaucguacgccaacaaucuuacuccaucaugugcaucauaaaagaagaaguacuagcuuacgucguccaacucccacuguacggagucaucgacacccccugcuggaaacuccacaccucuccccucugcaccaccaacaccaaagagggcuccaacauuugccugacacgcaccgaccgcggcugguacugcgacaacgcaggcuccgucucguucuucccccaagccgaaaccugcaaaguccaauccaaccgcgucuucugcgacaccaugaacucccucacccuccccuccgaagucaaucuaugcaacguagacaucuucaacccgaaauaugacugcaaaauuaugacaucuaaaaccgacguguccuccucagucaucacuucccuaggagccaucguuuccuguuacggcaagaccaaaugcaccgccagcaacaaaaaccgaggcaucaucaaaaccuucuccaacggaugugacuaugucuccaacaagggcgucgacaccgucagcgucggcaacacccucuacugcgucaacaaacaagaaggccaaucccucuacgucaaaggagagcccauaaucaacuucuacgacccccucgucuucccauccgacgaguucgacgccucaaucucccaagucaacgagaaaaucaaccaauccuuagccuucauccguaaguccgacgaacuccuucacaacgucaacgccgguaaaucuaccaccaacaucaugauaacaacaauaauuaucgucaucaucgucauccuccuuucccucaucgcggucgggcuauugcucuacugcaaagcccgguccaccccaguaacccucucuaaagaccaacucagcggaaucaauaacauagccuucagcaauuaaggacuaguguccaccugucccuccugggcugcuggauugucucguuuuccugccaaauaaacaggaucagcgcuuuacagaucuaaaaaaaaaaaaaaaaaaaaaaaaaaaaaaaaaaaaaaaaaaaaaaaaaaaaaaaaaaaaaaaaugcaucccccccccccccccccccccccccccccccaaaggcucuuuucagagccaccagaauu

SEQ ID NO: 2439 - RNA, 1897 nt, Artificial Sequence
  mRNA product Design b-3 comprising derived and/or modified sequence from HRSV(A2)__F_DSCav1_mut2 (opt1)
gggagagucccgcagucggcguccagcggcucugcuuguucgugugugugucguugcaggccuuauucaagcuuaccauggagcugcucauccugaaggccaacgccaucaccaccauccugacggcggugaccuucugcuucgccagcggccagaacaucaccgaggaguucuaccaguccacgugcagcgccgucuccaagggguaccucggcgcccugcggaccggcugguacaccuccgugaucaccaucgagcugagcaacaucaaggagaacaagugcaacgggaccgacgccaaggugaagcucaucaagcaggagcuggacaaguacaagaacgcggucacggaccugcagcuccugaugcaguccaccccggcaaccggcuccggcuccgccaucugcagcggcgucgccgugugcaaggugcugcaccucgagggggaggucaacaagaucaagagcgcccugcuguccaccaacaaggccguggugagccucuccaacggcgucagcgugcugaccuucaaggugcuggaccucaagaacuacaucgacaagcagcugcugcccauccugaacaagcagagcugcuccauccccaacaucgagacggugaucgaguuccagcagaagaacaaccggcuccuggagaucacccgcgaguucagcgugaacgccggggucaccacccccguguccacguacaugcugaccaacagcgagcuccugucccugaucaacgacaugccgaucaccaacgaccagaagaagcucaugagcaacaacgugcagaucguccggcagcaguccuacagcaucaugugcaucaucaaggaggaggugcuggcguacgugguccagcugccccucuacggcgugaucgacacccccugcuggaagcugcacacgagcccccugugcaccaccaacaccaaggagggguccaacaucugccucacgcgcaccgaccggggcugguacugcgacaacgccggcagcgucuccuucuucccgcaggccgagaccugcaaggugcagagcaaccgcguguucugcgacaccaugaacucccugacgcugcccagcgagguaaaccucugcaacgucgacaucuucaaccccaaguacgacugcaagaucaugaccuccaagaccgacgugagcuccagcgugaucaccucccugggggccaucgucagcugcuacggcaagacgaagugcaccgccagcaacaagaaccgggggaucaucaagaccuucuccaacggcugcgacuacgugagcaacaagggcguggacaccguguccgucgggaacacccuguacugcgugaacaagcaggagggccagagccucuacgugaagggggagcccaucaucaacuucuacgacccgcuggucuuccccuccgacgaguucgacgcgagcaucucccaggugaacgagaagaucaaccagagccuggccuucauccgcaaguccgacgagcugcuccacaacgugaacgccggcaagagcacgaccaacaucaugaucaccaccaucaucaucgucaucaucgugauccugcugucccucaucgccguggggcugcugcucuacugcaaggcccggagcacgcccgucacccuguccaaggaccagcugagcggcaucaacaacaucgcguucuccaacugaggacuaguguccaccugucccuccugggcugcuggauugucucguuuuccugccaaauaaacaggaucagcgcuuuacagaucuaaaaaaaaaaaaaaaaaaaaaaaaaaaaaaaaaaaaaaaaaaaaaaaaaaaaaaaaaaaaaaaaugcaucccccccccccccccccccccccccccccccaaaggcucuuuucagagccaccagaauu

SEQ ID NO: 2440 - RNA, 1897 nt, Artificial Sequence
  mRNA product Design b-3 comprising derived and/or modified sequence from HRSV(A2)__F_DSCav1_mut2 (opt1)
gggagagucccgcagucggcguccagcggcucugcuuguucgugugugugucguugcaggccuuauucaagcuuaccauggagcugcucauccugaaggccaacgccaucaccaccauccugacggcggugaccuucugcuucgccagcggccagaacaucaccgaggaguucuaccaguccacgugcagcgccgucuccaagggguaccucggcgcccugcgcaccgggugguacaccagcgugaucaccaucgagcuguccaacaucaaggagaacaagugcaacggcaccgacgccaaggugaagcucaucaagcaggagcuggacaaguacaagaacgcggucacggaccugcagcuccugaugcagagcacccccgccaccggguccggcagcgccaucugcuccggcguggccgugugcaagguccugcaccucgagggggaggugaacaagaucaagagcgcgcugcuguccaccaacaaggccguggucagccucuccaacggcgugagcgugcugacguucaagguccuggaccucaagaacuacaucgacaagcagcugcugccgauccucaacaagcaguccugcagcauccccaacaucgagaccgugaucgaguuccagcagaagaacaaccggcugcuggagaucacccgcgaguucuccgugaacgccggggucaccacgcccgugagcaccuacaugcucaccaacuccgagcugcugagccucaucaacgacaugcccaucaccaacgaccagaagaagcugaugagcaacaacgugcagaucguccggcagcaguccuacagcaucaugugcaucaucaaggaggaggugcuggccuacgugguccagcucccgcuguacggcgugaucgacacgcccugcuggaagcugcacaccagcccccucugcaccaccaacacgaaggagggguccaacaucugccugacccgcaccgaccggggcugguacugcgacaacgccggcuccgugagcuucuucccccaggcggagaccugcaagguccaguccaaccgcguguucugcgacacgaugaacagccugacccucccguccgaggucaaccugugcaacguggacaucuucaaccccaaguacgacugcaagaucaugaccagcaagaccgacguguccagcuccgucaucacgagccugggggccaucguguccugcuacggcaagaccaagugcaccgccagcaacaagaaccgggggaucaucaagaccuucuccaacggcugcgacuacgugagcaacaagggcgucgacacgguguccguggggaacacccucuacugcgucaacaagcaggagggccagagccuguacgugaagggggagcccaucaucaacuucuacgacccccugguguucccgagcgacgaguucgacgccuccaucagccaggucaacgagaagaucaaccagucccucgccuucauccgcaagagcgacgagcugcugcacaacgugaacgcgggcaaguccaccaccaacaucaugaucaccacgaucaucaucgugaucaucgucauccuccugagccugaucgccguggggcuccugcuguacugcaaggcccgguccacccccgugacccugagcaaggaccagcucuccggcaucaacaacaucgccuucagcaacugaggacuaguguccaccugucccuccugggcugcuggauugucucguuuuccugccaaauaaacaggaucagcgcuuuacagaucuaaaaaaaaaaaaaaaaaaaaaaaaaaaaaaaaaaaaaaaaaaaaaaaaaaaaaaaaaaaaaaaaugcaucccccccccccccccccccccccccccccccaaaggcucuuuucagagccaccagaauu

SEQ ID NO: 2441 - RNA, 1897 nt, Artificial Sequence
  mRNA product Design b-3 comprising derived and/or modified sequence from HRSV(A2)__F_DSCav1_mut2 (opt2)
gggagagucccgcagucggcguccagcggcucugcuuguucgugugugugucguugcaggccuuauucaagcuuaccauggagcuccucauccucaaggccaacgccaucaccaccauccucaccgccgucaccuucugcuucgccuccggccagaacaucaccgaggaguucuaccaguccaccugcuccgccgucuccaagggcuaccucggcgcccuccgcaccggcugguacaccuccgucaucaccaucgagcucuccaacaucaaggagaacaagugcaacggcaccgacgccaaggucaagcucaucaagcaggagcucgacaaguacaagaacgccgucaccgaccuccagcuccucaugcaguccacccccgccaccggcuccggcuccgccaucugcuccggcgucgccgucugcaagguccuccaccucgagggcgaggucaacaagaucaaguccgcccuccucuccaccaacaaggccgucgucucccucuccaacggcgucuccguccucaccuucaagguccucgaccucaagaacuacaucgacaagcagcuccuccccauccucaacaagcaguccugcuccauccccaacaucgagaccgucaucgaguuccagcagaagaacaaccgccuccucgagaucacccgcgaguucuccgucaacgccggcgucaccacccccgucuccaccuacaugcucaccaacuccgagcuccucucccucaucaacgacaugcccaucaccaacgaccagaagaagcucauguccaacaacguccagaucguccgccagcaguccuacuccaucaugugcaucaucaaggaggagguccucgccuacgucguccagcucccccucuacggcgucaucgacacccccugcuggaagcuccacaccuccccccucugcaccaccaacaccaaggagggcuccaacaucugccucacccgcaccgaccgcggcugguacugcgacaacgccggcuccgucuccuucuucccccaggccgagaccugcaagguccaguccaaccgcgucuucugcgacaccaugaacucccucacccuccccuccgaggucaaccucugcaacgucgacaucuucaaccccaaguacgacugcaagaucaugaccuccaagaccgacgucuccuccuccgucaucaccucccucggcgccaucgucuccugcuacggcaagaccaagugcaccgccuccaacaagaaccgcggcaucaucaagaccuucuccaacggcugcgacuacgucuccaacaagggcgucgacaccgucuccgucggcaacacccucuacugcgucaacaagcaggagggccagucccucuacgucaagggcgagcccaucaucaacuucuacgacccccucgucuuccccuccgacgaguucgacgccuccaucucccaggucaacgagaagaucaaccagucccucgccuucauccgcaaguccgacgagcuccuccacaacgucaacgccggcaaguccaccaccaacaucaugaucaccaccaucaucaucgucaucaucgucauccuccucucccucaucgccgucggccuccuccucuacugcaaggcccgcuccacccccgucacccucuccaaggaccagcucuccggcaucaacaacaucgccuucuccaacugaggacuaguguccaccugucccuccugggcugcuggauugucucguuuuccugccaaauaaacaggaucagcgcuuuacagaucuaaaaaaaaaaaaaaaaaaaaaaaaaaaaaaaaaaaaaaaaaaaaaaaaaaaaaaaaaaaaaaaaugcaucccccccccccccccccccccccccccccccaaaggcucuuuucagagccaccagaauu

SEQ ID NO: 2442 - RNA, 1897 nt, Artificial Sequence
  mRNA product Design b-3 comprising derived and/or modified sequence from HRSV(A2)__F_DSCav1_mut2 (opt3)
gggagagucccgcagucggcguccagcggcucugcuuguucgugugugugucguugcaggccuuauucaagcuuaccauggagcugcucauccuuaaggccaacgcuauuaccacaauacugacugcagugacguucugcuuugccagcggccagaauaucaccgaagaguucuaccaauccacauguucugcggucucaaaaggguauuugggagcuuuaagaacugguugguacaccaguguuauuacaaucgaacugagcaacauuaaggagaauaaaugcaacggcaccgacgccaaggugaaacuaaucaagcaggaacucgauaaguauaaaaaugcaguaacugaccugcagcuucugaugcaguccacacccgccaccgggucuggaucggcuauauguucaggcguggcagucugcaagguguugcaccucgagggugagguuaacaaaaucaagagcgcccugcugaguacgaauaaagcuguggucucccucucuaacggggugagcguauuaacuuuuaagguucuggaucuuaagaauuacauugacaaacaauugcugccuauccuaaacaagcaguccuguucaauuccaaauaucgaaaccgugauagaguuccagcagaaaaacaauaggcuccuggaaauuacacgggaguuuagugucaacgccggagugacuaccccggugagcacauauaugcuuaccaauucugagcuguugucccucaucaacgauaugcccauuacgaacgaccaaaagaaacugaugucaaauaacguccagaucguucgccagcagagcuacaguaucaugugcauuauaaaggaagagguguuagcguauguagugcaacugccucucuacggcgucaucgauacuccauguuggaaacuucauacaucuccccugugcaccacuaauacaaaggaaggcuccaacauuuguuugacccgaacggaccgugggugguacugcgauaaugcaggaagcgugucguucuuuccucaggccgagaccuguaagguucagucuaacagaguguucugcgacacaaugaacucccuaacucugccaucagaagucaaucucugcaauguggauaucuuuaaccccaaauaugacuguaagauaaugaccaguaaaacagauguaagcuccucuguuauuacuagccugggugcuaucgugucaugcuacggcaagaccaaauguacagccaguaauaagaacagggggaucauuaagaccuucuccaauggaugcgacuaugucagcaacaaaggcguggacacugucucuguggguaauacgcuuuacuguguuaacaagcaagaggggcagucacuguaugugaaaggagagccuaucauuaacuuuuacgauccauugguauucccgagugacgaauuugaugcaagcauaucccaggucaaugagaagaucaaccagucucucgcuuucauucggaaaucggacgaacuguuacacaaugugaacgccggcaagagcacaaccaauaucaugaucacuaccauuauaaucguuauuaucgugauucugcuaucccucaucgcggucggccugcuuuuguauugcaaggcccgcucaacacccgugacccugaguaaagaucaacucucugggauaaacaauaucgcauucagcaacugaggacuaguguccaccugucccuccugggcugcuggauugucucguuuuccugccaaauaaacaggaucagcgcuuuacagaucuaaaaaaaaaaaaaaaaaaaaaaaaaaaaaaaaaaaaaaaaaaaaaaaaaaaaaaaaaaaaaaaaugcaucccccccccccccccccccccccccccccccaaaggcucuuuucagagccaccagaauu

SEQ ID NO: 2443 - RNA, 1897 nt, Artificial Sequence
  mRNA product Design b-3 comprising derived and/or modified sequence from HRSV(A2)__F_DSCav1_mut2 (opt4)
gggagagucccgcagucggcguccagcggcucugcuuguucgugugugugucguugcaggccuuauucaagcuuaccauggagcugcugauccugaaggccaacgccaucaccaccauccugaccgccgugaccuucugcuucgccagcggccagaacaucaccgaggaguucuaccagagcaccugcagcgccgugagcaagggcuaccugggcgcccugagaaccggcugguacaccagcgugaucaccaucgagcugagcaacaucaaggagaacaagugcaacggcaccgacgccaaggugaagcugaucaagcaggagcuggacaaguacaagaacgccgugaccgaccugcagcugcugaugcagagcacccccgccaccggcagcggcagcgccaucugcagcggcguggccgugugcaaggugcugcaccuggagggcgaggugaacaagaucaagagcgcccugcugagcaccaacaaggccguggugagccugagcaacggcgugagcgugcugaccuucaaggugcuggaccugaagaacuacaucgacaagcagcugcugcccauccugaacaagcagagcugcagcauccccaacaucgagaccgugaucgaguuccagcagaagaacaacagacugcuggagaucaccagagaguucagcgugaacgccggcgugaccacccccgugagcaccuacaugcugaccaacagcgagcugcugagccugaucaacgacaugcccaucaccaacgaccagaagaagcugaugagcaacaacgugcagaucgugagacagcagagcuacagcaucaugugcaucaucaaggaggaggugcuggccuacguggugcagcugccccuguacggcgugaucgacacccccugcuggaagcugcacaccagcccccugugcaccaccaacaccaaggagggcagcaacaucugccugaccagaaccgacagaggcugguacugcgacaacgccggcagcgugagcuucuucccccaggccgagaccugcaaggugcagagcaacagaguguucugcgacaccaugaacagccugacccugcccagcgaggugaaccugugcaacguggacaucuucaaccccaaguacgacugcaagaucaugaccagcaagaccgacgugagcagcagcgugaucaccagccugggcgccaucgugagcugcuacggcaagaccaagugcaccgccagcaacaagaacagaggcaucaucaagaccuucagcaacggcugcgacuacgugagcaacaagggcguggacaccgugagcgugggcaacacccuguacugcgugaacaagcaggagggccagagccuguacgugaagggcgagcccaucaucaacuucuacgacccccugguguuccccagcgacgaguucgacgccagcaucagccaggugaacgagaagaucaaccagagccuggccuucaucagaaagagcgacgagcugcugcacaacgugaacgccggcaagagcaccaccaacaucaugaucaccaccaucaucaucgugaucaucgugauccugcugagccugaucgccgugggccugcugcuguacugcaaggccagaagcacccccgugacccugagcaaggaccagcugagcggcaucaacaacaucgccuucagcaacugaggacuaguguccaccugucccuccugggcugcuggauugucucguuuuccugccaaauaaacaggaucagcgcuuuacagaucuaaaaaaaaaaaaaaaaaaaaaaaaaaaaaaaaaaaaaaaaaaaaaaaaaaaaaaaaaaaaaaaaugcaucccccccccccccccccccccccccccccccaaaggcucuuuucagagccaccagaauu

SEQ ID NO: 2444 - RNA, 1897 nt, Artificial Sequence
  mRNA product Design b-3 comprising derived and/or modified sequence from HRSV(A2)__F_DSCav1_mut2 (opt5)
gggagagucccgcagucggcguccagcggcucugcuuguucgugugugugucguugcaggccuuauucaagcuuaccauggagcugcucauccugaaggccaacgcuauuaccacaauccuuacggccgugaccuucugcuuugcgagcggccagaauauuacagaagaguucuaccaauccaccuguucugcugucagcaaaggguaucugggagcccucagaacaggcugguacaccuccguuaucacaauugaacugucuaacaucaaggagaauaaaugcaacgggaccgacgccaaggugaaacuuaucaagcaggaacuggauaaguauaaaaaugcugugacggaccuccagcugcugaugcagagcacccccgccacaggauccggcucugcuauuuguagcggggucgccgugugcaagguucuccaccuggagggagaggugaacaaaaucaaguccgcgcuucugagcaccaauaaagccgucgugucucucuccaacggcguuagcgugcugacauuuaagguccuugaucugaagaauuacauugacaaacaacuccugccuauccugaacaagcagucuuguuccauuccgaauaucgaaaccgugauugaguuccagcagaaaaacaaucggcuccuggaaaucacgcgcgaguuuagcgugaacgcuggcgucacaacccccguuucuacauauaugcuuaccaauuccgagcugcucagccugaucaacgauaugccuauuaccaacgaccaaaagaaacuuauguccaauaacgugcagaucgugagacagcagucuuacagcauuaugugcaucauuaaggaagagguccuggccuaugugguucaacucccccuguacggggugaucgauacaccuuguuggaaacugcauacgagcccccucugcaccacaaauaccaaggaaggauccaacaucugucugacacggaccgaccgcggcugguacugcgauaaugcugggucugucuccuucuuuccucaggccgagacguguaaggugcagagcaacagaguuuucugcgacacaaugaacucucuuacccugccgagcgaagugaaucucugcaaugucgauauuuuuaaccccaaauaugacuguaagaucaugaccuccaaaacagaugugucuagcuccgucauuaccagccugggagcgaucgugucuugcuacggcaagacaaaauguacggccuccaauaagaaccgggggauuaucaagaccuucagcaauggaugcgacuauguuucuaacaaaggcguggacacagucuccgugggcaauacccuuuacuguguuaacaagcaagaggggcagagccuguaugugaaaggagagccuaucauuaacuuuuacgauccccucgucuucccuuccgacgaauuugaugcuucuaucagccaggugaaugagaagauuaaccagucccuggccuucauccgcaaaucugacgaacugcuccacaaugugaacgcuggcaagagcacaaccaauauuaugaucacgaccauuaucaucguuauuaucgucauucugcuuucccugaucgccguggggcuccugcuguauugcaaggccagaagcacacccgugacccuuucuaaagaucaacucuccggaauuaacaauaucgcuuucagcaacugaggacuaguguccaccugucccuccugggcugcuggauugucucguuuuccugccaaauaaacaggaucagcgcuuuacagaucuaaaaaaaaaaaaaaaaaaaaaaaaaaaaaaaaaaaaaaaaaaaaaaaaaaaaaaaaaaaaaaaaugcaucccccccccccccccccccccccccccccccaaaggcucuuuucagagccaccagaauu

SEQ ID NO: 2445 - RNA, 1897 nt, Artificial Sequence
  mRNA product Design b-3 comprising derived and/or modified sequence from HRSV(A2)__F_DSCav1_mut2 (opt6)
gggagagucccgcagucggcguccagcggcucugcuuguucgugugugugucguugcaggccuuauucaagcuuaccauggaacuacuaauccuaaaagcaaacgcaauuacaacuauacuuaccgccguaacauuuugcuucgcaucugggcaaaacauuaccgaagaauuuuaucaaucaacaugcucagcagucuccaaaggauaccuuggagcauuaagaaccggcugguauaccuccguaauaacaauugaacuaucuaauauaaaagaaaauaaauguaauggaacugacgcaaaaguuaaacuaauaaaacaagaacucgacaaauacaaaaacgccgucacagaccuacaacuacuaaugcaaucaacccccgcaacaggaucaggauccgcaaucugcagcggcgucgcaguuugcaaaguccuacauuuagaaggagaaguaaacaaaauaaaaucugcucuccucucuacaaacaaagcaguagugucacuuucaaacggaguaucaguucuaacauucaaaguacuagaccuaaaaaauuacauagacaaacaacuacuuccaauucuaaacaaacaauccuguuccauacccaacauagaaacaguaauagaauuucaacaaaaaaauaacagacuccuagaaauuacaagagaauuuuccgucaaugcaggaguaacaaccccaguaucaaccuacauguuaacuaacucagaacucuuaucacuaauaaacgacaugccaaucacuaaugaccaaaaaaaacucaugucaaauaacguacaaauaguccgacaacaaucauacuccaucaugugcauuauaaaagaagaaguacuagcauacgucguccaauuaccacuauacggcgucauagacacaccauguuggaaacuccacacaucaccacuaugcacuacaaauacaaaagaaggcuccaacaucugccuaacaagaacagacagagguugguauugcgacaacgcaggaucaguaucauuuuucccccaagcagaaacauguaaaguacaaucaaauagagucuucugcgacaccaugaacucauuaacacuaccuucagaagucaaccuaugcaacguagacaucuucaacccuaaauaugacugcaaaaucaugaccagcaaaaccgacguuucaucuuccguaauaacaucacuaggcgcaauagucucauguuacggcaaaacaaaauguacagcaucaaauaaaaaccguggaauaauaaaaacauuuucuaaugguugugacuacguaagcaauaaaggaguagauacaguaucagucggcaacaccuuauacuguguaaacaaacaagaaggccaaaguuuauacgucaaaggagaacccaucaucaacuucuacgacccauuaguauucccaucagacgaauuugaugcaagcauuucacaagucaacgaaaaaaucaaucaaucauuagcauucauccgaaaaucagacgaauuauuacacaacguaaacgccggaaaaucaaccacuaauauaaugauaaccacaauaaucaucguaauaauaguaauacuucucucacuaaucgcagucggacuccuucuauacugcaaagcaagaucuacaccaguaacacuauccaaagaucaacuaaguggcauaaacaacauagcauuuucuaacuaaggacuaguguccaccugucccuccugggcugcuggauugucucguuuuccugccaaauaaacaggaucagcgcuuuacagaucuaaaaaaaaaaaaaaaaaaaaaaaaaaaaaaaaaaaaaaaaaaaaaaaaaaaaaaaaaaaaaaaaugcaucccccccccccccccccccccccccccccccaaaggcucuuuucagagccaccagaauu

SEQ ID NO: 2446 - RNA, 1897 nt, Artificial Sequence
  mRNA product Design b-3 comprising derived and/or modified sequence from HRSV(A2)__F_DSCav1_mut2 (opt11)
gggagagucccgcagucggcguccagcggcucugcuuguucgugugugugucguugcaggccuuauucaagcuuaccauggaacuccucauccuaaaagccaacgcgaucaccacaauccugacagccgucaccuucugcuucgccuccggccaaaacaucaccgaagaguucuaccaauccacaugcuccgccgucuccaagggcuaccugggcgcacuucguacaggcugguacaccuccguaauaaccaucgaacucuccaacaucaaagaaaacaaaugcaacggcacagacgcaaaagucaaacucaucaagcaagaacuugacaaauacaaaaaugcagucaccgaccuucaacuccucaugcaaucuacccccgccacaggcuccggcuccgcuaucugcuccggcgucgccgucugcaaaguccuccaccucgaaggugaaguaaacaaaauaaaauccgcccuccucuccaccaacaaagccgucgucucccuaucaaacggcgucuccgugcucaccuucaagguucucgaccugaaaaacuacauagacaaacagcuccuaccaauccuuaacaaacagagcugcuccauuccgaauaucgaaacgguaaucgaauuucaacagaaaaacaaccgccuccucgaaauaacgcgagaguucuccguaaacgcuggcgucaccacacccgucagcaccuacaugcuaacgaacuccgaacucuugucgcucaucaacgacaugcccauaaccaacgaccaaaagaaacuaauguccaauaacguacaaaucguacgccaacaaucuuacuccaucaugugcaucauaaaagaagaaguacuagcuuacgucguccaacucccacuguacggagucaucgacacccccugcuggaaacuccacaccucuccccucugcaccaccaacaccaaagagggcuccaacauuugccugacacgcaccgaccgcggcugguacugcgacaacgcaggcuccgucucguucuucccccaagccgaaaccugcaaaguccaauccaaccgcgucuucugcgacaccaugaacucccucacccuccccuccgaagucaaucuaugcaacguagacaucuucaacccgaaauaugacugcaaaauuaugacaucuaaaaccgacguguccuccucagucaucacuucccuaggagccaucguuuccuguuacggcaagaccaaaugcaccgccagcaacaaaaaccgaggcaucaucaaaaccuucuccaacggaugugacuaugucuccaacaagggcgucgacaccgucagcgucggcaacacccucuacugcgucaacaaacaagaaggccaaucccucuacgucaaaggagagcccauaaucaacuucuacgacccccucgucuucccauccgacgaguucgacgccucaaucucccaagucaacgagaaaaucaaccaauccuuagccuucauccguaaguccgacgaacuccuucacaacgucaacgccgguaaaucuaccaccaacaucaugauaacaacaauaauuaucgucaucaucgucauccuccuuucccucaucgcggucgggcuauugcucuacugcaaagcccgguccaccccaguaacccucucuaaagaccaacucagcggaaucaauaacauagccuucagcaauuaaggacuaguguccaccugucccuccugggcugcuggauugucucguuuuccugccaaauaaacaggaucagcgcuuuacagaucuaaaaaaaaaaaaaaaaaaaaaaaaaaaaaaaaaaaaaaaaaaaaaaaaaaaaaaaaaaaaaaaaugcaucccccccccccccccccccccccccccccccaaaggcucuuuucagagccaccagaauu

SEQ ID NO: 2447 - RNA, 1948 nt, Artificial Sequence
  mRNA product Design b-4 comprising derived and/or modified sequence from HRSV(A2)__F_DSCav1_mut2 (opt1)
gggagagucccgcagucggcguccagcggcucugcuuguucgugugugugucguugcaggccuuauucaagcuuaccauggagcugcucauccugaaggccaacgccaucaccaccauccugacggcggugaccuucugcuucgccagcggccagaacaucaccgaggaguucuaccaguccacgugcagcgccgucuccaagggguaccucggcgcccugcggaccggcugguacaccuccgugaucaccaucgagcugagcaacaucaaggagaacaagugcaacgggaccgacgccaaggugaagcucaucaagcaggagcuggacaaguacaagaacgcggucacggaccugcagcuccugaugcaguccaccccggcaaccggcuccggcuccgccaucugcagcggcgucgccgugugcaaggugcugcaccucgagggggaggucaacaagaucaagagcgcccugcuguccaccaacaaggccguggugagccucuccaacggcgucagcgugcugaccuucaaggugcuggaccucaagaacuacaucgacaagcagcugcugcccauccugaacaagcagagcugcuccauccccaacaucgagacggugaucgaguuccagcagaagaacaaccggcuccuggagaucacccgcgaguucagcgugaacgccggggucaccacccccguguccacguacaugcugaccaacagcgagcuccugucccugaucaacgacaugccgaucaccaacgaccagaagaagcucaugagcaacaacgugcagaucguccggcagcaguccuacagcaucaugugcaucaucaaggaggaggugcuggcguacgugguccagcugccccucuacggcgugaucgacacccccugcuggaagcugcacacgagcccccugugcaccaccaacaccaaggagggguccaacaucugccucacgcgcaccgaccggggcugguacugcgacaacgccggcagcgucuccuucuucccgcaggccgagaccugcaaggugcagagcaaccgcguguucugcgacaccaugaacucccugacgcugcccagcgagguaaaccucugcaacgucgacaucuucaaccccaaguacgacugcaagaucaugaccuccaagaccgacgugagcuccagcgugaucaccucccugggggccaucgucagcugcuacggcaagacgaagugcaccgccagcaacaagaaccgggggaucaucaagaccuucuccaacggcugcgacuacgugagcaacaagggcguggacaccguguccgucgggaacacccuguacugcgugaacaagcaggagggccagagccucuacgugaagggggagcccaucaucaacuucuacgacccgcuggucuuccccuccgacgaguucgacgcgagcaucucccaggugaacgagaagaucaaccagagccuggccuucauccgcaaguccgacgagcugcuccacaacgugaacgccggcaagagcacgaccaacaucaugaucaccaccaucaucaucgucaucaucgugauccugcugucccucaucgccguggggcugcugcucuacugcaaggcccggagcacgcccgucacccuguccaaggaccagcugagcggcaucaacaacaucgcguucuccaacugaggacuaguaauaaggaaacuguaugaaugucugugggcaggaagugaagagauccuucuguaaagguuuuuggaauuaugucugcugaauaauaaacuuuuuugaaauaauaaaucugguagaaaaaugagaucuaaaaaaaaaaaaaaaaaaaaaaaaaaaaaaaaaaaaaaaaaaaaaaaaaaaaaaaaaaaaaaaaugcaucccccccccccccccccccccccccccccccaaaggcucuuuucagagccaccagaauu

SEQ ID NO: 2448 - RNA, 1948 nt, Artificial Sequence
  mRNA product Design b-4 comprising derived and/or modified sequence from HRSV(A2)__F_DSCav1_mut2 (opt1)
gggagagucccgcagucggcguccagcggcucugcuuguucgugugugugucguugcaggccuuauucaagcuuaccauggagcugcucauccugaaggccaacgccaucaccaccauccugacggcggugaccuucugcuucgccagcggccagaacaucaccgaggaguucuaccaguccacgugcagcgccgucuccaagggguaccucggcgcccugcgcaccgggugguacaccagcgugaucaccaucgagcuguccaacaucaaggagaacaagugcaacggcaccgacgccaaggugaagcucaucaagcaggagcuggacaaguacaagaacgcggucacggaccugcagcuccugaugcagagcacccccgccaccggguccggcagcgccaucugcuccggcguggccgugugcaagguccugcaccucgagggggaggugaacaagaucaagagcgcgcugcuguccaccaacaaggccguggucagccucuccaacggcgugagcgugcugacguucaagguccuggaccucaagaacuacaucgacaagcagcugcugccgauccucaacaagcaguccugcagcauccccaacaucgagaccgugaucgaguuccagcagaagaacaaccggcugcuggagaucacccgcgaguucuccgugaacgccggggucaccacgcccgugagcaccuacaugcucaccaacuccgagcugcugagccucaucaacgacaugcccaucaccaacgaccagaagaagcugaugagcaacaacgugcagaucguccggcagcaguccuacagcaucaugugcaucaucaaggaggaggugcuggccuacgugguccagcucccgcuguacggcgugaucgacacgcccugcuggaagcugcacaccagcccccucugcaccaccaacacgaaggagggguccaacaucugccugacccgcaccgaccggggcugguacugcgacaacgccggcuccgugagcuucuucccccaggcggagaccugcaagguccaguccaaccgcguguucugcgacacgaugaacagccugacccucccguccgaggucaaccugugcaacguggacaucuucaaccccaaguacgacugcaagaucaugaccagcaagaccgacguguccagcuccgucaucacgagccugggggccaucguguccugcuacggcaagaccaagugcaccgccagcaacaagaaccgggggaucaucaagaccuucuccaacggcugcgacuacgugagcaacaagggcgucgacacgguguccguggggaacacccucuacugcgucaacaagcaggagggccagagccuguacgugaagggggagcccaucaucaacuucuacgacccccugguguucccgagcgacgaguucgacgccuccaucagccaggucaacgagaagaucaaccagucccucgccuucauccgcaagagcgacgagcugcugcacaacgugaacgcgggcaaguccaccaccaacaucaugaucaccacgaucaucaucgugaucaucgucauccuccugagccugaucgccguggggcuccugcuguacugcaaggcccgguccacccccgugacccugagcaaggaccagcucuccggcaucaacaacaucgccuucagcaacugaggacuaguaauaaggaaacuguaugaaugucugugggcaggaagugaagagauccuucuguaaagguuuuuggaauuaugucugcugaauaauaaacuuuuuugaaauaauaaaucugguagaaaaaugagaucuaaaaaaaaaaaaaaaaaaaaaaaaaaaaaaaaaaaaaaaaaaaaaaaaaaaaaaaaaaaaaaaaugcaucccccccccccccccccccccccccccccccaaaggcucuuuucagagccaccagaauu

SEQ ID NO: 2449 - RNA, 1948 nt, Artificial Sequence
  mRNA product Design b-4 comprising derived and/or modified sequence from HRSV(A2)__F_DSCav1_mut2 (opt2)
gggagagucccgcagucggcguccagcggcucugcuuguucgugugugugucguugcaggccuuauucaagcuuaccauggagcuccucauccucaaggccaacgccaucaccaccauccucaccgccgucaccuucugcuucgccuccggccagaacaucaccgaggaguucuaccaguccaccugcuccgccgucuccaagggcuaccucggcgcccuccgcaccggcugguacaccuccgucaucaccaucgagcucuccaacaucaaggagaacaagugcaacggcaccgacgccaaggucaagcucaucaagcaggagcucgacaaguacaagaacgccgucaccgaccuccagcuccucaugcaguccacccccgccaccggcuccggcuccgccaucugcuccggcgucgccgucugcaagguccuccaccucgagggcgaggucaacaagaucaaguccgcccuccucuccaccaacaaggccgucgucucccucuccaacggcgucuccguccucaccuucaagguccucgaccucaagaacuacaucgacaagcagcuccuccccauccucaacaagcaguccugcuccauccccaacaucgagaccgucaucgaguuccagcagaagaacaaccgccuccucgagaucacccgcgaguucuccgucaacgccggcgucaccacccccgucuccaccuacaugcucaccaacuccgagcuccucucccucaucaacgacaugcccaucaccaacgaccagaagaagcucauguccaacaacguccagaucguccgccagcaguccuacuccaucaugugcaucaucaaggaggagguccucgccuacgucguccagcucccccucuacggcgucaucgacacccccugcuggaagcuccacaccuccccccucugcaccaccaacaccaaggagggcuccaacaucugccucacccgcaccgaccgcggcugguacugcgacaacgccggcuccgucuccuucuucccccaggccgagaccugcaagguccaguccaaccgcgucuucugcgacaccaugaacucccucacccuccccuccgaggucaaccucugcaacgucgacaucuucaaccccaaguacgacugcaagaucaugaccuccaagaccgacgucuccuccuccgucaucaccucccucggcgccaucgucuccugcuacggcaagaccaagugcaccgccuccaacaagaaccgcggcaucaucaagaccuucuccaacggcugcgacuacgucuccaacaagggcgucgacaccgucuccgucggcaacacccucuacugcgucaacaagcaggagggccagucccucuacgucaagggcgagcccaucaucaacuucuacgacccccucgucuuccccuccgacgaguucgacgccuccaucucccaggucaacgagaagaucaaccagucccucgccuucauccgcaaguccgacgagcuccuccacaacgucaacgccggcaaguccaccaccaacaucaugaucaccaccaucaucaucgucaucaucgucauccuccucucccucaucgccgucggccuccuccucuacugcaaggcccgcuccacccccgucacccucuccaaggaccagcucuccggcaucaacaacaucgccuucuccaacugaggacuaguaauaaggaaacuguaugaaugucugugggcaggaagugaagagauccuucuguaaagguuuuuggaauuaugucugcugaauaauaaacuuuuuugaaauaauaaaucugguagaaaaaugagaucuaaaaaaaaaaaaaaaaaaaaaaaaaaaaaaaaaaaaaaaaaaaaaaaaaaaaaaaaaaaaaaaaugcaucccccccccccccccccccccccccccccccaaaggcucuuuucagagccaccagaauu

SEQ ID NO: 2450 - RNA, 1948 nt, Artificial Sequence
  mRNA product Design b-4 comprising derived and/or modified sequence from HRSV(A2)__F_DSCav1_mut2 (opt3)
gggagagucccgcagucggcguccagcggcucugcuuguucgugugugugucguugcaggccuuauucaagcuuaccauggagcugcucauccuuaaggccaacgcuauuaccacaauacugacugcagugacguucugcuuugccagcggccagaauaucaccgaagaguucuaccaauccacauguucugcggucucaaaaggguauuugggagcuuuaagaacugguugguacaccaguguuauuacaaucgaacugagcaacauuaaggagaauaaaugcaacggcaccgacgccaaggugaaacuaaucaagcaggaacucgauaaguauaaaaaugcaguaacugaccugcagcuucugaugcaguccacacccgccaccgggucuggaucggcuauauguucaggcguggcagucugcaagguguugcaccucgagggugagguuaacaaaaucaagagcgcccugcugaguacgaauaaagcuguggucucccucucuaacggggugagcguauuaacuuuuaagguucuggaucuuaagaauuacauugacaaacaauugcugccuauccuaaacaagcaguccuguucaauuccaaauaucgaaaccgugauagaguuccagcagaaaaacaauaggcuccuggaaauuacacgggaguuuagugucaacgccggagugacuaccccggugagcacauauaugcuuaccaauucugagcuguugucccucaucaacgauaugcccauuacgaacgaccaaaagaaacugaugucaaauaacguccagaucguucgccagcagagcuacaguaucaugugcauuauaaaggaagagguguuagcguauguagugcaacugccucucuacggcgucaucgauacuccauguuggaaacuucauacaucuccccugugcaccacuaauacaaaggaaggcuccaacauuuguuugacccgaacggaccgugggugguacugcgauaaugcaggaagcgugucguucuuuccucaggccgagaccuguaagguucagucuaacagaguguucugcgacacaaugaacucccuaacucugccaucagaagucaaucucugcaauguggauaucuuuaaccccaaauaugacuguaagauaaugaccaguaaaacagauguaagcuccucuguuauuacuagccugggugcuaucgugucaugcuacggcaagaccaaauguacagccaguaauaagaacagggggaucauuaagaccuucuccaauggaugcgacuaugucagcaacaaaggcguggacacugucucuguggguaauacgcuuuacuguguuaacaagcaagaggggcagucacuguaugugaaaggagagccuaucauuaacuuuuacgauccauugguauucccgagugacgaauuugaugcaagcauaucccaggucaaugagaagaucaaccagucucucgcuuucauucggaaaucggacgaacuguuacacaaugugaacgccggcaagagcacaaccaauaucaugaucacuaccauuauaaucguuauuaucgugauucugcuaucccucaucgcggucggccugcuuuuguauugcaaggcccgcucaacacccgugacccugaguaaagaucaacucucugggauaaacaauaucgcauucagcaacugaggacuaguaauaaggaaacuguaugaaugucugugggcaggaagugaagagauccuucuguaaagguuuuuggaauuaugucugcugaauaauaaacuuuuuugaaauaauaaaucugguagaaaaaugagaucuaaaaaaaaaaaaaaaaaaaaaaaaaaaaaaaaaaaaaaaaaaaaaaaaaaaaaaaaaaaaaaaaugcaucccccccccccccccccccccccccccccccaaaggcucuuuucagagccaccagaauu

SEQ ID NO: 2451 - RNA, 1948 nt, Artificial Sequence
  mRNA product Design b-4 comprising derived and/or modified sequence from HRSV(A2)__F_DSCav1_mut2 (opt4)
gggagagucccgcagucggcguccagcggcucugcuuguucgugugugugucguugcaggccuuauucaagcuuaccauggagcugcugauccugaaggccaacgccaucaccaccauccugaccgccgugaccuucugcuucgccagcggccagaacaucaccgaggaguucuaccagagcaccugcagcgccgugagcaagggcuaccugggcgcccugagaaccggcugguacaccagcgugaucaccaucgagcugagcaacaucaaggagaacaagugcaacggcaccgacgccaaggugaagcugaucaagcaggagcuggacaaguacaagaacgccgugaccgaccugcagcugcugaugcagagcacccccgccaccggcagcggcagcgccaucugcagcggcguggccgugugcaaggugcugcaccuggagggcgaggugaacaagaucaagagcgcccugcugagcaccaacaaggccguggugagccugagcaacggcgugagcgugcugaccuucaaggugcuggaccugaagaacuacaucgacaagcagcugcugcccauccugaacaagcagagcugcagcauccccaacaucgagaccgugaucgaguuccagcagaagaacaacagacugcuggagaucaccagagaguucagcgugaacgccggcgugaccacccccgugagcaccuacaugcugaccaacagcgagcugcugagccugaucaacgacaugcccaucaccaacgaccagaagaagcugaugagcaacaacgugcagaucgugagacagcagagcuacagcaucaugugcaucaucaaggaggaggugcuggccuacguggugcagcugccccuguacggcgugaucgacacccccugcuggaagcugcacaccagcccccugugcaccaccaacaccaaggagggcagcaacaucugccugaccagaaccgacagaggcugguacugcgacaacgccggcagcgugagcuucuucccccaggccgagaccugcaaggugcagagcaacagaguguucugcgacaccaugaacagccugacccugcccagcgaggugaaccugugcaacguggacaucuucaaccccaaguacgacugcaagaucaugaccagcaagaccgacgugagcagcagcgugaucaccagccugggcgccaucgugagcugcuacggcaagaccaagugcaccgccagcaacaagaacagaggcaucaucaagaccuucagcaacggcugcgacuacgugagcaacaagggcguggacaccgugagcgugggcaacacccuguacugcgugaacaagcaggagggccagagccuguacgugaagggcgagcccaucaucaacuucuacgacccccugguguuccccagcgacgaguucgacgccagcaucagccaggugaacgagaagaucaaccagagccuggccuucaucagaaagagcgacgagcugcugcacaacgugaacgccggcaagagcaccaccaacaucaugaucaccaccaucaucaucgugaucaucgugauccugcugagccugaucgccgugggccugcugcuguacugcaaggccagaagcacccccgugacccugagcaaggaccagcugagcggcaucaacaacaucgccuucagcaacugaggacuaguaauaaggaaacuguaugaaugucugugggcaggaagugaagagauccuucuguaaagguuuuuggaauuaugucugcugaauaauaaacuuuuuugaaauaauaaaucugguagaaaaaugagaucuaaaaaaaaaaaaaaaaaaaaaaaaaaaaaaaaaaaaaaaaaaaaaaaaaaaaaaaaaaaaaaaaugcaucccccccccccccccccccccccccccccccaaaggcucuuuucagagccaccagaauu

SEQ ID NO: 2452 - RNA, 1948 nt, Artificial Sequence
  mRNA product Design b-4 comprising derived and/or modified sequence from HRSV(A2)__F_DSCav1_mut2 (opt5)
gggagagucccgcagucggcguccagcggcucugcuuguucgugugugugucguugcaggccuuauucaagcuuaccauggagcugcucauccugaaggccaacgcuauuaccacaauccuuacggccgugaccuucugcuuugcgagcggccagaauauuacagaagaguucuaccaauccaccuguucugcugucagcaaaggguaucugggagcccucagaacaggcugguacaccuccguuaucacaauugaacugucuaacaucaaggagaauaaaugcaacgggaccgacgccaaggugaaacuuaucaagcaggaacuggauaaguauaaaaaugcugugacggaccuccagcugcugaugcagagcacccccgccacaggauccggcucugcuauuuguagcggggucgccgugugcaagguucuccaccuggagggagaggugaacaaaaucaaguccgcgcuucugagcaccaauaaagccgucgugucucucuccaacggcguuagcgugcugacauuuaagguccuugaucugaagaauuacauugacaaacaacuccugccuauccugaacaagcagucuuguuccauuccgaauaucgaaaccgugauugaguuccagcagaaaaacaaucggcuccuggaaaucacgcgcgaguuuagcgugaacgcuggcgucacaacccccguuucuacauauaugcuuaccaauuccgagcugcucagccugaucaacgauaugccuauuaccaacgaccaaaagaaacuuauguccaauaacgugcagaucgugagacagcagucuuacagcauuaugugcaucauuaaggaagagguccuggccuaugugguucaacucccccuguacggggugaucgauacaccuuguuggaaacugcauacgagcccccucugcaccacaaauaccaaggaaggauccaacaucugucugacacggaccgaccgcggcugguacugcgauaaugcugggucugucuccuucuuuccucaggccgagacguguaaggugcagagcaacagaguuuucugcgacacaaugaacucucuuacccugccgagcgaagugaaucucugcaaugucgauauuuuuaaccccaaauaugacuguaagaucaugaccuccaaaacagaugugucuagcuccgucauuaccagccugggagcgaucgugucuugcuacggcaagacaaaauguacggccuccaauaagaaccgggggauuaucaagaccuucagcaauggaugcgacuauguuucuaacaaaggcguggacacagucuccgugggcaauacccuuuacuguguuaacaagcaagaggggcagagccuguaugugaaaggagagccuaucauuaacuuuuacgauccccucgucuucccuuccgacgaauuugaugcuucuaucagccaggugaaugagaagauuaaccagucccuggccuucauccgcaaaucugacgaacugcuccacaaugugaacgcuggcaagagcacaaccaauauuaugaucacgaccauuaucaucguuauuaucgucauucugcuuucccugaucgccguggggcuccugcuguauugcaaggccagaagcacacccgugacccuuucuaaagaucaacucuccggaauuaacaauaucgcuuucagcaacugaggacuaguaauaaggaaacuguaugaaugucugugggcaggaagugaagagauccuucuguaaagguuuuuggaauuaugucugcugaauaauaaacuuuuuugaaauaauaaaucugguagaaaaaugagaucuaaaaaaaaaaaaaaaaaaaaaaaaaaaaaaaaaaaaaaaaaaaaaaaaaaaaaaaaaaaaaaaaugcaucccccccccccccccccccccccccccccccaaaggcucuuuucagagccaccagaauu

SEQ ID NO: 2453 - RNA, 1948 nt, Artificial Sequence
  mRNA product Design b-4 comprising derived and/or modified sequence from HRSV(A2)__F_DSCav1_mut2 (opt6)
gggagagucccgcagucggcguccagcggcucugcuuguucgugugugugucguugcaggccuuauucaagcuuaccauggaacuacuaauccuaaaagcaaacgcaauuacaacuauacuuaccgccguaacauuuugcuucgcaucugggcaaaacauuaccgaagaauuuuaucaaucaacaugcucagcagucuccaaaggauaccuuggagcauuaagaaccggcugguauaccuccguaauaacaauugaacuaucuaauauaaaagaaaauaaauguaauggaacugacgcaaaaguuaaacuaauaaaacaagaacucgacaaauacaaaaacgccgucacagaccuacaacuacuaaugcaaucaacccccgcaacaggaucaggauccgcaaucugcagcggcgucgcaguuugcaaaguccuacauuuagaaggagaaguaaacaaaauaaaaucugcucuccucucuacaaacaaagcaguagugucacuuucaaacggaguaucaguucuaacauucaaaguacuagaccuaaaaaauuacauagacaaacaacuacuuccaauucuaaacaaacaauccuguuccauacccaacauagaaacaguaauagaauuucaacaaaaaaauaacagacuccuagaaauuacaagagaauuuuccgucaaugcaggaguaacaaccccaguaucaaccuacauguuaacuaacucagaacucuuaucacuaauaaacgacaugccaaucacuaaugaccaaaaaaaacucaugucaaauaacguacaaauaguccgacaacaaucauacuccaucaugugcauuauaaaagaagaaguacuagcauacgucguccaauuaccacuauacggcgucauagacacaccauguuggaaacuccacacaucaccacuaugcacuacaaauacaaaagaaggcuccaacaucugccuaacaagaacagacagagguugguauugcgacaacgcaggaucaguaucauuuuucccccaagcagaaacauguaaaguacaaucaaauagagucuucugcgacaccaugaacucauuaacacuaccuucagaagucaaccuaugcaacguagacaucuucaacccuaaauaugacugcaaaaucaugaccagcaaaaccgacguuucaucuuccguaauaacaucacuaggcgcaauagucucauguuacggcaaaacaaaauguacagcaucaaauaaaaaccguggaauaauaaaaacauuuucuaaugguugugacuacguaagcaauaaaggaguagauacaguaucagucggcaacaccuuauacuguguaaacaaacaagaaggccaaaguuuauacgucaaaggagaacccaucaucaacuucuacgacccauuaguauucccaucagacgaauuugaugcaagcauuucacaagucaacgaaaaaaucaaucaaucauuagcauucauccgaaaaucagacgaauuauuacacaacguaaacgccggaaaaucaaccacuaauauaaugauaaccacaauaaucaucguaauaauaguaauacuucucucacuaaucgcagucggacuccuucuauacugcaaagcaagaucuacaccaguaacacuauccaaagaucaacuaaguggcauaaacaacauagcauuuucuaacuaaggacuaguaauaaggaaacuguaugaaugucugugggcaggaagugaagagauccuucuguaaagguuuuuggaauuaugucugcugaauaauaaacuuuuuugaaauaauaaaucugguagaaaaaugagaucuaaaaaaaaaaaaaaaaaaaaaaaaaaaaaaaaaaaaaaaaaaaaaaaaaaaaaaaaaaaaaaaaugcaucccccccccccccccccccccccccccccccaaaggcucuuuucagagccaccagaauu

SEQ ID NO: 2454 - RNA, 1948 nt, Artificial Sequence
  mRNA product Design b-4 comprising derived and/or modified sequence from HRSV(A2)__F_DSCav1_mut2 (opt11)
gggagagucccgcagucggcguccagcggcucugcuuguucgugugugugucguugcaggccuuauucaagcuuaccauggaacuccucauccuaaaagccaacgcgaucaccacaauccugacagccgucaccuucugcuucgccuccggccaaaacaucaccgaagaguucuaccaauccacaugcuccgccgucuccaagggcuaccugggcgcacuucguacaggcugguacaccuccguaauaaccaucgaacucuccaacaucaaagaaaacaaaugcaacggcacagacgcaaaagucaaacucaucaagcaagaacuugacaaauacaaaaaugcagucaccgaccuucaacuccucaugcaaucuacccccgccacaggcuccggcuccgcuaucugcuccggcgucgccgucugcaaaguccuccaccucgaaggugaaguaaacaaaauaaaauccgcccuccucuccaccaacaaagccgucgucucccuaucaaacggcgucuccgugcucaccuucaagguucucgaccugaaaaacuacauagacaaacagcuccuaccaauccuuaacaaacagagcugcuccauuccgaauaucgaaacgguaaucgaauuucaacagaaaaacaaccgccuccucgaaauaacgcgagaguucuccguaaacgcuggcgucaccacacccgucagcaccuacaugcuaacgaacuccgaacucuugucgcucaucaacgacaugcccauaaccaacgaccaaaagaaacuaauguccaauaacguacaaaucguacgccaacaaucuuacuccaucaugugcaucauaaaagaagaaguacuagcuuacgucguccaacucccacuguacggagucaucgacacccccugcuggaaacuccacaccucuccccucugcaccaccaacaccaaagagggcuccaacauuugccugacacgcaccgaccgcggcugguacugcgacaacgcaggcuccgucucguucuucccccaagccgaaaccugcaaaguccaauccaaccgcgucuucugcgacaccaugaacucccucacccuccccuccgaagucaaucuaugcaacguagacaucuucaacccgaaauaugacugcaaaauuaugacaucuaaaaccgacguguccuccucagucaucacuucccuaggagccaucguuuccuguuacggcaagaccaaaugcaccgccagcaacaaaaaccgaggcaucaucaaaaccuucuccaacggaugugacuaugucuccaacaagggcgucgacaccgucagcgucggcaacacccucuacugcgucaacaaacaagaaggccaaucccucuacgucaaaggagagcccauaaucaacuucuacgacccccucgucuucccauccgacgaguucgacgccucaaucucccaagucaacgagaaaaucaaccaauccuuagccuucauccguaaguccgacgaacuccuucacaacgucaacgccgguaaaucuaccaccaacaucaugauaacaacaauaauuaucgucaucaucgucauccuccuuucccucaucgcggucgggcuauugcucuacugcaaagcccgguccaccccaguaacccucucuaaagaccaacucagcggaaucaauaacauagccuucagcaauuaaggacuaguaauaaggaaacuguaugaaugucugugggcaggaagugaagagauccuucuguaaagguuuuuggaauuaugucugcugaauaauaaacuuuuuugaaauaauaaaucugguagaaaaaugagaucuaaaaaaaaaaaaaaaaaaaaaaaaaaaaaaaaaaaaaaaaaaaaaaaaaaaaaaaaaaaaaaaaugcaucccccccccccccccccccccccccccccccaaaggcucuuuucagagccaccagaauu

SEQ ID NO: 2455 - RNA, 2010 nt, Artificial Sequence
  mRNA product Design b-5 comprising derived and/or modified sequence from HRSV(A2)__F_DSCav1_mut2 (opt1)
gggagacuccugucgggcggaaguaggaggaguagaguuuaaaaacaguacucuuuuuccgguucgggacguaguugaagcaacgacaagccggauaaccgcucuugagacaggaagcuuaccauggagcugcucauccugaaggccaacgccaucaccaccauccugacggcggugaccuucugcuucgccagcggccagaacaucaccgaggaguucuaccaguccacgugcagcgccgucuccaagggguaccucggcgcccugcggaccggcugguacaccuccgugaucaccaucgagcugagcaacaucaaggagaacaagugcaacgggaccgacgccaaggugaagcucaucaagcaggagcuggacaaguacaagaacgcggucacggaccugcagcuccugaugcaguccaccccggcaaccggcuccggcuccgccaucugcagcggcgucgccgugugcaaggugcugcaccucgagggggaggucaacaagaucaagagcgcccugcuguccaccaacaaggccguggugagccucuccaacggcgucagcgugcugaccuucaaggugcuggaccucaagaacuacaucgacaagcagcugcugcccauccugaacaagcagagcugcuccauccccaacaucgagacggugaucgaguuccagcagaagaacaaccggcuccuggagaucacccgcgaguucagcgugaacgccggggucaccacccccguguccacguacaugcugaccaacagcgagcuccugucccugaucaacgacaugccgaucaccaacgaccagaagaagcucaugagcaacaacgugcagaucguccggcagcaguccuacagcaucaugugcaucaucaaggaggaggugcuggcguacgugguccagcugccccucuacggcgugaucgacacccccugcuggaagcugcacacgagcccccugugcaccaccaacaccaaggagggguccaacaucugccucacgcgcaccgaccggggcugguacugcgacaacgccggcagcgucuccuucuucccgcaggccgagaccugcaaggugcagagcaaccgcguguucugcgacaccaugaacucccugacgcugcccagcgagguaaaccucugcaacgucgacaucuucaaccccaaguacgacugcaagaucaugaccuccaagaccgacgugagcuccagcgugaucaccucccugggggccaucgucagcugcuacggcaagacgaagugcaccgccagcaacaagaaccgggggaucaucaagaccuucuccaacggcugcgacuacgugagcaacaagggcguggacaccguguccgucgggaacacccuguacugcgugaacaagcaggagggccagagccucuacgugaagggggagcccaucaucaacuucuacgacccgcuggucuuccccuccgacgaguucgacgcgagcaucucccaggugaacgagaagaucaaccagagccuggccuucauccgcaaguccgacgagcugcuccacaacgugaacgccggcaagagcacgaccaacaucaugaucaccaccaucaucaucgucaucaucgugauccugcugucccucaucgccguggggcugcugcucuacugcaaggcccggagcacgcccgucacccuguccaaggaccagcugagcggcaucaacaacaucgcguucuccaacugaggacuaguacuggcugcaucucccuuuccucuguccuccauccuucucccaggauggugaagggggaccugguacccagugauccccaccccaggauccuaaaucaugacuuaccugcuaauaaaaacucauuggaaaagugagaagaucuaaaaaaaaaaaaaaaaaaaaaaaaaaaaaaaaaaaaaaaaaaaaaaaaaaaaaaaaaaaaaaaaugcaucccccccccccccccccccccccccccccccaaaggcucuuuucagagccaccagaauu

SEQ ID NO: 2456 - RNA, 2010 nt, Artificial Sequence
  mRNA product Design b-5 comprising derived and/or modified sequence from HRSV(A2)__F_DSCav1_mut2 (opt1)
gggagacuccugucgggcggaaguaggaggaguagaguuuaaaaacaguacucuuuuuccgguucgggacguaguugaagcaacgacaagccggauaaccgcucuugagacaggaagcuuaccauggagcugcucauccugaaggccaacgccaucaccaccauccugacggcggugaccuucugcuucgccagcggccagaacaucaccgaggaguucuaccaguccacgugcagcgccgucuccaagggguaccucggcgcccugcgcaccgggugguacaccagcgugaucaccaucgagcuguccaacaucaaggagaacaagugcaacggcaccgacgccaaggugaagcucaucaagcaggagcuggacaaguacaagaacgcggucacggaccugcagcuccugaugcagagcacccccgccaccggguccggcagcgccaucugcuccggcguggccgugugcaagguccugcaccucgagggggaggugaacaagaucaagagcgcgcugcuguccaccaacaaggccguggucagccucuccaacggcgugagcgugcugacguucaagguccuggaccucaagaacuacaucgacaagcagcugcugccgauccucaacaagcaguccugcagcauccccaacaucgagaccgugaucgaguuccagcagaagaacaaccggcugcuggagaucacccgcgaguucuccgugaacgccggggucaccacgcccgugagcaccuacaugcucaccaacuccgagcugcugagccucaucaacgacaugcccaucaccaacgaccagaagaagcugaugagcaacaacgugcagaucguccggcagcaguccuacagcaucaugugcaucaucaaggaggaggugcuggccuacgugguccagcucccgcuguacggcgugaucgacacgcccugcuggaagcugcacaccagcccccucugcaccaccaacacgaaggagggguccaacaucugccugacccgcaccgaccggggcugguacugcgacaacgccggcuccgugagcuucuucccccaggcggagaccugcaagguccaguccaaccgcguguucugcgacacgaugaacagccugacccucccguccgaggucaaccugugcaacguggacaucuucaaccccaaguacgacugcaagaucaugaccagcaagaccgacguguccagcuccgucaucacgagccugggggccaucguguccugcuacggcaagaccaagugcaccgccagcaacaagaaccgggggaucaucaagaccuucuccaacggcugcgacuacgugagcaacaagggcgucgacacgguguccguggggaacacccucuacugcgucaacaagcaggagggccagagccuguacgugaagggggagcccaucaucaacuucuacgacccccugguguucccgagcgacgaguucgacgccuccaucagccaggucaacgagaagaucaaccagucccucgccuucauccgcaagagcgacgagcugcugcacaacgugaacgcgggcaaguccaccaccaacaucaugaucaccacgaucaucaucgugaucaucgucauccuccugagccugaucgccguggggcuccugcuguacugcaaggcccgguccacccccgugacccugagcaaggaccagcucuccggcaucaacaacaucgccuucagcaacugaggacuaguacuggcugcaucucccuuuccucuguccuccauccuucucccaggauggugaagggggaccugguacccagugauccccaccccaggauccuaaaucaugacuuaccugcuaauaaaaacucauuggaaaagugagaagaucuaaaaaaaaaaaaaaaaaaaaaaaaaaaaaaaaaaaaaaaaaaaaaaaaaaaaaaaaaaaaaaaaugcaucccccccccccccccccccccccccccccccaaaggcucuuuucagagccaccagaauu

SEQ ID NO: 2457 - RNA, 2010 nt, Artificial Sequence
  mRNA product Design b-5 comprising derived and/or modified sequence from HRSV(A2)__F_DSCav1_mut2 (opt2)
gggagacuccugucgggcggaaguaggaggaguagaguuuaaaaacaguacucuuuuuccgguucgggacguaguugaagcaacgacaagccggauaaccgcucuugagacaggaagcuuaccauggagcuccucauccucaaggccaacgccaucaccaccauccucaccgccgucaccuucugcuucgccuccggccagaacaucaccgaggaguucuaccaguccaccugcuccgccgucuccaagggcuaccucggcgcccuccgcaccggcugguacaccuccgucaucaccaucgagcucuccaacaucaaggagaacaagugcaacggcaccgacgccaaggucaagcucaucaagcaggagcucgacaaguacaagaacgccgucaccgaccuccagcuccucaugcaguccacccccgccaccggcuccggcuccgccaucugcuccggcgucgccgucugcaagguccuccaccucgagggcgaggucaacaagaucaaguccgcccuccucuccaccaacaaggccgucgucucccucuccaacggcgucuccguccucaccuucaagguccucgaccucaagaacuacaucgacaagcagcuccuccccauccucaacaagcaguccugcuccauccccaacaucgagaccgucaucgaguuccagcagaagaacaaccgccuccucgagaucacccgcgaguucuccgucaacgccggcgucaccacccccgucuccaccuacaugcucaccaacuccgagcuccucucccucaucaacgacaugcccaucaccaacgaccagaagaagcucauguccaacaacguccagaucguccgccagcaguccuacuccaucaugugcaucaucaaggaggagguccucgccuacgucguccagcucccccucuacggcgucaucgacacccccugcuggaagcuccacaccuccccccucugcaccaccaacaccaaggagggcuccaacaucugccucacccgcaccgaccgcggcugguacugcgacaacgccggcuccgucuccuucuucccccaggccgagaccugcaagguccaguccaaccgcgucuucugcgacaccaugaacucccucacccuccccuccgaggucaaccucugcaacgucgacaucuucaaccccaaguacgacugcaagaucaugaccuccaagaccgacgucuccuccuccgucaucaccucccucggcgccaucgucuccugcuacggcaagaccaagugcaccgccuccaacaagaaccgcggcaucaucaagaccuucuccaacggcugcgacuacgucuccaacaagggcgucgacaccgucuccgucggcaacacccucuacugcgucaacaagcaggagggccagucccucuacgucaagggcgagcccaucaucaacuucuacgacccccucgucuuccccuccgacgaguucgacgccuccaucucccaggucaacgagaagaucaaccagucccucgccuucauccgcaaguccgacgagcuccuccacaacgucaacgccggcaaguccaccaccaacaucaugaucaccaccaucaucaucgucaucaucgucauccuccucucccucaucgccgucggccuccuccucuacugcaaggcccgcuccacccccgucacccucuccaaggaccagcucuccggcaucaacaacaucgccuucuccaacugaggacuaguacuggcugcaucucccuuuccucuguccuccauccuucucccaggauggugaagggggaccugguacccagugauccccaccccaggauccuaaaucaugacuuaccugcuaauaaaaacucauuggaaaagugagaagaucuaaaaaaaaaaaaaaaaaaaaaaaaaaaaaaaaaaaaaaaaaaaaaaaaaaaaaaaaaaaaaaaaugcaucccccccccccccccccccccccccccccccaaaggcucuuuucagagccaccagaauu

SEQ ID NO: 2458 - RNA, 2010 nt, Artificial Sequence
  mRNA product Design b-5 comprising derived and/or modified sequence from HRSV(A2)__F_DSCav1_mut2 (opt3)
gggagacuccugucgggcggaaguaggaggaguagaguuuaaaaacaguacucuuuuuccgguucgggacguaguugaagcaacgacaagccggauaaccgcucuugagacaggaagcuuaccauggagcugcucauccuuaaggccaacgcuauuaccacaauacugacugcagugacguucugcuuugccagcggccagaauaucaccgaagaguucuaccaauccacauguucugcggucucaaaaggguauuugggagcuuuaagaacugguugguacaccaguguuauuacaaucgaacugagcaacauuaaggagaauaaaugcaacggcaccgacgccaaggugaaacuaaucaagcaggaacucgauaaguauaaaaaugcaguaacugaccugcagcuucugaugcaguccacacccgccaccgggucuggaucggcuauauguucaggcguggcagucugcaagguguugcaccucgagggugagguuaacaaaaucaagagcgcccugcugaguacgaauaaagcuguggucucccucucuaacggggugagcguauuaacuuuuaagguucuggaucuuaagaauuacauugacaaacaauugcugccuauccuaaacaagcaguccuguucaauuccaaauaucgaaaccgugauagaguuccagcagaaaaacaauaggcuccuggaaauuacacgggaguuuagugucaacgccggagugacuaccccggugagcacauauaugcuuaccaauucugagcuguugucccucaucaacgauaugcccauuacgaacgaccaaaagaaacugaugucaaauaacguccagaucguucgccagcagagcuacaguaucaugugcauuauaaaggaagagguguuagcguauguagugcaacugccucucuacggcgucaucgauacuccauguuggaaacuucauacaucuccccugugcaccacuaauacaaaggaaggcuccaacauuuguuugacccgaacggaccgugggugguacugcgauaaugcaggaagcgugucguucuuuccucaggccgagaccuguaagguucagucuaacagaguguucugcgacacaaugaacucccuaacucugccaucagaagucaaucucugcaauguggauaucuuuaaccccaaauaugacuguaagauaaugaccaguaaaacagauguaagcuccucuguuauuacuagccugggugcuaucgugucaugcuacggcaagaccaaauguacagccaguaauaagaacagggggaucauuaagaccuucuccaauggaugcgacuaugucagcaacaaaggcguggacacugucucuguggguaauacgcuuuacuguguuaacaagcaagaggggcagucacuguaugugaaaggagagccuaucauuaacuuuuacgauccauugguauucccgagugacgaauuugaugcaagcauaucccaggucaaugagaagaucaaccagucucucgcuuucauucggaaaucggacgaacuguuacacaaugugaacgccggcaagagcacaaccaauaucaugaucacuaccauuauaaucguuauuaucgugauucugcuaucccucaucgcggucggccugcuuuuguauugcaaggcccgcucaacacccgugacccugaguaaagaucaacucucugggauaaacaauaucgcauucagcaacugaggacuaguacuggcugcaucucccuuuccucuguccuccauccuucucccaggauggugaagggggaccugguacccagugauccccaccccaggauccuaaaucaugacuuaccugcuaauaaaaacucauuggaaaagugagaagaucuaaaaaaaaaaaaaaaaaaaaaaaaaaaaaaaaaaaaaaaaaaaaaaaaaaaaaaaaaaaaaaaaugcaucccccccccccccccccccccccccccccccaaaggcucuuuucagagccaccagaauu

SEQ ID NO: 2459 - RNA, 2010 nt, Artificial Sequence
  mRNA product Design b-5 comprising derived and/or modified sequence from HRSV(A2)__F_DSCav1_mut2 (opt4)
gggagacuccugucgggcggaaguaggaggaguagaguuuaaaaacaguacucuuuuuccgguucgggacguaguugaagcaacgacaagccggauaaccgcucuugagacaggaagcuuaccauggagcugcugauccugaaggccaacgccaucaccaccauccugaccgccgugaccuucugcuucgccagcggccagaacaucaccgaggaguucuaccagagcaccugcagcgccgugagcaagggcuaccugggcgcccugagaaccggcugguacaccagcgugaucaccaucgagcugagcaacaucaaggagaacaagugcaacggcaccgacgccaaggugaagcugaucaagcaggagcuggacaaguacaagaacgccgugaccgaccugcagcugcugaugcagagcacccccgccaccggcagcggcagcgccaucugcagcggcguggccgugugcaaggugcugcaccuggagggcgaggugaacaagaucaagagcgcccugcugagcaccaacaaggccguggugagccugagcaacggcgugagcgugcugaccuucaaggugcuggaccugaagaacuacaucgacaagcagcugcugcccauccugaacaagcagagcugcagcauccccaacaucgagaccgugaucgaguuccagcagaagaacaacagacugcuggagaucaccagagaguucagcgugaacgccggcgugaccacccccgugagcaccuacaugcugaccaacagcgagcugcugagccugaucaacgacaugcccaucaccaacgaccagaagaagcugaugagcaacaacgugcagaucgugagacagcagagcuacagcaucaugugcaucaucaaggaggaggugcuggccuacguggugcagcugccccuguacggcgugaucgacacccccugcuggaagcugcacaccagcccccugugcaccaccaacaccaaggagggcagcaacaucugccugaccagaaccgacagaggcugguacugcgacaacgccggcagcgugagcuucuucccccaggccgagaccugcaaggugcagagcaacagaguguucugcgacaccaugaacagccugacccugcccagcgaggugaaccugugcaacguggacaucuucaaccccaaguacgacugcaagaucaugaccagcaagaccgacgugagcagcagcgugaucaccagccugggcgccaucgugagcugcuacggcaagaccaagugcaccgccagcaacaagaacagaggcaucaucaagaccuucagcaacggcugcgacuacgugagcaacaagggcguggacaccgugagcgugggcaacacccuguacugcgugaacaagcaggagggccagagccuguacgugaagggcgagcccaucaucaacuucuacgacccccugguguuccccagcgacgaguucgacgccagcaucagccaggugaacgagaagaucaaccagagccuggccuucaucagaaagagcgacgagcugcugcacaacgugaacgccggcaagagcaccaccaacaucaugaucaccaccaucaucaucgugaucaucgugauccugcugagccugaucgccgugggccugcugcuguacugcaaggccagaagcacccccgugacccugagcaaggaccagcugagcggcaucaacaacaucgccuucagcaacugaggacuaguacuggcugcaucucccuuuccucuguccuccauccuucucccaggauggugaagggggaccugguacccagugauccccaccccaggauccuaaaucaugacuuaccugcuaauaaaaacucauuggaaaagugagaagaucuaaaaaaaaaaaaaaaaaaaaaaaaaaaaaaaaaaaaaaaaaaaaaaaaaaaaaaaaaaaaaaaaugcaucccccccccccccccccccccccccccccccaaaggcucuuuucagagccaccagaauu

SEQ ID NO: 2460 - RNA, 2010 nt, Artificial Sequence
  mRNA product Design b-5 comprising derived and/or modified sequence from HRSV(A2)__F_DSCav1_mut2 (opt5)
gggagacuccugucgggcggaaguaggaggaguagaguuuaaaaacaguacucuuuuuccgguucgggacguaguugaagcaacgacaagccggauaaccgcucuugagacaggaagcuuaccauggagcugcucauccugaaggccaacgcuauuaccacaauccuuacggccgugaccuucugcuuugcgagcggccagaauauuacagaagaguucuaccaauccaccuguucugcugucagcaaaggguaucugggagcccucagaacaggcugguacaccuccguuaucacaauugaacugucuaacaucaaggagaauaaaugcaacgggaccgacgccaaggugaaacuuaucaagcaggaacuggauaaguauaaaaaugcugugacggaccuccagcugcugaugcagagcacccccgccacaggauccggcucugcuauuuguagcggggucgccgugugcaagguucuccaccuggagggagaggugaacaaaaucaaguccgcgcuucugagcaccaauaaagccgucgugucucucuccaacggcguuagcgugcugacauuuaagguccuugaucugaagaauuacauugacaaacaacuccugccuauccugaacaagcagucuuguuccauuccgaauaucgaaaccgugauugaguuccagcagaaaaacaaucggcuccuggaaaucacgcgcgaguuuagcgugaacgcuggcgucacaacccccguuucuacauauaugcuuaccaauuccgagcugcucagccugaucaacgauaugccuauuaccaacgaccaaaagaaacuuauguccaauaacgugcagaucgugagacagcagucuuacagcauuaugugcaucauuaaggaagagguccuggccuaugugguucaacucccccuguacggggugaucgauacaccuuguuggaaacugcauacgagcccccucugcaccacaaauaccaaggaaggauccaacaucugucugacacggaccgaccgcggcugguacugcgauaaugcugggucugucuccuucuuuccucaggccgagacguguaaggugcagagcaacagaguuuucugcgacacaaugaacucucuuacccugccgagcgaagugaaucucugcaaugucgauauuuuuaaccccaaauaugacuguaagaucaugaccuccaaaacagaugugucuagcuccgucauuaccagccugggagcgaucgugucuugcuacggcaagacaaaauguacggccuccaauaagaaccgggggauuaucaagaccuucagcaauggaugcgacuauguuucuaacaaaggcguggacacagucuccgugggcaauacccuuuacuguguuaacaagcaagaggggcagagccuguaugugaaaggagagccuaucauuaacuuuuacgauccccucgucuucccuuccgacgaauuugaugcuucuaucagccaggugaaugagaagauuaaccagucccuggccuucauccgcaaaucugacgaacugcuccacaaugugaacgcuggcaagagcacaaccaauauuaugaucacgaccauuaucaucguuauuaucgucauucugcuuucccugaucgccguggggcuccugcuguauugcaaggccagaagcacacccgugacccuuucuaaagaucaacucuccggaauuaacaauaucgcuuucagcaacugaggacuaguacuggcugcaucucccuuuccucuguccuccauccuucucccaggauggugaagggggaccugguacccagugauccccaccccaggauccuaaaucaugacuuaccugcuaauaaaaacucauuggaaaagugagaagaucuaaaaaaaaaaaaaaaaaaaaaaaaaaaaaaaaaaaaaaaaaaaaaaaaaaaaaaaaaaaaaaaaugcaucccccccccccccccccccccccccccccccaaaggcucuuuucagagccaccagaauu

SEQ ID NO: 2461 - RNA, 2010 nt, Artificial Sequence
  mRNA product Design b-5 comprising derived and/or modified sequence from HRSV(A2)__F_DSCav1_mut2 (opt6)
gggagacuccugucgggcggaaguaggaggaguagaguuuaaaaacaguacucuuuuuccgguucgggacguaguugaagcaacgacaagccggauaaccgcucuugagacaggaagcuuaccauggaacuacuaauccuaaaagcaaacgcaauuacaacuauacuuaccgccguaacauuuugcuucgcaucugggcaaaacauuaccgaagaauuuuaucaaucaacaugcucagcagucuccaaaggauaccuuggagcauuaagaaccggcugguauaccuccguaauaacaauugaacuaucuaauauaaaagaaaauaaauguaauggaacugacgcaaaaguuaaacuaauaaaacaagaacucgacaaauacaaaaacgccgucacagaccuacaacuacuaaugcaaucaacccccgcaacaggaucaggauccgcaaucugcagcggcgucgcaguuugcaaaguccuacauuuagaaggagaaguaaacaaaauaaaaucugcucuccucucuacaaacaaagcaguagugucacuuucaaacggaguaucaguucuaacauucaaaguacuagaccuaaaaaauuacauagacaaacaacuacuuccaauucuaaacaaacaauccuguuccauacccaacauagaaacaguaauagaauuucaacaaaaaaauaacagacuccuagaaauuacaagagaauuuuccgucaaugcaggaguaacaaccccaguaucaaccuacauguuaacuaacucagaacucuuaucacuaauaaacgacaugccaaucacuaaugaccaaaaaaaacucaugucaaauaacguacaaauaguccgacaacaaucauacuccaucaugugcauuauaaaagaagaaguacuagcauacgucguccaauuaccacuauacggcgucauagacacaccauguuggaaacuccacacaucaccacuaugcacuacaaauacaaaagaaggcuccaacaucugccuaacaagaacagacagagguugguauugcgacaacgcaggaucaguaucauuuuucccccaagcagaaacauguaaaguacaaucaaauagagucuucugcgacaccaugaacucauuaacacuaccuucagaagucaaccuaugcaacguagacaucuucaacccuaaauaugacugcaaaaucaugaccagcaaaaccgacguuucaucuuccguaauaacaucacuaggcgcaauagucucauguuacggcaaaacaaaauguacagcaucaaauaaaaaccguggaauaauaaaaacauuuucuaaugguugugacuacguaagcaauaaaggaguagauacaguaucagucggcaacaccuuauacuguguaaacaaacaagaaggccaaaguuuauacgucaaaggagaacccaucaucaacuucuacgacccauuaguauucccaucagacgaauuugaugcaagcauuucacaagucaacgaaaaaaucaaucaaucauuagcauucauccgaaaaucagacgaauuauuacacaacguaaacgccggaaaaucaaccacuaauauaaugauaaccacaauaaucaucguaauaauaguaauacuucucucacuaaucgcagucggacuccuucuauacugcaaagcaagaucuacaccaguaacacuauccaaagaucaacuaaguggcauaaacaacauagcauuuucuaacuaaggacuaguacuggcugcaucucccuuuccucuguccuccauccuucucccaggauggugaagggggaccugguacccagugauccccaccccaggauccuaaaucaugacuuaccugcuaauaaaaacucauuggaaaagugagaagaucuaaaaaaaaaaaaaaaaaaaaaaaaaaaaaaaaaaaaaaaaaaaaaaaaaaaaaaaaaaaaaaaaugcaucccccccccccccccccccccccccccccccaaaggcucuuuucagagccaccagaauu

SEQ ID NO: 2462 - RNA, 2010 nt, Artificial Sequence
  mRNA product Design b-5 comprising derived and/or modified sequence from HRSV(A2)__F_DSCav1_mut2 (opt11)
gggagacuccugucgggcggaaguaggaggaguagaguuuaaaaacaguacucuuuuuccgguucgggacguaguugaagcaacgacaagccggauaaccgcucuugagacaggaagcuuaccauggaacuccucauccuaaaagccaacgcgaucaccacaauccugacagccgucaccuucugcuucgccuccggccaaaacaucaccgaagaguucuaccaauccacaugcuccgccgucuccaagggcuaccugggcgcacuucguacaggcugguacaccuccguaauaaccaucgaacucuccaacaucaaagaaaacaaaugcaacggcacagacgcaaaagucaaacucaucaagcaagaacuugacaaauacaaaaaugcagucaccgaccuucaacuccucaugcaaucuacccccgccacaggcuccggcuccgcuaucugcuccggcgucgccgucugcaaaguccuccaccucgaaggugaaguaaacaaaauaaaauccgcccuccucuccaccaacaaagccgucgucucccuaucaaacggcgucuccgugcucaccuucaagguucucgaccugaaaaacuacauagacaaacagcuccuaccaauccuuaacaaacagagcugcuccauuccgaauaucgaaacgguaaucgaauuucaacagaaaaacaaccgccuccucgaaauaacgcgagaguucuccguaaacgcuggcgucaccacacccgucagcaccuacaugcuaacgaacuccgaacucuugucgcucaucaacgacaugcccauaaccaacgaccaaaagaaacuaauguccaauaacguacaaaucguacgccaacaaucuuacuccaucaugugcaucauaaaagaagaaguacuagcuuacgucguccaacucccacuguacggagucaucgacacccccugcuggaaacuccacaccucuccccucugcaccaccaacaccaaagagggcuccaacauuugccugacacgcaccgaccgcggcugguacugcgacaacgcaggcuccgucucguucuucccccaagccgaaaccugcaaaguccaauccaaccgcgucuucugcgacaccaugaacucccucacccuccccuccgaagucaaucuaugcaacguagacaucuucaacccgaaauaugacugcaaaauuaugacaucuaaaaccgacguguccuccucagucaucacuucccuaggagccaucguuuccuguuacggcaagaccaaaugcaccgccagcaacaaaaaccgaggcaucaucaaaaccuucuccaacggaugugacuaugucuccaacaagggcgucgacaccgucagcgucggcaacacccucuacugcgucaacaaacaagaaggccaaucccucuacgucaaaggagagcccauaaucaacuucuacgacccccucgucuucccauccgacgaguucgacgccucaaucucccaagucaacgagaaaaucaaccaauccuuagccuucauccguaaguccgacgaacuccuucacaacgucaacgccgguaaaucuaccaccaacaucaugauaacaacaauaauuaucgucaucaucgucauccuccuuucccucaucgcggucgggcuauugcucuacugcaaagcccgguccaccccaguaacccucucuaaagaccaacucagcggaaucaauaacauagccuucagcaauuaaggacuaguacuggcugcaucucccuuuccucuguccuccauccuucucccaggauggugaagggggaccugguacccagugauccccaccccaggauccuaaaucaugacuuaccugcuaauaaaaacucauuggaaaagugagaagaucuaaaaaaaaaaaaaaaaaaaaaaaaaaaaaaaaaaaaaaaaaaaaaaaaaaaaaaaaaaaaaaaaugcaucccccccccccccccccccccccccccccccaaaggcucuuuucagagccaccagaauu

SEQ ID NO: 2463 - RNA, 1916 nt, Artificial Sequence
  mRNA product Design c-1 comprising derived and/or modified sequence from HRSV(A2)__F_DSCav1_mut2 (opt1)
gggagaguccgcucagccagguugcagaagcggcuuagcguguguccuaaucuucucucugcguguagguaggccugugccgcaaacaagcuuaccauggagcugcucauccugaaggccaacgccaucaccaccauccugacggcggugaccuucugcuucgccagcggccagaacaucaccgaggaguucuaccaguccacgugcagcgccgucuccaagggguaccucggcgcccugcggaccggcugguacaccuccgugaucaccaucgagcugagcaacaucaaggagaacaagugcaacgggaccgacgccaaggugaagcucaucaagcaggagcuggacaaguacaagaacgcggucacggaccugcagcuccugaugcaguccaccccggcaaccggcuccggcuccgccaucugcagcggcgucgccgugugcaaggugcugcaccucgagggggaggucaacaagaucaagagcgcccugcuguccaccaacaaggccguggugagccucuccaacggcgucagcgugcugaccuucaaggugcuggaccucaagaacuacaucgacaagcagcugcugcccauccugaacaagcagagcugcuccauccccaacaucgagacggugaucgaguuccagcagaagaacaaccggcuccuggagaucacccgcgaguucagcgugaacgccggggucaccacccccguguccacguacaugcugaccaacagcgagcuccugucccugaucaacgacaugccgaucaccaacgaccagaagaagcucaugagcaacaacgugcagaucguccggcagcaguccuacagcaucaugugcaucaucaaggaggaggugcuggcguacgugguccagcugccccucuacggcgugaucgacacccccugcuggaagcugcacacgagcccccugugcaccaccaacaccaaggagggguccaacaucugccucacgcgcaccgaccggggcugguacugcgacaacgccggcagcgucuccuucuucccgcaggccgagaccugcaaggugcagagcaaccgcguguucugcgacaccaugaacucccugacgcugcccagcgagguaaaccucugcaacgucgacaucuucaaccccaaguacgacugcaagaucaugaccuccaagaccgacgugagcuccagcgugaucaccucccugggggccaucgucagcugcuacggcaagacgaagugcaccgccagcaacaagaaccgggggaucaucaagaccuucuccaacggcugcgacuacgugagcaacaagggcguggacaccguguccgucgggaacacccuguacugcgugaacaagcaggagggccagagccucuacgugaagggggagcccaucaucaacuucuacgacccgcuggucuuccccuccgacgaguucgacgcgagcaucucccaggugaacgagaagaucaaccagagccuggccuucauccgcaaguccgacgagcugcuccacaacgugaacgccggcaagagcacgaccaacaucaugaucaccaccaucaucaucgucaucaucgugauccugcugucccucaucgccguggggcugcugcucuacugcaaggcccggagcacgcccgucacccuguccaaggaccagcugagcggcaucaacaacaucgcguucuccaacugaggacuaguguccaccugucccuccugggcugcuggauugucucguuuuccugccaaauaaacaggaucagcgcuuuacagaucuaaaaaaaaaaaaaaaaaaaaaaaaaaaaaaaaaaaaaaaaaaaaaaaaaaaaaaaaaaaaaaaaugcaucccccccccccccccccccccccccccccccaaaggcucuuuucagagccaccagaauu

SEQ ID NO: 2464 - RNA, 1916 nt, Artificial Sequence
  mRNA product Design c-1 comprising derived and/or modified sequence from HRSV(A2)__F_DSCav1_mut2 (opt1)
gggagaguccgcucagccagguugcagaagcggcuuagcguguguccuaaucuucucucugcguguagguaggccugugccgcaaacaagcuuaccauggagcugcucauccugaaggccaacgccaucaccaccauccugacggcggugaccuucugcuucgccagcggccagaacaucaccgaggaguucuaccaguccacgugcagcgccgucuccaagggguaccucggcgcccugcgcaccgggugguacaccagcgugaucaccaucgagcuguccaacaucaaggagaacaagugcaacggcaccgacgccaaggugaagcucaucaagcaggagcuggacaaguacaagaacgcggucacggaccugcagcuccugaugcagagcacccccgccaccggguccggcagcgccaucugcuccggcguggccgugugcaagguccugcaccucgagggggaggugaacaagaucaagagcgcgcugcuguccaccaacaaggccguggucagccucuccaacggcgugagcgugcugacguucaagguccuggaccucaagaacuacaucgacaagcagcugcugccgauccucaacaagcaguccugcagcauccccaacaucgagaccgugaucgaguuccagcagaagaacaaccggcugcuggagaucacccgcgaguucuccgugaacgccggggucaccacgcccgugagcaccuacaugcucaccaacuccgagcugcugagccucaucaacgacaugcccaucaccaacgaccagaagaagcugaugagcaacaacgugcagaucguccggcagcaguccuacagcaucaugugcaucaucaaggaggaggugcuggccuacgugguccagcucccgcuguacggcgugaucgacacgcccugcuggaagcugcacaccagcccccucugcaccaccaacacgaaggagggguccaacaucugccugacccgcaccgaccggggcugguacugcgacaacgccggcuccgugagcuucuucccccaggcggagaccugcaagguccaguccaaccgcguguucugcgacacgaugaacagccugacccucccguccgaggucaaccugugcaacguggacaucuucaaccccaaguacgacugcaagaucaugaccagcaagaccgacguguccagcuccgucaucacgagccugggggccaucguguccugcuacggcaagaccaagugcaccgccagcaacaagaaccgggggaucaucaagaccuucuccaacggcugcgacuacgugagcaacaagggcgucgacacgguguccguggggaacacccucuacugcgucaacaagcaggagggccagagccuguacgugaagggggagcccaucaucaacuucuacgacccccugguguucccgagcgacgaguucgacgccuccaucagccaggucaacgagaagaucaaccagucccucgccuucauccgcaagagcgacgagcugcugcacaacgugaacgcgggcaaguccaccaccaacaucaugaucaccacgaucaucaucgugaucaucgucauccuccugagccugaucgccguggggcuccugcuguacugcaaggcccgguccacccccgugacccugagcaaggaccagcucuccggcaucaacaacaucgccuucagcaacugaggacuaguguccaccugucccuccugggcugcuggauugucucguuuuccugccaaauaaacaggaucagcgcuuuacagaucuaaaaaaaaaaaaaaaaaaaaaaaaaaaaaaaaaaaaaaaaaaaaaaaaaaaaaaaaaaaaaaaaugcaucccccccccccccccccccccccccccccccaaaggcucuuuucagagccaccagaauu

SEQ ID NO: 2465 - RNA, 1916 nt, Artificial Sequence
  mRNA product Design c-1 comprising derived and/or modified sequence from HRSV(A2)__F_DSCav1_mut2 (opt2)
gggagaguccgcucagccagguugcagaagcggcuuagcguguguccuaaucuucucucugcguguagguaggccugugccgcaaacaagcuuaccauggagcuccucauccucaaggccaacgccaucaccaccauccucaccgccgucaccuucugcuucgccuccggccagaacaucaccgaggaguucuaccaguccaccugcuccgccgucuccaagggcuaccucggcgcccuccgcaccggcugguacaccuccgucaucaccaucgagcucuccaacaucaaggagaacaagugcaacggcaccgacgccaaggucaagcucaucaagcaggagcucgacaaguacaagaacgccgucaccgaccuccagcuccucaugcaguccacccccgccaccggcuccggcuccgccaucugcuccggcgucgccgucugcaagguccuccaccucgagggcgaggucaacaagaucaaguccgcccuccucuccaccaacaaggccgucgucucccucuccaacggcgucuccguccucaccuucaagguccucgaccucaagaacuacaucgacaagcagcuccuccccauccucaacaagcaguccugcuccauccccaacaucgagaccgucaucgaguuccagcagaagaacaaccgccuccucgagaucacccgcgaguucuccgucaacgccggcgucaccacccccgucuccaccuacaugcucaccaacuccgagcuccucucccucaucaacgacaugcccaucaccaacgaccagaagaagcucauguccaacaacguccagaucguccgccagcaguccuacuccaucaugugcaucaucaaggaggagguccucgccuacgucguccagcucccccucuacggcgucaucgacacccccugcuggaagcuccacaccuccccccucugcaccaccaacaccaaggagggcuccaacaucugccucacccgcaccgaccgcggcugguacugcgacaacgccggcuccgucuccuucuucccccaggccgagaccugcaagguccaguccaaccgcgucuucugcgacaccaugaacucccucacccuccccuccgaggucaaccucugcaacgucgacaucuucaaccccaaguacgacugcaagaucaugaccuccaagaccgacgucuccuccuccgucaucaccucccucggcgccaucgucuccugcuacggcaagaccaagugcaccgccuccaacaagaaccgcggcaucaucaagaccuucuccaacggcugcgacuacgucuccaacaagggcgucgacaccgucuccgucggcaacacccucuacugcgucaacaagcaggagggccagucccucuacgucaagggcgagcccaucaucaacuucuacgacccccucgucuuccccuccgacgaguucgacgccuccaucucccaggucaacgagaagaucaaccagucccucgccuucauccgcaaguccgacgagcuccuccacaacgucaacgccggcaaguccaccaccaacaucaugaucaccaccaucaucaucgucaucaucgucauccuccucucccucaucgccgucggccuccuccucuacugcaaggcccgcuccacccccgucacccucuccaaggaccagcucuccggcaucaacaacaucgccuucuccaacugaggacuaguguccaccugucccuccugggcugcuggauugucucguuuuccugccaaauaaacaggaucagcgcuuuacagaucuaaaaaaaaaaaaaaaaaaaaaaaaaaaaaaaaaaaaaaaaaaaaaaaaaaaaaaaaaaaaaaaaugcaucccccccccccccccccccccccccccccccaaaggcucuuuucagagccaccagaauu

SEQ ID NO: 2466 - RNA, 1916 nt, Artificial Sequence
  mRNA product Design c-1 comprising derived and/or modified sequence from HRSV(A2)__F_DSCav1_mut2 (opt3)
gggagaguccgcucagccagguugcagaagcggcuuagcguguguccuaaucuucucucugcguguagguaggccugugccgcaaacaagcuuaccauggagcugcucauccuuaaggccaacgcuauuaccacaauacugacugcagugacguucugcuuugccagcggccagaauaucaccgaagaguucuaccaauccacauguucugcggucucaaaaggguauuugggagcuuuaagaacugguugguacaccaguguuauuacaaucgaacugagcaacauuaaggagaauaaaugcaacggcaccgacgccaaggugaaacuaaucaagcaggaacucgauaaguauaaaaaugcaguaacugaccugcagcuucugaugcaguccacacccgccaccgggucuggaucggcuauauguucaggcguggcagucugcaagguguugcaccucgagggugagguuaacaaaaucaagagcgcccugcugaguacgaauaaagcuguggucucccucucuaacggggugagcguauuaacuuuuaagguucuggaucuuaagaauuacauugacaaacaauugcugccuauccuaaacaagcaguccuguucaauuccaaauaucgaaaccgugauagaguuccagcagaaaaacaauaggcuccuggaaauuacacgggaguuuagugucaacgccggagugacuaccccggugagcacauauaugcuuaccaauucugagcuguugucccucaucaacgauaugcccauuacgaacgaccaaaagaaacugaugucaaauaacguccagaucguucgccagcagagcuacaguaucaugugcauuauaaaggaagagguguuagcguauguagugcaacugccucucuacggcgucaucgauacuccauguuggaaacuucauacaucuccccugugcaccacuaauacaaaggaaggcuccaacauuuguuugacccgaacggaccgugggugguacugcgauaaugcaggaagcgugucguucuuuccucaggccgagaccuguaagguucagucuaacagaguguucugcgacacaaugaacucccuaacucugccaucagaagucaaucucugcaauguggauaucuuuaaccccaaauaugacuguaagauaaugaccaguaaaacagauguaagcuccucuguuauuacuagccugggugcuaucgugucaugcuacggcaagaccaaauguacagccaguaauaagaacagggggaucauuaagaccuucuccaauggaugcgacuaugucagcaacaaaggcguggacacugucucuguggguaauacgcuuuacuguguuaacaagcaagaggggcagucacuguaugugaaaggagagccuaucauuaacuuuuacgauccauugguauucccgagugacgaauuugaugcaagcauaucccaggucaaugagaagaucaaccagucucucgcuuucauucggaaaucggacgaacuguuacacaaugugaacgccggcaagagcacaaccaauaucaugaucacuaccauuauaaucguuauuaucgugauucugcuaucccucaucgcggucggccugcuuuuguauugcaaggcccgcucaacacccgugacccugaguaaagaucaacucucugggauaaacaauaucgcauucagcaacugaggacuaguguccaccugucccuccugggcugcuggauugucucguuuuccugccaaauaaacaggaucagcgcuuuacagaucuaaaaaaaaaaaaaaaaaaaaaaaaaaaaaaaaaaaaaaaaaaaaaaaaaaaaaaaaaaaaaaaaugcaucccccccccccccccccccccccccccccccaaaggcucuuuucagagccaccagaauu

SEQ ID NO: 2467 - RNA, 1916 nt, Artificial Sequence
  mRNA product Design c-1 comprising derived and/or modified sequence from HRSV(A2)__F_DSCav1_mut2 (opt4)
gggagaguccgcucagccagguugcagaagcggcuuagcguguguccuaaucuucucucugcguguagguaggccugugccgcaaacaagcuuaccauggagcugcugauccugaaggccaacgccaucaccaccauccugaccgccgugaccuucugcuucgccagcggccagaacaucaccgaggaguucuaccagagcaccugcagcgccgugagcaagggcuaccugggcgcccugagaaccggcugguacaccagcgugaucaccaucgagcugagcaacaucaaggagaacaagugcaacggcaccgacgccaaggugaagcugaucaagcaggagcuggacaaguacaagaacgccgugaccgaccugcagcugcugaugcagagcacccccgccaccggcagcggcagcgccaucugcagcggcguggccgugugcaaggugcugcaccuggagggcgaggugaacaagaucaagagcgcccugcugagcaccaacaaggccguggugagccugagcaacggcgugagcgugcugaccuucaaggugcuggaccugaagaacuacaucgacaagcagcugcugcccauccugaacaagcagagcugcagcauccccaacaucgagaccgugaucgaguuccagcagaagaacaacagacugcuggagaucaccagagaguucagcgugaacgccggcgugaccacccccgugagcaccuacaugcugaccaacagcgagcugcugagccugaucaacgacaugcccaucaccaacgaccagaagaagcugaugagcaacaacgugcagaucgugagacagcagagcuacagcaucaugugcaucaucaaggaggaggugcuggccuacguggugcagcugccccuguacggcgugaucgacacccccugcuggaagcugcacaccagcccccugugcaccaccaacaccaaggagggcagcaacaucugccugaccagaaccgacagaggcugguacugcgacaacgccggcagcgugagcuucuucccccaggccgagaccugcaaggugcagagcaacagaguguucugcgacaccaugaacagccugacccugcccagcgaggugaaccugugcaacguggacaucuucaaccccaaguacgacugcaagaucaugaccagcaagaccgacgugagcagcagcgugaucaccagccugggcgccaucgugagcugcuacggcaagaccaagugcaccgccagcaacaagaacagaggcaucaucaagaccuucagcaacggcugcgacuacgugagcaacaagggcguggacaccgugagcgugggcaacacccuguacugcgugaacaagcaggagggccagagccuguacgugaagggcgagcccaucaucaacuucuacgacccccugguguuccccagcgacgaguucgacgccagcaucagccaggugaacgagaagaucaaccagagccuggccuucaucagaaagagcgacgagcugcugcacaacgugaacgccggcaagagcaccaccaacaucaugaucaccaccaucaucaucgugaucaucgugauccugcugagccugaucgccgugggccugcugcuguacugcaaggccagaagcacccccgugacccugagcaaggaccagcugagcggcaucaacaacaucgccuucagcaacugaggacuaguguccaccugucccuccugggcugcuggauugucucguuuuccugccaaauaaacaggaucagcgcuuuacagaucuaaaaaaaaaaaaaaaaaaaaaaaaaaaaaaaaaaaaaaaaaaaaaaaaaaaaaaaaaaaaaaaaugcaucccccccccccccccccccccccccccccccaaaggcucuuuucagagccaccagaauu

SEQ ID NO: 2468 - RNA, 1916 nt, Artificial Sequence
  mRNA product Design c-1 comprising derived and/or modified sequence from HRSV(A2)__F_DSCav1_mut2 (opt5)
gggagaguccgcucagccagguugcagaagcggcuuagcguguguccuaaucuucucucugcguguagguaggccugugccgcaaacaagcuuaccauggagcugcucauccugaaggccaacgcuauuaccacaauccuuacggccgugaccuucugcuuugcgagcggccagaauauuacagaagaguucuaccaauccaccuguucugcugucagcaaaggguaucugggagcccucagaacaggcugguacaccuccguuaucacaauugaacugucuaacaucaaggagaauaaaugcaacgggaccgacgccaaggugaaacuuaucaagcaggaacuggauaaguauaaaaaugcugugacggaccuccagcugcugaugcagagcacccccgccacaggauccggcucugcuauuuguagcggggucgccgugugcaagguucuccaccuggagggagaggugaacaaaaucaaguccgcgcuucugagcaccaauaaagccgucgugucucucuccaacggcguuagcgugcugacauuuaagguccuugaucugaagaauuacauugacaaacaacuccugccuauccugaacaagcagucuuguuccauuccgaauaucgaaaccgugauugaguuccagcagaaaaacaaucggcuccuggaaaucacgcgcgaguuuagcgugaacgcuggcgucacaacccccguuucuacauauaugcuuaccaauuccgagcugcucagccugaucaacgauaugccuauuaccaacgaccaaaagaaacuuauguccaauaacgugcagaucgugagacagcagucuuacagcauuaugugcaucauuaaggaagagguccuggccuaugugguucaacucccccuguacggggugaucgauacaccuuguuggaaacugcauacgagcccccucugcaccacaaauaccaaggaaggauccaacaucugucugacacggaccgaccgcggcugguacugcgauaaugcugggucugucuccuucuuuccucaggccgagacguguaaggugcagagcaacagaguuuucugcgacacaaugaacucucuuacccugccgagcgaagugaaucucugcaaugucgauauuuuuaaccccaaauaugacuguaagaucaugaccuccaaaacagaugugucuagcuccgucauuaccagccugggagcgaucgugucuugcuacggcaagacaaaauguacggccuccaauaagaaccgggggauuaucaagaccuucagcaauggaugcgacuauguuucuaacaaaggcguggacacagucuccgugggcaauacccuuuacuguguuaacaagcaagaggggcagagccuguaugugaaaggagagccuaucauuaacuuuuacgauccccucgucuucccuuccgacgaauuugaugcuucuaucagccaggugaaugagaagauuaaccagucccuggccuucauccgcaaaucugacgaacugcuccacaaugugaacgcuggcaagagcacaaccaauauuaugaucacgaccauuaucaucguuauuaucgucauucugcuuucccugaucgccguggggcuccugcuguauugcaaggccagaagcacacccgugacccuuucuaaagaucaacucuccggaauuaacaauaucgcuuucagcaacugaggacuaguguccaccugucccuccugggcugcuggauugucucguuuuccugccaaauaaacaggaucagcgcuuuacagaucuaaaaaaaaaaaaaaaaaaaaaaaaaaaaaaaaaaaaaaaaaaaaaaaaaaaaaaaaaaaaaaaaugcaucccccccccccccccccccccccccccccccaaaggcucuuuucagagccaccagaauu

SEQ ID NO: 2469 - RNA, 1916 nt, Artificial Sequence
  mRNA product Design c-1 comprising derived and/or modified sequence from HRSV(A2)__F_DSCav1_mut2 (opt6)
gggagaguccgcucagccagguugcagaagcggcuuagcguguguccuaaucuucucucugcguguagguaggccugugccgcaaacaagcuuaccauggaacuacuaauccuaaaagcaaacgcaauuacaacuauacuuaccgccguaacauuuugcuucgcaucugggcaaaacauuaccgaagaauuuuaucaaucaacaugcucagcagucuccaaaggauaccuuggagcauuaagaaccggcugguauaccuccguaauaacaauugaacuaucuaauauaaaagaaaauaaauguaauggaacugacgcaaaaguuaaacuaauaaaacaagaacucgacaaauacaaaaacgccgucacagaccuacaacuacuaaugcaaucaacccccgcaacaggaucaggauccgcaaucugcagcggcgucgcaguuugcaaaguccuacauuuagaaggagaaguaaacaaaauaaaaucugcucuccucucuacaaacaaagcaguagugucacuuucaaacggaguaucaguucuaacauucaaaguacuagaccuaaaaaauuacauagacaaacaacuacuuccaauucuaaacaaacaauccuguuccauacccaacauagaaacaguaauagaauuucaacaaaaaaauaacagacuccuagaaauuacaagagaauuuuccgucaaugcaggaguaacaaccccaguaucaaccuacauguuaacuaacucagaacucuuaucacuaauaaacgacaugccaaucacuaaugaccaaaaaaaacucaugucaaauaacguacaaauaguccgacaacaaucauacuccaucaugugcauuauaaaagaagaaguacuagcauacgucguccaauuaccacuauacggcgucauagacacaccauguuggaaacuccacacaucaccacuaugcacuacaaauacaaaagaaggcuccaacaucugccuaacaagaacagacagagguugguauugcgacaacgcaggaucaguaucauuuuucccccaagcagaaacauguaaaguacaaucaaauagagucuucugcgacaccaugaacucauuaacacuaccuucagaagucaaccuaugcaacguagacaucuucaacccuaaauaugacugcaaaaucaugaccagcaaaaccgacguuucaucuuccguaauaacaucacuaggcgcaauagucucauguuacggcaaaacaaaauguacagcaucaaauaaaaaccguggaauaauaaaaacauuuucuaaugguugugacuacguaagcaauaaaggaguagauacaguaucagucggcaacaccuuauacuguguaaacaaacaagaaggccaaaguuuauacgucaaaggagaacccaucaucaacuucuacgacccauuaguauucccaucagacgaauuugaugcaagcauuucacaagucaacgaaaaaaucaaucaaucauuagcauucauccgaaaaucagacgaauuauuacacaacguaaacgccggaaaaucaaccacuaauauaaugauaaccacaauaaucaucguaauaauaguaauacuucucucacuaaucgcagucggacuccuucuauacugcaaagcaagaucuacaccaguaacacuauccaaagaucaacuaaguggcauaaacaacauagcauuuucuaacuaaggacuaguguccaccugucccuccugggcugcuggauugucucguuuuccugccaaauaaacaggaucagcgcuuuacagaucuaaaaaaaaaaaaaaaaaaaaaaaaaaaaaaaaaaaaaaaaaaaaaaaaaaaaaaaaaaaaaaaaugcaucccccccccccccccccccccccccccccccaaaggcucuuuucagagccaccagaauu

SEQ ID NO: 2470 - RNA, 1916 nt, Artificial Sequence
  mRNA product Design c-1 comprising derived and/or modified sequence from HRSV(A2)__F_DSCav1_mut2 (opt11)
gggagaguccgcucagccagguugcagaagcggcuuagcguguguccuaaucuucucucugcguguagguaggccugugccgcaaacaagcuuaccauggaacuccucauccuaaaagccaacgcgaucaccacaauccugacagccgucaccuucugcuucgccuccggccaaaacaucaccgaagaguucuaccaauccacaugcuccgccgucuccaagggcuaccugggcgcacuucguacaggcugguacaccuccguaauaaccaucgaacucuccaacaucaaagaaaacaaaugcaacggcacagacgcaaaagucaaacucaucaagcaagaacuugacaaauacaaaaaugcagucaccgaccuucaacuccucaugcaaucuacccccgccacaggcuccggcuccgcuaucugcuccggcgucgccgucugcaaaguccuccaccucgaaggugaaguaaacaaaauaaaauccgcccuccucuccaccaacaaagccgucgucucccuaucaaacggcgucuccgugcucaccuucaagguucucgaccugaaaaacuacauagacaaacagcuccuaccaauccuuaacaaacagagcugcuccauuccgaauaucgaaacgguaaucgaauuucaacagaaaaacaaccgccuccucgaaauaacgcgagaguucuccguaaacgcuggcgucaccacacccgucagcaccuacaugcuaacgaacuccgaacucuugucgcucaucaacgacaugcccauaaccaacgaccaaaagaaacuaauguccaauaacguacaaaucguacgccaacaaucuuacuccaucaugugcaucauaaaagaagaaguacuagcuuacgucguccaacucccacuguacggagucaucgacacccccugcuggaaacuccacaccucuccccucugcaccaccaacaccaaagagggcuccaacauuugccugacacgcaccgaccgcggcugguacugcgacaacgcaggcuccgucucguucuucccccaagccgaaaccugcaaaguccaauccaaccgcgucuucugcgacaccaugaacucccucacccuccccuccgaagucaaucuaugcaacguagacaucuucaacccgaaauaugacugcaaaauuaugacaucuaaaaccgacguguccuccucagucaucacuucccuaggagccaucguuuccuguuacggcaagaccaaaugcaccgccagcaacaaaaaccgaggcaucaucaaaaccuucuccaacggaugugacuaugucuccaacaagggcgucgacaccgucagcgucggcaacacccucuacugcgucaacaaacaagaaggccaaucccucuacgucaaaggagagcccauaaucaacuucuacgacccccucgucuucccauccgacgaguucgacgccucaaucucccaagucaacgagaaaaucaaccaauccuuagccuucauccguaaguccgacgaacuccuucacaacgucaacgccgguaaaucuaccaccaacaucaugauaacaacaauaauuaucgucaucaucgucauccuccuuucccucaucgcggucgggcuauugcucuacugcaaagcccgguccaccccaguaacccucucuaaagaccaacucagcggaaucaauaacauagccuucagcaauuaaggacuaguguccaccugucccuccugggcugcuggauugucucguuuuccugccaaauaaacaggaucagcgcuuuacagaucuaaaaaaaaaaaaaaaaaaaaaaaaaaaaaaaaaaaaaaaaaaaaaaaaaaaaaaaaaaaaaaaaugcaucccccccccccccccccccccccccccccccaaaggcucuuuucagagccaccagaauu

SEQ ID NO: 2471 - RNA, 2006 nt, Artificial Sequence
  mRNA product Design c-2 comprising derived and/or modified sequence from HRSV(A2)__F_DSCav1_mut2 (opt1)
gggagacuccugucgggcggaaguaggaggaguagaguuuaaaaacaguacucuuuuuccgguucgggacguaguugaagcaacgacaagccggauaaccgcucuugagacaggaagcuuaccauggagcugcucauccugaaggccaacgccaucaccaccauccugacggcggugaccuucugcuucgccagcggccagaacaucaccgaggaguucuaccaguccacgugcagcgccgucuccaagggguaccucggcgcccugcggaccggcugguacaccuccgugaucaccaucgagcugagcaacaucaaggagaacaagugcaacgggaccgacgccaaggugaagcucaucaagcaggagcuggacaaguacaagaacgcggucacggaccugcagcuccugaugcaguccaccccggcaaccggcuccggcuccgccaucugcagcggcgucgccgugugcaaggugcugcaccucgagggggaggucaacaagaucaagagcgcccugcuguccaccaacaaggccguggugagccucuccaacggcgucagcgugcugaccuucaaggugcuggaccucaagaacuacaucgacaagcagcugcugcccauccugaacaagcagagcugcuccauccccaacaucgagacggugaucgaguuccagcagaagaacaaccggcuccuggagaucacccgcgaguucagcgugaacgccggggucaccacccccguguccacguacaugcugaccaacagcgagcuccugucccugaucaacgacaugccgaucaccaacgaccagaagaagcucaugagcaacaacgugcagaucguccggcagcaguccuacagcaucaugugcaucaucaaggaggaggugcuggcguacgugguccagcugccccucuacggcgugaucgacacccccugcuggaagcugcacacgagcccccugugcaccaccaacaccaaggagggguccaacaucugccucacgcgcaccgaccggggcugguacugcgacaacgccggcagcgucuccuucuucccgcaggccgagaccugcaaggugcagagcaaccgcguguucugcgacaccaugaacucccugacgcugcccagcgagguaaaccucugcaacgucgacaucuucaaccccaaguacgacugcaagaucaugaccuccaagaccgacgugagcuccagcgugaucaccucccugggggccaucgucagcugcuacggcaagacgaagugcaccgccagcaacaagaaccgggggaucaucaagaccuucuccaacggcugcgacuacgugagcaacaagggcguggacaccguguccgucgggaacacccuguacugcgugaacaagcaggagggccagagccucuacgugaagggggagcccaucaucaacuucuacgacccgcuggucuuccccuccgacgaguucgacgcgagcaucucccaggugaacgagaagaucaaccagagccuggccuucauccgcaaguccgacgagcugcuccacaacgugaacgccggcaagagcacgaccaacaucaugaucaccaccaucaucaucgucaucaucgugauccugcugucccucaucgccguggggcugcugcucuacugcaaggcccggagcacgcccgucacccuguccaaggaccagcugagcggcaucaacaacaucgcguucuccaacugaggacuaguggaagcauuuuccuggcugauuaaaagaaauuacucagcuauggucaucuguuccuguuagaaggcuaugcagcauauuauauacuaugcgcauguuaugaaaugcauaauaaaaaauuuuaaaaaaucuaaaagaucuaaaaaaaaaaaaaaaaaaaaaaaaaaaaaaaaaaaaaaaaaaaaaaaaaaaaaaaaaaaaaaaaugcaucccccccccccccccccccccccccccccccaaaggcucuuuucagagccaccagaauu

SEQ ID NO: 2472 - RNA, 2006 nt, Artificial Sequence
  mRNA product Design c-2 comprising derived and/or modified sequence from HRSV(A2)__F_DSCav1_mut2 (opt1)
gggagacuccugucgggcggaaguaggaggaguagaguuuaaaaacaguacucuuuuuccgguucgggacguaguugaagcaacgacaagccggauaaccgcucuugagacaggaagcuuaccauggagcugcucauccugaaggccaacgccaucaccaccauccugacggcggugaccuucugcuucgccagcggccagaacaucaccgaggaguucuaccaguccacgugcagcgccgucuccaagggguaccucggcgcccugcgcaccgggugguacaccagcgugaucaccaucgagcuguccaacaucaaggagaacaagugcaacggcaccgacgccaaggugaagcucaucaagcaggagcuggacaaguacaagaacgcggucacggaccugcagcuccugaugcagagcacccccgccaccggguccggcagcgccaucugcuccggcguggccgugugcaagguccugcaccucgagggggaggugaacaagaucaagagcgcgcugcuguccaccaacaaggccguggucagccucuccaacggcgugagcgugcugacguucaagguccuggaccucaagaacuacaucgacaagcagcugcugccgauccucaacaagcaguccugcagcauccccaacaucgagaccgugaucgaguuccagcagaagaacaaccggcugcuggagaucacccgcgaguucuccgugaacgccggggucaccacgcccgugagcaccuacaugcucaccaacuccgagcugcugagccucaucaacgacaugcccaucaccaacgaccagaagaagcugaugagcaacaacgugcagaucguccggcagcaguccuacagcaucaugugcaucaucaaggaggaggugcuggccuacgugguccagcucccgcuguacggcgugaucgacacgcccugcuggaagcugcacaccagcccccucugcaccaccaacacgaaggagggguccaacaucugccugacccgcaccgaccggggcugguacugcgacaacgccggcuccgugagcuucuucccccaggcggagaccugcaagguccaguccaaccgcguguucugcgacacgaugaacagccugacccucccguccgaggucaaccugugcaacguggacaucuucaaccccaaguacgacugcaagaucaugaccagcaagaccgacguguccagcuccgucaucacgagccugggggccaucguguccugcuacggcaagaccaagugcaccgccagcaacaagaaccgggggaucaucaagaccuucuccaacggcugcgacuacgugagcaacaagggcgucgacacgguguccguggggaacacccucuacugcgucaacaagcaggagggccagagccuguacgugaagggggagcccaucaucaacuucuacgacccccugguguucccgagcgacgaguucgacgccuccaucagccaggucaacgagaagaucaaccagucccucgccuucauccgcaagagcgacgagcugcugcacaacgugaacgcgggcaaguccaccaccaacaucaugaucaccacgaucaucaucgugaucaucgucauccuccugagccugaucgccguggggcuccugcuguacugcaaggcccgguccacccccgugacccugagcaaggaccagcucuccggcaucaacaacaucgccuucagcaacugaggacuaguggaagcauuuuccuggcugauuaaaagaaauuacucagcuauggucaucuguuccuguuagaaggcuaugcagcauauuauauacuaugcgcauguuaugaaaugcauaauaaaaaauuuuaaaaaaucuaaaagaucuaaaaaaaaaaaaaaaaaaaaaaaaaaaaaaaaaaaaaaaaaaaaaaaaaaaaaaaaaaaaaaaaugcaucccccccccccccccccccccccccccccccaaaggcucuuuucagagccaccagaauu

SEQ ID NO: 2473 - RNA, 2006 nt, Artificial Sequence
  mRNA product Design c-2 comprising derived and/or modified sequence from HRSV(A2)__F_DSCav1_mut2 (opt2)
gggagacuccugucgggcggaaguaggaggaguagaguuuaaaaacaguacucuuuuuccgguucgggacguaguugaagcaacgacaagccggauaaccgcucuugagacaggaagcuuaccauggagcuccucauccucaaggccaacgccaucaccaccauccucaccgccgucaccuucugcuucgccuccggccagaacaucaccgaggaguucuaccaguccaccugcuccgccgucuccaagggcuaccucggcgcccuccgcaccggcugguacaccuccgucaucaccaucgagcucuccaacaucaaggagaacaagugcaacggcaccgacgccaaggucaagcucaucaagcaggagcucgacaaguacaagaacgccgucaccgaccuccagcuccucaugcaguccacccccgccaccggcuccggcuccgccaucugcuccggcgucgccgucugcaagguccuccaccucgagggcgaggucaacaagaucaaguccgcccuccucuccaccaacaaggccgucgucucccucuccaacggcgucuccguccucaccuucaagguccucgaccucaagaacuacaucgacaagcagcuccuccccauccucaacaagcaguccugcuccauccccaacaucgagaccgucaucgaguuccagcagaagaacaaccgccuccucgagaucacccgcgaguucuccgucaacgccggcgucaccacccccgucuccaccuacaugcucaccaacuccgagcuccucucccucaucaacgacaugcccaucaccaacgaccagaagaagcucauguccaacaacguccagaucguccgccagcaguccuacuccaucaugugcaucaucaaggaggagguccucgccuacgucguccagcucccccucuacggcgucaucgacacccccugcuggaagcuccacaccuccccccucugcaccaccaacaccaaggagggcuccaacaucugccucacccgcaccgaccgcggcugguacugcgacaacgccggcuccgucuccuucuucccccaggccgagaccugcaagguccaguccaaccgcgucuucugcgacaccaugaacucccucacccuccccuccgaggucaaccucugcaacgucgacaucuucaaccccaaguacgacugcaagaucaugaccuccaagaccgacgucuccuccuccgucaucaccucccucggcgccaucgucuccugcuacggcaagaccaagugcaccgccuccaacaagaaccgcggcaucaucaagaccuucuccaacggcugcgacuacgucuccaacaagggcgucgacaccgucuccgucggcaacacccucuacugcgucaacaagcaggagggccagucccucuacgucaagggcgagcccaucaucaacuucuacgacccccucgucuuccccuccgacgaguucgacgccuccaucucccaggucaacgagaagaucaaccagucccucgccuucauccgcaaguccgacgagcuccuccacaacgucaacgccggcaaguccaccaccaacaucaugaucaccaccaucaucaucgucaucaucgucauccuccucucccucaucgccgucggccuccuccucuacugcaaggcccgcuccacccccgucacccucuccaaggaccagcucuccggcaucaacaacaucgccuucuccaacugaggacuaguggaagcauuuuccuggcugauuaaaagaaauuacucagcuauggucaucuguuccuguuagaaggcuaugcagcauauuauauacuaugcgcauguuaugaaaugcauaauaaaaaauuuuaaaaaaucuaaaagaucuaaaaaaaaaaaaaaaaaaaaaaaaaaaaaaaaaaaaaaaaaaaaaaaaaaaaaaaaaaaaaaaaugcaucccccccccccccccccccccccccccccccaaaggcucuuuucagagccaccagaauu

SEQ ID NO: 2474 - RNA, 2006 nt, Artificial Sequence
  mRNA product Design c-2 comprising derived and/or modified sequence from HRSV(A2)__F_DSCav1_mut2 (opt3)
gggagacuccugucgggcggaaguaggaggaguagaguuuaaaaacaguacucuuuuuccgguucgggacguaguugaagcaacgacaagccggauaaccgcucuugagacaggaagcuuaccauggagcugcucauccuuaaggccaacgcuauuaccacaauacugacugcagugacguucugcuuugccagcggccagaauaucaccgaagaguucuaccaauccacauguucugcggucucaaaaggguauuugggagcuuuaagaacugguugguacaccaguguuauuacaaucgaacugagcaacauuaaggagaauaaaugcaacggcaccgacgccaaggugaaacuaaucaagcaggaacucgauaaguauaaaaaugcaguaacugaccugcagcuucugaugcaguccacacccgccaccgggucuggaucggcuauauguucaggcguggcagucugcaagguguugcaccucgagggugagguuaacaaaaucaagagcgcccugcugaguacgaauaaagcuguggucucccucucuaacggggugagcguauuaacuuuuaagguucuggaucuuaagaauuacauugacaaacaauugcugccuauccuaaacaagcaguccuguucaauuccaaauaucgaaaccgugauagaguuccagcagaaaaacaauaggcuccuggaaauuacacgggaguuuagugucaacgccggagugacuaccccggugagcacauauaugcuuaccaauucugagcuguugucccucaucaacgauaugcccauuacgaacgaccaaaagaaacugaugucaaauaacguccagaucguucgccagcagagcuacaguaucaugugcauuauaaaggaagagguguuagcguauguagugcaacugccucucuacggcgucaucgauacuccauguuggaaacuucauacaucuccccugugcaccacuaauacaaaggaaggcuccaacauuuguuugacccgaacggaccgugggugguacugcgauaaugcaggaagcgugucguucuuuccucaggccgagaccuguaagguucagucuaacagaguguucugcgacacaaugaacucccuaacucugccaucagaagucaaucucugcaauguggauaucuuuaaccccaaauaugacuguaagauaaugaccaguaaaacagauguaagcuccucuguuauuacuagccugggugcuaucgugucaugcuacggcaagaccaaauguacagccaguaauaagaacagggggaucauuaagaccuucuccaauggaugcgacuaugucagcaacaaaggcguggacacugucucuguggguaauacgcuuuacuguguuaacaagcaagaggggcagucacuguaugugaaaggagagccuaucauuaacuuuuacgauccauugguauucccgagugacgaauuugaugcaagcauaucccaggucaaugagaagaucaaccagucucucgcuuucauucggaaaucggacgaacuguuacacaaugugaacgccggcaagagcacaaccaauaucaugaucacuaccauuauaaucguuauuaucgugauucugcuaucccucaucgcggucggccugcuuuuguauugcaaggcccgcucaacacccgugacccugaguaaagaucaacucucugggauaaacaauaucgcauucagcaacugaggacuaguggaagcauuuuccuggcugauuaaaagaaauuacucagcuauggucaucuguuccuguuagaaggcuaugcagcauauuauauacuaugcgcauguuaugaaaugcauaauaaaaaauuuuaaaaaaucuaaaagaucuaaaaaaaaaaaaaaaaaaaaaaaaaaaaaaaaaaaaaaaaaaaaaaaaaaaaaaaaaaaaaaaaugcaucccccccccccccccccccccccccccccccaaaggcucuuuucagagccaccagaauu

SEQ ID NO: 2475 - RNA, 2006 nt, Artificial Sequence
  mRNA product Design c-2 comprising derived and/or modified sequence from HRSV(A2)__F_DSCav1_mut2 (opt4)
gggagacuccugucgggcggaaguaggaggaguagaguuuaaaaacaguacucuuuuuccgguucgggacguaguugaagcaacgacaagccggauaaccgcucuugagacaggaagcuuaccauggagcugcugauccugaaggccaacgccaucaccaccauccugaccgccgugaccuucugcuucgccagcggccagaacaucaccgaggaguucuaccagagcaccugcagcgccgugagcaagggcuaccugggcgcccugagaaccggcugguacaccagcgugaucaccaucgagcugagcaacaucaaggagaacaagugcaacggcaccgacgccaaggugaagcugaucaagcaggagcuggacaaguacaagaacgccgugaccgaccugcagcugcugaugcagagcacccccgccaccggcagcggcagcgccaucugcagcggcguggccgugugcaaggugcugcaccuggagggcgaggugaacaagaucaagagcgcccugcugagcaccaacaaggccguggugagccugagcaacggcgugagcgugcugaccuucaaggugcuggaccugaagaacuacaucgacaagcagcugcugcccauccugaacaagcagagcugcagcauccccaacaucgagaccgugaucgaguuccagcagaagaacaacagacugcuggagaucaccagagaguucagcgugaacgccggcgugaccacccccgugagcaccuacaugcugaccaacagcgagcugcugagccugaucaacgacaugcccaucaccaacgaccagaagaagcugaugagcaacaacgugcagaucgugagacagcagagcuacagcaucaugugcaucaucaaggaggaggugcuggccuacguggugcagcugccccuguacggcgugaucgacacccccugcuggaagcugcacaccagcccccugugcaccaccaacaccaaggagggcagcaacaucugccugaccagaaccgacagaggcugguacugcgacaacgccggcagcgugagcuucuucccccaggccgagaccugcaaggugcagagcaacagaguguucugcgacaccaugaacagccugacccugcccagcgaggugaaccugugcaacguggacaucuucaaccccaaguacgacugcaagaucaugaccagcaagaccgacgugagcagcagcgugaucaccagccugggcgccaucgugagcugcuacggcaagaccaagugcaccgccagcaacaagaacagaggcaucaucaagaccuucagcaacggcugcgacuacgugagcaacaagggcguggacaccgugagcgugggcaacacccuguacugcgugaacaagcaggagggccagagccuguacgugaagggcgagcccaucaucaacuucuacgacccccugguguuccccagcgacgaguucgacgccagcaucagccaggugaacgagaagaucaaccagagccuggccuucaucagaaagagcgacgagcugcugcacaacgugaacgccggcaagagcaccaccaacaucaugaucaccaccaucaucaucgugaucaucgugauccugcugagccugaucgccgugggccugcugcuguacugcaaggccagaagcacccccgugacccugagcaaggaccagcugagcggcaucaacaacaucgccuucagcaacugaggacuaguggaagcauuuuccuggcugauuaaaagaaauuacucagcuauggucaucuguuccuguuagaaggcuaugcagcauauuauauacuaugcgcauguuaugaaaugcauaauaaaaaauuuuaaaaaaucuaaaagaucuaaaaaaaaaaaaaaaaaaaaaaaaaaaaaaaaaaaaaaaaaaaaaaaaaaaaaaaaaaaaaaaaugcaucccccccccccccccccccccccccccccccaaaggcucuuuucagagccaccagaauu

SEQ ID NO: 2476 - RNA, 2006 nt, Artificial Sequence
  mRNA product Design c-2 comprising derived and/or modified sequence from HRSV(A2)__F_DSCav1_mut2 (opt5)
gggagacuccugucgggcggaaguaggaggaguagaguuuaaaaacaguacucuuuuuccgguucgggacguaguugaagcaacgacaagccggauaaccgcucuugagacaggaagcuuaccauggagcugcucauccugaaggccaacgcuauuaccacaauccuuacggccgugaccuucugcuuugcgagcggccagaauauuacagaagaguucuaccaauccaccuguucugcugucagcaaaggguaucugggagcccucagaacaggcugguacaccuccguuaucacaauugaacugucuaacaucaaggagaauaaaugcaacgggaccgacgccaaggugaaacuuaucaagcaggaacuggauaaguauaaaaaugcugugacggaccuccagcugcugaugcagagcacccccgccacaggauccggcucugcuauuuguagcggggucgccgugugcaagguucuccaccuggagggagaggugaacaaaaucaaguccgcgcuucugagcaccaauaaagccgucgugucucucuccaacggcguuagcgugcugacauuuaagguccuugaucugaagaauuacauugacaaacaacuccugccuauccugaacaagcagucuuguuccauuccgaauaucgaaaccgugauugaguuccagcagaaaaacaaucggcuccuggaaaucacgcgcgaguuuagcgugaacgcuggcgucacaacccccguuucuacauauaugcuuaccaauuccgagcugcucagccugaucaacgauaugccuauuaccaacgaccaaaagaaacuuauguccaauaacgugcagaucgugagacagcagucuuacagcauuaugugcaucauuaaggaagagguccuggccuaugugguucaacucccccuguacggggugaucgauacaccuuguuggaaacugcauacgagcccccucugcaccacaaauaccaaggaaggauccaacaucugucugacacggaccgaccgcggcugguacugcgauaaugcugggucugucuccuucuuuccucaggccgagacguguaaggugcagagcaacagaguuuucugcgacacaaugaacucucuuacccugccgagcgaagugaaucucugcaaugucgauauuuuuaaccccaaauaugacuguaagaucaugaccuccaaaacagaugugucuagcuccgucauuaccagccugggagcgaucgugucuugcuacggcaagacaaaauguacggccuccaauaagaaccgggggauuaucaagaccuucagcaauggaugcgacuauguuucuaacaaaggcguggacacagucuccgugggcaauacccuuuacuguguuaacaagcaagaggggcagagccuguaugugaaaggagagccuaucauuaacuuuuacgauccccucgucuucccuuccgacgaauuugaugcuucuaucagccaggugaaugagaagauuaaccagucccuggccuucauccgcaaaucugacgaacugcuccacaaugugaacgcuggcaagagcacaaccaauauuaugaucacgaccauuaucaucguuauuaucgucauucugcuuucccugaucgccguggggcuccugcuguauugcaaggccagaagcacacccgugacccuuucuaaagaucaacucuccggaauuaacaauaucgcuuucagcaacugaggacuaguggaagcauuuuccuggcugauuaaaagaaauuacucagcuauggucaucuguuccuguuagaaggcuaugcagcauauuauauacuaugcgcauguuaugaaaugcauaauaaaaaauuuuaaaaaaucuaaaagaucuaaaaaaaaaaaaaaaaaaaaaaaaaaaaaaaaaaaaaaaaaaaaaaaaaaaaaaaaaaaaaaaaugcaucccccccccccccccccccccccccccccccaaaggcucuuuucagagccaccagaauu

SEQ ID NO: 2477 - RNA, 2006 nt, Artificial Sequence
  mRNA product Design c-2 comprising derived and/or modified sequence from HRSV(A2)__F_DSCav1_mut2 (opt6)
gggagacuccugucgggcggaaguaggaggaguagaguuuaaaaacaguacucuuuuuccgguucgggacguaguugaagcaacgacaagccggauaaccgcucuugagacaggaagcuuaccauggaacuacuaauccuaaaagcaaacgcaauuacaacuauacuuaccgccguaacauuuugcuucgcaucugggcaaaacauuaccgaagaauuuuaucaaucaacaugcucagcagucuccaaaggauaccuuggagcauuaagaaccggcugguauaccuccguaauaacaauugaacuaucuaauauaaaagaaaauaaauguaauggaacugacgcaaaaguuaaacuaauaaaacaagaacucgacaaauacaaaaacgccgucacagaccuacaacuacuaaugcaaucaacccccgcaacaggaucaggauccgcaaucugcagcggcgucgcaguuugcaaaguccuacauuuagaaggagaaguaaacaaaauaaaaucugcucuccucucuacaaacaaagcaguagugucacuuucaaacggaguaucaguucuaacauucaaaguacuagaccuaaaaaauuacauagacaaacaacuacuuccaauucuaaacaaacaauccuguuccauacccaacauagaaacaguaauagaauuucaacaaaaaaauaacagacuccuagaaauuacaagagaauuuuccgucaaugcaggaguaacaaccccaguaucaaccuacauguuaacuaacucagaacucuuaucacuaauaaacgacaugccaaucacuaaugaccaaaaaaaacucaugucaaauaacguacaaauaguccgacaacaaucauacuccaucaugugcauuauaaaagaagaaguacuagcauacgucguccaauuaccacuauacggcgucauagacacaccauguuggaaacuccacacaucaccacuaugcacuacaaauacaaaagaaggcuccaacaucugccuaacaagaacagacagagguugguauugcgacaacgcaggaucaguaucauuuuucccccaagcagaaacauguaaaguacaaucaaauagagucuucugcgacaccaugaacucauuaacacuaccuucagaagucaaccuaugcaacguagacaucuucaacccuaaauaugacugcaaaaucaugaccagcaaaaccgacguuucaucuuccguaauaacaucacuaggcgcaauagucucauguuacggcaaaacaaaauguacagcaucaaauaaaaaccguggaauaauaaaaacauuuucuaaugguugugacuacguaagcaauaaaggaguagauacaguaucagucggcaacaccuuauacuguguaaacaaacaagaaggccaaaguuuauacgucaaaggagaacccaucaucaacuucuacgacccauuaguauucccaucagacgaauuugaugcaagcauuucacaagucaacgaaaaaaucaaucaaucauuagcauucauccgaaaaucagacgaauuauuacacaacguaaacgccggaaaaucaaccacuaauauaaugauaaccacaauaaucaucguaauaauaguaauacuucucucacuaaucgcagucggacuccuucuauacugcaaagcaagaucuacaccaguaacacuauccaaagaucaacuaaguggcauaaacaacauagcauuuucuaacuaaggacuaguggaagcauuuuccuggcugauuaaaagaaauuacucagcuauggucaucuguuccuguuagaaggcuaugcagcauauuauauacuaugcgcauguuaugaaaugcauaauaaaaaauuuuaaaaaaucuaaaagaucuaaaaaaaaaaaaaaaaaaaaaaaaaaaaaaaaaaaaaaaaaaaaaaaaaaaaaaaaaaaaaaaaugcaucccccccccccccccccccccccccccccccaaaggcucuuuucagagccaccagaauu

SEQ ID NO: 2478 - RNA, 2006 nt, Artificial Sequence
  mRNA product Design c-2 comprising derived and/or modified sequence from HRSV(A2)__F_DSCav1_mut2 (opt11)
gggagacuccugucgggcggaaguaggaggaguagaguuuaaaaacaguacucuuuuuccgguucgggacguaguugaagcaacgacaagccggauaaccgcucuugagacaggaagcuuaccauggaacuccucauccuaaaagccaacgcgaucaccacaauccugacagccgucaccuucugcuucgccuccggccaaaacaucaccgaagaguucuaccaauccacaugcuccgccgucuccaagggcuaccugggcgcacuucguacaggcugguacaccuccguaauaaccaucgaacucuccaacaucaaagaaaacaaaugcaacggcacagacgcaaaagucaaacucaucaagcaagaacuugacaaauacaaaaaugcagucaccgaccuucaacuccucaugcaaucuacccccgccacaggcuccggcuccgcuaucugcuccggcgucgccgucugcaaaguccuccaccucgaaggugaaguaaacaaaauaaaauccgcccuccucuccaccaacaaagccgucgucucccuaucaaacggcgucuccgugcucaccuucaagguucucgaccugaaaaacuacauagacaaacagcuccuaccaauccuuaacaaacagagcugcuccauuccgaauaucgaaacgguaaucgaauuucaacagaaaaacaaccgccuccucgaaauaacgcgagaguucuccguaaacgcuggcgucaccacacccgucagcaccuacaugcuaacgaacuccgaacucuugucgcucaucaacgacaugcccauaaccaacgaccaaaagaaacuaauguccaauaacguacaaaucguacgccaacaaucuuacuccaucaugugcaucauaaaagaagaaguacuagcuuacgucguccaacucccacuguacggagucaucgacacccccugcuggaaacuccacaccucuccccucugcaccaccaacaccaaagagggcuccaacauuugccugacacgcaccgaccgcggcugguacugcgacaacgcaggcuccgucucguucuucccccaagccgaaaccugcaaaguccaauccaaccgcgucuucugcgacaccaugaacucccucacccuccccuccgaagucaaucuaugcaacguagacaucuucaacccgaaauaugacugcaaaauuaugacaucuaaaaccgacguguccuccucagucaucacuucccuaggagccaucguuuccuguuacggcaagaccaaaugcaccgccagcaacaaaaaccgaggcaucaucaaaaccuucuccaacggaugugacuaugucuccaacaagggcgucgacaccgucagcgucggcaacacccucuacugcgucaacaaacaagaaggccaaucccucuacgucaaaggagagcccauaaucaacuucuacgacccccucgucuucccauccgacgaguucgacgccucaaucucccaagucaacgagaaaaucaaccaauccuuagccuucauccguaaguccgacgaacuccuucacaacgucaacgccgguaaaucuaccaccaacaucaugauaacaacaauaauuaucgucaucaucgucauccuccuuucccucaucgcggucgggcuauugcucuacugcaaagcccgguccaccccaguaacccucucuaaagaccaacucagcggaaucaauaacauagccuucagcaauuaaggacuaguggaagcauuuuccuggcugauuaaaagaaauuacucagcuauggucaucuguuccuguuagaaggcuaugcagcauauuauauacuaugcgcauguuaugaaaugcauaauaaaaaauuuuaaaaaaucuaaaagaucuaaaaaaaaaaaaaaaaaaaaaaaaaaaaaaaaaaaaaaaaaaaaaaaaaaaaaaaaaaaaaaaaugcaucccccccccccccccccccccccccccccccaaaggcucuuuucagagccaccagaauu

SEQ ID NO: 2479 - RNA, 1983 nt, Artificial Sequence
  mRNA product Design c-3 comprising derived and/or modified sequence from HRSV(A2)__F_DSCav1_mut2 (opt1)
gggagaguccgcucagccagguugcagaagcggcuuagcguguguccuaaucuucucucugcguguagguaggccugugccgcaaacaagcuuaccauggagcugcucauccugaaggccaacgccaucaccaccauccugacggcggugaccuucugcuucgccagcggccagaacaucaccgaggaguucuaccaguccacgugcagcgccgucuccaagggguaccucggcgcccugcggaccggcugguacaccuccgugaucaccaucgagcugagcaacaucaaggagaacaagugcaacgggaccgacgccaaggugaagcucaucaagcaggagcuggacaaguacaagaacgcggucacggaccugcagcuccugaugcaguccaccccggcaaccggcuccggcuccgccaucugcagcggcgucgccgugugcaaggugcugcaccucgagggggaggucaacaagaucaagagcgcccugcuguccaccaacaaggccguggugagccucuccaacggcgucagcgugcugaccuucaaggugcuggaccucaagaacuacaucgacaagcagcugcugcccauccugaacaagcagagcugcuccauccccaacaucgagacggugaucgaguuccagcagaagaacaaccggcuccuggagaucacccgcgaguucagcgugaacgccggggucaccacccccguguccacguacaugcugaccaacagcgagcuccugucccugaucaacgacaugccgaucaccaacgaccagaagaagcucaugagcaacaacgugcagaucguccggcagcaguccuacagcaucaugugcaucaucaaggaggaggugcuggcguacgugguccagcugccccucuacggcgugaucgacacccccugcuggaagcugcacacgagcccccugugcaccaccaacaccaaggagggguccaacaucugccucacgcgcaccgaccggggcugguacugcgacaacgccggcagcgucuccuucuucccgcaggccgagaccugcaaggugcagagcaaccgcguguucugcgacaccaugaacucccugacgcugcccagcgagguaaaccucugcaacgucgacaucuucaaccccaaguacgacugcaagaucaugaccuccaagaccgacgugagcuccagcgugaucaccucccugggggccaucgucagcugcuacggcaagacgaagugcaccgccagcaacaagaaccgggggaucaucaagaccuucuccaacggcugcgacuacgugagcaacaagggcguggacaccguguccgucgggaacacccuguacugcgugaacaagcaggagggccagagccucuacgugaagggggagcccaucaucaacuucuacgacccgcuggucuuccccuccgacgaguucgacgcgagcaucucccaggugaacgagaagaucaaccagagccuggccuucauccgcaaguccgacgagcugcuccacaacgugaacgccggcaagagcacgaccaacaucaugaucaccaccaucaucaucgucaucaucgugauccugcugucccucaucgccguggggcugcugcucuacugcaaggcccggagcacgcccgucacccuguccaaggaccagcugagcggcaucaacaacaucgcguucuccaacugaggacuaguacuggcugcaucucccuuuccucuguccuccauccuucucccaggauggugaagggggaccugguacccagugauccccaccccaggauccuaaaucaugacuuaccugcuaauaaaaacucauuggaaaagugagaagaucuaaaaaaaaaaaaaaaaaaaaaaaaaaaaaaaaaaaaaaaaaaaaaaaaaaaaaaaaaaaaaaaaugcaucccccccccccccccccccccccccccccccaaaggcucuuuucagagccaccagaauu

SEQ ID NO: 2480 - RNA, 1983 nt, Artificial Sequence
  mRNA product Design c-3 comprising derived and/or modified sequence from HRSV(A2)__F_DSCav1_mut2 (opt1)
gggagaguccgcucagccagguugcagaagcggcuuagcguguguccuaaucuucucucugcguguagguaggccugugccgcaaacaagcuuaccauggagcugcucauccugaaggccaacgccaucaccaccauccugacggcggugaccuucugcuucgccagcggccagaacaucaccgaggaguucuaccaguccacgugcagcgccgucuccaagggguaccucggcgcccugcgcaccgggugguacaccagcgugaucaccaucgagcuguccaacaucaaggagaacaagugcaacggcaccgacgccaaggugaagcucaucaagcaggagcuggacaaguacaagaacgcggucacggaccugcagcuccugaugcagagcacccccgccaccggguccggcagcgccaucugcuccggcguggccgugugcaagguccugcaccucgagggggaggugaacaagaucaagagcgcgcugcuguccaccaacaaggccguggucagccucuccaacggcgugagcgugcugacguucaagguccuggaccucaagaacuacaucgacaagcagcugcugccgauccucaacaagcaguccugcagcauccccaacaucgagaccgugaucgaguuccagcagaagaacaaccggcugcuggagaucacccgcgaguucuccgugaacgccggggucaccacgcccgugagcaccuacaugcucaccaacuccgagcugcugagccucaucaacgacaugcccaucaccaacgaccagaagaagcugaugagcaacaacgugcagaucguccggcagcaguccuacagcaucaugugcaucaucaaggaggaggugcuggccuacgugguccagcucccgcuguacggcgugaucgacacgcccugcuggaagcugcacaccagcccccucugcaccaccaacacgaaggagggguccaacaucugccugacccgcaccgaccggggcugguacugcgacaacgccggcuccgugagcuucuucccccaggcggagaccugcaagguccaguccaaccgcguguucugcgacacgaugaacagccugacccucccguccgaggucaaccugugcaacguggacaucuucaaccccaaguacgacugcaagaucaugaccagcaagaccgacguguccagcuccgucaucacgagccugggggccaucguguccugcuacggcaagaccaagugcaccgccagcaacaagaaccgggggaucaucaagaccuucuccaacggcugcgacuacgugagcaacaagggcgucgacacgguguccguggggaacacccucuacugcgucaacaagcaggagggccagagccuguacgugaagggggagcccaucaucaacuucuacgacccccugguguucccgagcgacgaguucgacgccuccaucagccaggucaacgagaagaucaaccagucccucgccuucauccgcaagagcgacgagcugcugcacaacgugaacgcgggcaaguccaccaccaacaucaugaucaccacgaucaucaucgugaucaucgucauccuccugagccugaucgccguggggcuccugcuguacugcaaggcccgguccacccccgugacccugagcaaggaccagcucuccggcaucaacaacaucgccuucagcaacugaggacuaguacuggcugcaucucccuuuccucuguccuccauccuucucccaggauggugaagggggaccugguacccagugauccccaccccaggauccuaaaucaugacuuaccugcuaauaaaaacucauuggaaaagugagaagaucuaaaaaaaaaaaaaaaaaaaaaaaaaaaaaaaaaaaaaaaaaaaaaaaaaaaaaaaaaaaaaaaaugcaucccccccccccccccccccccccccccccccaaaggcucuuuucagagccaccagaauu

SEQ ID NO: 2481 - RNA, 1983 nt, Artificial Sequence
  mRNA product Design c-3 comprising derived and/or modified sequence from HRSV(A2)__F_DSCav1_mut2 (opt2)
gggagaguccgcucagccagguugcagaagcggcuuagcguguguccuaaucuucucucugcguguagguaggccugugccgcaaacaagcuuaccauggagcuccucauccucaaggccaacgccaucaccaccauccucaccgccgucaccuucugcuucgccuccggccagaacaucaccgaggaguucuaccaguccaccugcuccgccgucuccaagggcuaccucggcgcccuccgcaccggcugguacaccuccgucaucaccaucgagcucuccaacaucaaggagaacaagugcaacggcaccgacgccaaggucaagcucaucaagcaggagcucgacaaguacaagaacgccgucaccgaccuccagcuccucaugcaguccacccccgccaccggcuccggcuccgccaucugcuccggcgucgccgucugcaagguccuccaccucgagggcgaggucaacaagaucaaguccgcccuccucuccaccaacaaggccgucgucucccucuccaacggcgucuccguccucaccuucaagguccucgaccucaagaacuacaucgacaagcagcuccuccccauccucaacaagcaguccugcuccauccccaacaucgagaccgucaucgaguuccagcagaagaacaaccgccuccucgagaucacccgcgaguucuccgucaacgccggcgucaccacccccgucuccaccuacaugcucaccaacuccgagcuccucucccucaucaacgacaugcccaucaccaacgaccagaagaagcucauguccaacaacguccagaucguccgccagcaguccuacuccaucaugugcaucaucaaggaggagguccucgccuacgucguccagcucccccucuacggcgucaucgacacccccugcuggaagcuccacaccuccccccucugcaccaccaacaccaaggagggcuccaacaucugccucacccgcaccgaccgcggcugguacugcgacaacgccggcuccgucuccuucuucccccaggccgagaccugcaagguccaguccaaccgcgucuucugcgacaccaugaacucccucacccuccccuccgaggucaaccucugcaacgucgacaucuucaaccccaaguacgacugcaagaucaugaccuccaagaccgacgucuccuccuccgucaucaccucccucggcgccaucgucuccugcuacggcaagaccaagugcaccgccuccaacaagaaccgcggcaucaucaagaccuucuccaacggcugcgacuacgucuccaacaagggcgucgacaccgucuccgucggcaacacccucuacugcgucaacaagcaggagggccagucccucuacgucaagggcgagcccaucaucaacuucuacgacccccucgucuuccccuccgacgaguucgacgccuccaucucccaggucaacgagaagaucaaccagucccucgccuucauccgcaaguccgacgagcuccuccacaacgucaacgccggcaaguccaccaccaacaucaugaucaccaccaucaucaucgucaucaucgucauccuccucucccucaucgccgucggccuccuccucuacugcaaggcccgcuccacccccgucacccucuccaaggaccagcucuccggcaucaacaacaucgccuucuccaacugaggacuaguacuggcugcaucucccuuuccucuguccuccauccuucucccaggauggugaagggggaccugguacccagugauccccaccccaggauccuaaaucaugacuuaccugcuaauaaaaacucauuggaaaagugagaagaucuaaaaaaaaaaaaaaaaaaaaaaaaaaaaaaaaaaaaaaaaaaaaaaaaaaaaaaaaaaaaaaaaugcaucccccccccccccccccccccccccccccccaaaggcucuuuucagagccaccagaauu

SEQ ID NO: 2482 - RNA, 1983 nt, Artificial Sequence
  mRNA product Design c-3 comprising derived and/or modified sequence from HRSV(A2)__F_DSCav1_mut2 (opt3)
gggagaguccgcucagccagguugcagaagcggcuuagcguguguccuaaucuucucucugcguguagguaggccugugccgcaaacaagcuuaccauggagcugcucauccuuaaggccaacgcuauuaccacaauacugacugcagugacguucugcuuugccagcggccagaauaucaccgaagaguucuaccaauccacauguucugcggucucaaaaggguauuugggagcuuuaagaacugguugguacaccaguguuauuacaaucgaacugagcaacauuaaggagaauaaaugcaacggcaccgacgccaaggugaaacuaaucaagcaggaacucgauaaguauaaaaaugcaguaacugaccugcagcuucugaugcaguccacacccgccaccgggucuggaucggcuauauguucaggcguggcagucugcaagguguugcaccucgagggugagguuaacaaaaucaagagcgcccugcugaguacgaauaaagcuguggucucccucucuaacggggugagcguauuaacuuuuaagguucuggaucuuaagaauuacauugacaaacaauugcugccuauccuaaacaagcaguccuguucaauuccaaauaucgaaaccgugauagaguuccagcagaaaaacaauaggcuccuggaaauuacacgggaguuuagugucaacgccggagugacuaccccggugagcacauauaugcuuaccaauucugagcuguugucccucaucaacgauaugcccauuacgaacgaccaaaagaaacugaugucaaauaacguccagaucguucgccagcagagcuacaguaucaugugcauuauaaaggaagagguguuagcguauguagugcaacugccucucuacggcgucaucgauacuccauguuggaaacuucauacaucuccccugugcaccacuaauacaaaggaaggcuccaacauuuguuugacccgaacggaccgugggugguacugcgauaaugcaggaagcgugucguucuuuccucaggccgagaccuguaagguucagucuaacagaguguucugcgacacaaugaacucccuaacucugccaucagaagucaaucucugcaauguggauaucuuuaaccccaaauaugacuguaagauaaugaccaguaaaacagauguaagcuccucuguuauuacuagccugggugcuaucgugucaugcuacggcaagaccaaauguacagccaguaauaagaacagggggaucauuaagaccuucuccaauggaugcgacuaugucagcaacaaaggcguggacacugucucuguggguaauacgcuuuacuguguuaacaagcaagaggggcagucacuguaugugaaaggagagccuaucauuaacuuuuacgauccauugguauucccgagugacgaauuugaugcaagcauaucccaggucaaugagaagaucaaccagucucucgcuuucauucggaaaucggacgaacuguuacacaaugugaacgccggcaagagcacaaccaauaucaugaucacuaccauuauaaucguuauuaucgugauucugcuaucccucaucgcggucggccugcuuuuguauugcaaggcccgcucaacacccgugacccugaguaaagaucaacucucugggauaaacaauaucgcauucagcaacugaggacuaguacuggcugcaucucccuuuccucuguccuccauccuucucccaggauggugaagggggaccugguacccagugauccccaccccaggauccuaaaucaugacuuaccugcuaauaaaaacucauuggaaaagugagaagaucuaaaaaaaaaaaaaaaaaaaaaaaaaaaaaaaaaaaaaaaaaaaaaaaaaaaaaaaaaaaaaaaaugcaucccccccccccccccccccccccccccccccaaaggcucuuuucagagccaccagaauu

SEQ ID NO: 2483 - RNA, 1983 nt, Artificial Sequence
  mRNA product Design c-3 comprising derived and/or modified sequence from HRSV(A2)__F_DSCav1_mut2 (opt4)
gggagaguccgcucagccagguugcagaagcggcuuagcguguguccuaaucuucucucugcguguagguaggccugugccgcaaacaagcuuaccauggagcugcugauccugaaggccaacgccaucaccaccauccugaccgccgugaccuucugcuucgccagcggccagaacaucaccgaggaguucuaccagagcaccugcagcgccgugagcaagggcuaccugggcgcccugagaaccggcugguacaccagcgugaucaccaucgagcugagcaacaucaaggagaacaagugcaacggcaccgacgccaaggugaagcugaucaagcaggagcuggacaaguacaagaacgccgugaccgaccugcagcugcugaugcagagcacccccgccaccggcagcggcagcgccaucugcagcggcguggccgugugcaaggugcugcaccuggagggcgaggugaacaagaucaagagcgcccugcugagcaccaacaaggccguggugagccugagcaacggcgugagcgugcugaccuucaaggugcuggaccugaagaacuacaucgacaagcagcugcugcccauccugaacaagcagagcugcagcauccccaacaucgagaccgugaucgaguuccagcagaagaacaacagacugcuggagaucaccagagaguucagcgugaacgccggcgugaccacccccgugagcaccuacaugcugaccaacagcgagcugcugagccugaucaacgacaugcccaucaccaacgaccagaagaagcugaugagcaacaacgugcagaucgugagacagcagagcuacagcaucaugugcaucaucaaggaggaggugcuggccuacguggugcagcugccccuguacggcgugaucgacacccccugcuggaagcugcacaccagcccccugugcaccaccaacaccaaggagggcagcaacaucugccugaccagaaccgacagaggcugguacugcgacaacgccggcagcgugagcuucuucccccaggccgagaccugcaaggugcagagcaacagaguguucugcgacaccaugaacagccugacccugcccagcgaggugaaccugugcaacguggacaucuucaaccccaaguacgacugcaagaucaugaccagcaagaccgacgugagcagcagcgugaucaccagccugggcgccaucgugagcugcuacggcaagaccaagugcaccgccagcaacaagaacagaggcaucaucaagaccuucagcaacggcugcgacuacgugagcaacaagggcguggacaccgugagcgugggcaacacccuguacugcgugaacaagcaggagggccagagccuguacgugaagggcgagcccaucaucaacuucuacgacccccugguguuccccagcgacgaguucgacgccagcaucagccaggugaacgagaagaucaaccagagccuggccuucaucagaaagagcgacgagcugcugcacaacgugaacgccggcaagagcaccaccaacaucaugaucaccaccaucaucaucgugaucaucgugauccugcugagccugaucgccgugggccugcugcuguacugcaaggccagaagcacccccgugacccugagcaaggaccagcugagcggcaucaacaacaucgccuucagcaacugaggacuaguacuggcugcaucucccuuuccucuguccuccauccuucucccaggauggugaagggggaccugguacccagugauccccaccccaggauccuaaaucaugacuuaccugcuaauaaaaacucauuggaaaagugagaagaucuaaaaaaaaaaaaaaaaaaaaaaaaaaaaaaaaaaaaaaaaaaaaaaaaaaaaaaaaaaaaaaaaugcaucccccccccccccccccccccccccccccccaaaggcucuuuucagagccaccagaauu

SEQ ID NO: 2484 - RNA, 1983 nt, Artificial Sequence
  mRNA product Design c-3 comprising derived and/or modified sequence from HRSV(A2)__F_DSCav1_mut2 (opt5)
gggagaguccgcucagccagguugcagaagcggcuuagcguguguccuaaucuucucucugcguguagguaggccugugccgcaaacaagcuuaccauggagcugcucauccugaaggccaacgcuauuaccacaauccuuacggccgugaccuucugcuuugcgagcggccagaauauuacagaagaguucuaccaauccaccuguucugcugucagcaaaggguaucugggagcccucagaacaggcugguacaccuccguuaucacaauugaacugucuaacaucaaggagaauaaaugcaacgggaccgacgccaaggugaaacuuaucaagcaggaacuggauaaguauaaaaaugcugugacggaccuccagcugcugaugcagagcacccccgccacaggauccggcucugcuauuuguagcggggucgccgugugcaagguucuccaccuggagggagaggugaacaaaaucaaguccgcgcuucugagcaccaauaaagccgucgugucucucuccaacggcguuagcgugcugacauuuaagguccuugaucugaagaauuacauugacaaacaacuccugccuauccugaacaagcagucuuguuccauuccgaauaucgaaaccgugauugaguuccagcagaaaaacaaucggcuccuggaaaucacgcgcgaguuuagcgugaacgcuggcgucacaacccccguuucuacauauaugcuuaccaauuccgagcugcucagccugaucaacgauaugccuauuaccaacgaccaaaagaaacuuauguccaauaacgugcagaucgugagacagcagucuuacagcauuaugugcaucauuaaggaagagguccuggccuaugugguucaacucccccuguacggggugaucgauacaccuuguuggaaacugcauacgagcccccucugcaccacaaauaccaaggaaggauccaacaucugucugacacggaccgaccgcggcugguacugcgauaaugcugggucugucuccuucuuuccucaggccgagacguguaaggugcagagcaacagaguuuucugcgacacaaugaacucucuuacccugccgagcgaagugaaucucugcaaugucgauauuuuuaaccccaaauaugacuguaagaucaugaccuccaaaacagaugugucuagcuccgucauuaccagccugggagcgaucgugucuugcuacggcaagacaaaauguacggccuccaauaagaaccgggggauuaucaagaccuucagcaauggaugcgacuauguuucuaacaaaggcguggacacagucuccgugggcaauacccuuuacuguguuaacaagcaagaggggcagagccuguaugugaaaggagagccuaucauuaacuuuuacgauccccucgucuucccuuccgacgaauuugaugcuucuaucagccaggugaaugagaagauuaaccagucccuggccuucauccgcaaaucugacgaacugcuccacaaugugaacgcuggcaagagcacaaccaauauuaugaucacgaccauuaucaucguuauuaucgucauucugcuuucccugaucgccguggggcuccugcuguauugcaaggccagaagcacacccgugacccuuucuaaagaucaacucuccggaauuaacaauaucgcuuucagcaacugaggacuaguacuggcugcaucucccuuuccucuguccuccauccuucucccaggauggugaagggggaccugguacccagugauccccaccccaggauccuaaaucaugacuuaccugcuaauaaaaacucauuggaaaagugagaagaucuaaaaaaaaaaaaaaaaaaaaaaaaaaaaaaaaaaaaaaaaaaaaaaaaaaaaaaaaaaaaaaaaugcaucccccccccccccccccccccccccccccccaaaggcucuuuucagagccaccagaauu

SEQ ID NO: 2485 - RNA, 1983 nt, Artificial Sequence
  mRNA product Design c-3 comprising derived and/or modified sequence from HRSV(A2)__F_DSCav1_mut2 (opt6)
gggagaguccgcucagccagguugcagaagcggcuuagcguguguccuaaucuucucucugcguguagguaggccugugccgcaaacaagcuuaccauggaacuacuaauccuaaaagcaaacgcaauuacaacuauacuuaccgccguaacauuuugcuucgcaucugggcaaaacauuaccgaagaauuuuaucaaucaacaugcucagcagucuccaaaggauaccuuggagcauuaagaaccggcugguauaccuccguaauaacaauugaacuaucuaauauaaaagaaaauaaauguaauggaacugacgcaaaaguuaaacuaauaaaacaagaacucgacaaauacaaaaacgccgucacagaccuacaacuacuaaugcaaucaacccccgcaacaggaucaggauccgcaaucugcagcggcgucgcaguuugcaaaguccuacauuuagaaggagaaguaaacaaaauaaaaucugcucuccucucuacaaacaaagcaguagugucacuuucaaacggaguaucaguucuaacauucaaaguacuagaccuaaaaaauuacauagacaaacaacuacuuccaauucuaaacaaacaauccuguuccauacccaacauagaaacaguaauagaauuucaacaaaaaaauaacagacuccuagaaauuacaagagaauuuuccgucaaugcaggaguaacaaccccaguaucaaccuacauguuaacuaacucagaacucuuaucacuaauaaacgacaugccaaucacuaaugaccaaaaaaaacucaugucaaauaacguacaaauaguccgacaacaaucauacuccaucaugugcauuauaaaagaagaaguacuagcauacgucguccaauuaccacuauacggcgucauagacacaccauguuggaaacuccacacaucaccacuaugcacuacaaauacaaaagaaggcuccaacaucugccuaacaagaacagacagagguugguauugcgacaacgcaggaucaguaucauuuuucccccaagcagaaacauguaaaguacaaucaaauagagucuucugcgacaccaugaacucauuaacacuaccuucagaagucaaccuaugcaacguagacaucuucaacccuaaauaugacugcaaaaucaugaccagcaaaaccgacguuucaucuuccguaauaacaucacuaggcgcaauagucucauguuacggcaaaacaaaauguacagcaucaaauaaaaaccguggaauaauaaaaacauuuucuaaugguugugacuacguaagcaauaaaggaguagauacaguaucagucggcaacaccuuauacuguguaaacaaacaagaaggccaaaguuuauacgucaaaggagaacccaucaucaacuucuacgacccauuaguauucccaucagacgaauuugaugcaagcauuucacaagucaacgaaaaaaucaaucaaucauuagcauucauccgaaaaucagacgaauuauuacacaacguaaacgccggaaaaucaaccacuaauauaaugauaaccacaauaaucaucguaauaauaguaauacuucucucacuaaucgcagucggacuccuucuauacugcaaagcaagaucuacaccaguaacacuauccaaagaucaacuaaguggcauaaacaacauagcauuuucuaacuaaggacuaguacuggcugcaucucccuuuccucuguccuccauccuucucccaggauggugaagggggaccugguacccagugauccccaccccaggauccuaaaucaugacuuaccugcuaauaaaaacucauuggaaaagugagaagaucuaaaaaaaaaaaaaaaaaaaaaaaaaaaaaaaaaaaaaaaaaaaaaaaaaaaaaaaaaaaaaaaaugcaucccccccccccccccccccccccccccccccaaaggcucuuuucagagccaccagaauu

SEQ ID NO: 2486 - RNA, 1983 nt, Artificial Sequence
  mRNA product Design c-3 comprising derived and/or modified sequence from HRSV(A2)__F_DSCav1_mut2 (opt11)
gggagaguccgcucagccagguugcagaagcggcuuagcguguguccuaaucuucucucugcguguagguaggccugugccgcaaacaagcuuaccauggaacuccucauccuaaaagccaacgcgaucaccacaauccugacagccgucaccuucugcuucgccuccggccaaaacaucaccgaagaguucuaccaauccacaugcuccgccgucuccaagggcuaccugggcgcacuucguacaggcugguacaccuccguaauaaccaucgaacucuccaacaucaaagaaaacaaaugcaacggcacagacgcaaaagucaaacucaucaagcaagaacuugacaaauacaaaaaugcagucaccgaccuucaacuccucaugcaaucuacccccgccacaggcuccggcuccgcuaucugcuccggcgucgccgucugcaaaguccuccaccucgaaggugaaguaaacaaaauaaaauccgcccuccucuccaccaacaaagccgucgucucccuaucaaacggcgucuccgugcucaccuucaagguucucgaccugaaaaacuacauagacaaacagcuccuaccaauccuuaacaaacagagcugcuccauuccgaauaucgaaacgguaaucgaauuucaacagaaaaacaaccgccuccucgaaauaacgcgagaguucuccguaaacgcuggcgucaccacacccgucagcaccuacaugcuaacgaacuccgaacucuugucgcucaucaacgacaugcccauaaccaacgaccaaaagaaacuaauguccaauaacguacaaaucguacgccaacaaucuuacuccaucaugugcaucauaaaagaagaaguacuagcuuacgucguccaacucccacuguacggagucaucgacacccccugcuggaaacuccacaccucuccccucugcaccaccaacaccaaagagggcuccaacauuugccugacacgcaccgaccgcggcugguacugcgacaacgcaggcuccgucucguucuucccccaagccgaaaccugcaaaguccaauccaaccgcgucuucugcgacaccaugaacucccucacccuccccuccgaagucaaucuaugcaacguagacaucuucaacccgaaauaugacugcaaaauuaugacaucuaaaaccgacguguccuccucagucaucacuucccuaggagccaucguuuccuguuacggcaagaccaaaugcaccgccagcaacaaaaaccgaggcaucaucaaaaccuucuccaacggaugugacuaugucuccaacaagggcgucgacaccgucagcgucggcaacacccucuacugcgucaacaaacaagaaggccaaucccucuacgucaaaggagagcccauaaucaacuucuacgacccccucgucuucccauccgacgaguucgacgccucaaucucccaagucaacgagaaaaucaaccaauccuuagccuucauccguaaguccgacgaacuccuucacaacgucaacgccgguaaaucuaccaccaacaucaugauaacaacaauaauuaucgucaucaucgucauccuccuuucccucaucgcggucgggcuauugcucuacugcaaagcccgguccaccccaguaacccucucuaaagaccaacucagcggaaucaauaacauagccuucagcaauuaaggacuaguacuggcugcaucucccuuuccucuguccuccauccuucucccaggauggugaagggggaccugguacccagugauccccaccccaggauccuaaaucaugacuuaccugcuaauaaaaacucauuggaaaagugagaagaucuaaaaaaaaaaaaaaaaaaaaaaaaaaaaaaaaaaaaaaaaaaaaaaaaaaaaaaaaaaaaaaaaugcaucccccccccccccccccccccccccccccccaaaggcucuuuucagagccaccagaauu

SEQ ID NO: 2487 - RNA, 1979 nt, Artificial Sequence
  mRNA product Design c-4 comprising derived and/or modified sequence from HRSV(A2)__F_DSCav1_mut2 (opt1)
gggagaguccgcucagccagguugcagaagcggcuuagcguguguccuaaucuucucucugcguguagguaggccugugccgcaaacaagcuuaccauggagcugcucauccugaaggccaacgccaucaccaccauccugacggcggugaccuucugcuucgccagcggccagaacaucaccgaggaguucuaccaguccacgugcagcgccgucuccaagggguaccucggcgcccugcggaccggcugguacaccuccgugaucaccaucgagcugagcaacaucaaggagaacaagugcaacgggaccgacgccaaggugaagcucaucaagcaggagcuggacaaguacaagaacgcggucacggaccugcagcuccugaugcaguccaccccggcaaccggcuccggcuccgccaucugcagcggcgucgccgugugcaaggugcugcaccucgagggggaggucaacaagaucaagagcgcccugcuguccaccaacaaggccguggugagccucuccaacggcgucagcgugcugaccuucaaggugcuggaccucaagaacuacaucgacaagcagcugcugcccauccugaacaagcagagcugcuccauccccaacaucgagacggugaucgaguuccagcagaagaacaaccggcuccuggagaucacccgcgaguucagcgugaacgccggggucaccacccccguguccacguacaugcugaccaacagcgagcuccugucccugaucaacgacaugccgaucaccaacgaccagaagaagcucaugagcaacaacgugcagaucguccggcagcaguccuacagcaucaugugcaucaucaaggaggaggugcuggcguacgugguccagcugccccucuacggcgugaucgacacccccugcuggaagcugcacacgagcccccugugcaccaccaacaccaaggagggguccaacaucugccucacgcgcaccgaccggggcugguacugcgacaacgccggcagcgucuccuucuucccgcaggccgagaccugcaaggugcagagcaaccgcguguucugcgacaccaugaacucccugacgcugcccagcgagguaaaccucugcaacgucgacaucuucaaccccaaguacgacugcaagaucaugaccuccaagaccgacgugagcuccagcgugaucaccucccugggggccaucgucagcugcuacggcaagacgaagugcaccgccagcaacaagaaccgggggaucaucaagaccuucuccaacggcugcgacuacgugagcaacaagggcguggacaccguguccgucgggaacacccuguacugcgugaacaagcaggagggccagagccucuacgugaagggggagcccaucaucaacuucuacgacccgcuggucuuccccuccgacgaguucgacgcgagcaucucccaggugaacgagaagaucaaccagagccuggccuucauccgcaaguccgacgagcugcuccacaacgugaacgccggcaagagcacgaccaacaucaugaucaccaccaucaucaucgucaucaucgugauccugcugucccucaucgccguggggcugcugcucuacugcaaggcccggagcacgcccgucacccuguccaaggaccagcugagcggcaucaacaacaucgcguucuccaacugaggacuaguggaagcauuuuccuggcugauuaaaagaaauuacucagcuauggucaucuguuccuguuagaaggcuaugcagcauauuauauacuaugcgcauguuaugaaaugcauaauaaaaaauuuuaaaaaaucuaaaagaucuaaaaaaaaaaaaaaaaaaaaaaaaaaaaaaaaaaaaaaaaaaaaaaaaaaaaaaaaaaaaaaaaugcaucccccccccccccccccccccccccccccccaaaggcucuuuucagagccaccagaauu

SEQ ID NO: 2488 - RNA, 1979 nt, Artificial Sequence
  mRNA product Design c-4 comprising derived and/or modified sequence from HRSV(A2)__F_DSCav1_mut2 (opt1)
gggagaguccgcucagccagguugcagaagcggcuuagcguguguccuaaucuucucucugcguguagguaggccugugccgcaaacaagcuuaccauggagcugcucauccugaaggccaacgccaucaccaccauccugacggcggugaccuucugcuucgccagcggccagaacaucaccgaggaguucuaccaguccacgugcagcgccgucuccaagggguaccucggcgcccugcgcaccgggugguacaccagcgugaucaccaucgagcuguccaacaucaaggagaacaagugcaacggcaccgacgccaaggugaagcucaucaagcaggagcuggacaaguacaagaacgcggucacggaccugcagcuccugaugcagagcacccccgccaccggguccggcagcgccaucugcuccggcguggccgugugcaagguccugcaccucgagggggaggugaacaagaucaagagcgcgcugcuguccaccaacaaggccguggucagccucuccaacggcgugagcgugcugacguucaagguccuggaccucaagaacuacaucgacaagcagcugcugccgauccucaacaagcaguccugcagcauccccaacaucgagaccgugaucgaguuccagcagaagaacaaccggcugcuggagaucacccgcgaguucuccgugaacgccggggucaccacgcccgugagcaccuacaugcucaccaacuccgagcugcugagccucaucaacgacaugcccaucaccaacgaccagaagaagcugaugagcaacaacgugcagaucguccggcagcaguccuacagcaucaugugcaucaucaaggaggaggugcuggccuacgugguccagcucccgcuguacggcgugaucgacacgcccugcuggaagcugcacaccagcccccucugcaccaccaacacgaaggagggguccaacaucugccugacccgcaccgaccggggcugguacugcgacaacgccggcuccgugagcuucuucccccaggcggagaccugcaagguccaguccaaccgcguguucugcgacacgaugaacagccugacccucccguccgaggucaaccugugcaacguggacaucuucaaccccaaguacgacugcaagaucaugaccagcaagaccgacguguccagcuccgucaucacgagccugggggccaucguguccugcuacggcaagaccaagugcaccgccagcaacaagaaccgggggaucaucaagaccuucuccaacggcugcgacuacgugagcaacaagggcgucgacacgguguccguggggaacacccucuacugcgucaacaagcaggagggccagagccuguacgugaagggggagcccaucaucaacuucuacgacccccugguguucccgagcgacgaguucgacgccuccaucagccaggucaacgagaagaucaaccagucccucgccuucauccgcaagagcgacgagcugcugcacaacgugaacgcgggcaaguccaccaccaacaucaugaucaccacgaucaucaucgugaucaucgucauccuccugagccugaucgccguggggcuccugcuguacugcaaggcccgguccacccccgugacccugagcaaggaccagcucuccggcaucaacaacaucgccuucagcaacugaggacuaguggaagcauuuuccuggcugauuaaaagaaauuacucagcuauggucaucuguuccuguuagaaggcuaugcagcauauuauauacuaugcgcauguuaugaaaugcauaauaaaaaauuuuaaaaaaucuaaaagaucuaaaaaaaaaaaaaaaaaaaaaaaaaaaaaaaaaaaaaaaaaaaaaaaaaaaaaaaaaaaaaaaaugcaucccccccccccccccccccccccccccccccaaaggcucuuuucagagccaccagaauu

SEQ ID NO: 2489 - RNA, 1979 nt, Artificial Sequence
  mRNA product Design c-4 comprising derived and/or modified sequence from HRSV(A2)__F_DSCav1_mut2 (opt2)
gggagaguccgcucagccagguugcagaagcggcuuagcguguguccuaaucuucucucugcguguagguaggccugugccgcaaacaagcuuaccauggagcuccucauccucaaggccaacgccaucaccaccauccucaccgccgucaccuucugcuucgccuccggccagaacaucaccgaggaguucuaccaguccaccugcuccgccgucuccaagggcuaccucggcgcccuccgcaccggcugguacaccuccgucaucaccaucgagcucuccaacaucaaggagaacaagugcaacggcaccgacgccaaggucaagcucaucaagcaggagcucgacaaguacaagaacgccgucaccgaccuccagcuccucaugcaguccacccccgccaccggcuccggcuccgccaucugcuccggcgucgccgucugcaagguccuccaccucgagggcgaggucaacaagaucaaguccgcccuccucuccaccaacaaggccgucgucucccucuccaacggcgucuccguccucaccuucaagguccucgaccucaagaacuacaucgacaagcagcuccuccccauccucaacaagcaguccugcuccauccccaacaucgagaccgucaucgaguuccagcagaagaacaaccgccuccucgagaucacccgcgaguucuccgucaacgccggcgucaccacccccgucuccaccuacaugcucaccaacuccgagcuccucucccucaucaacgacaugcccaucaccaacgaccagaagaagcucauguccaacaacguccagaucguccgccagcaguccuacuccaucaugugcaucaucaaggaggagguccucgccuacgucguccagcucccccucuacggcgucaucgacacccccugcuggaagcuccacaccuccccccucugcaccaccaacaccaaggagggcuccaacaucugccucacccgcaccgaccgcggcugguacugcgacaacgccggcuccgucuccuucuucccccaggccgagaccugcaagguccaguccaaccgcgucuucugcgacaccaugaacucccucacccuccccuccgaggucaaccucugcaacgucgacaucuucaaccccaaguacgacugcaagaucaugaccuccaagaccgacgucuccuccuccgucaucaccucccucggcgccaucgucuccugcuacggcaagaccaagugcaccgccuccaacaagaaccgcggcaucaucaagaccuucuccaacggcugcgacuacgucuccaacaagggcgucgacaccgucuccgucggcaacacccucuacugcgucaacaagcaggagggccagucccucuacgucaagggcgagcccaucaucaacuucuacgacccccucgucuuccccuccgacgaguucgacgccuccaucucccaggucaacgagaagaucaaccagucccucgccuucauccgcaaguccgacgagcuccuccacaacgucaacgccggcaaguccaccaccaacaucaugaucaccaccaucaucaucgucaucaucgucauccuccucucccucaucgccgucggccuccuccucuacugcaaggcccgcuccacccccgucacccucuccaaggaccagcucuccggcaucaacaacaucgccuucuccaacugaggacuaguggaagcauuuuccuggcugauuaaaagaaauuacucagcuauggucaucuguuccuguuagaaggcuaugcagcauauuauauacuaugcgcauguuaugaaaugcauaauaaaaaauuuuaaaaaaucuaaaagaucuaaaaaaaaaaaaaaaaaaaaaaaaaaaaaaaaaaaaaaaaaaaaaaaaaaaaaaaaaaaaaaaaugcaucccccccccccccccccccccccccccccccaaaggcucuuuucagagccaccagaauu

SEQ ID NO: 2490 - RNA, 1979 nt, Artificial Sequence
  mRNA product Design c-4 comprising derived and/or modified sequence from HRSV(A2)__F_DSCav1_mut2 (opt3)
gggagaguccgcucagccagguugcagaagcggcuuagcguguguccuaaucuucucucugcguguagguaggccugugccgcaaacaagcuuaccauggagcugcucauccuuaaggccaacgcuauuaccacaauacugacugcagugacguucugcuuugccagcggccagaauaucaccgaagaguucuaccaauccacauguucugcggucucaaaaggguauuugggagcuuuaagaacugguugguacaccaguguuauuacaaucgaacugagcaacauuaaggagaauaaaugcaacggcaccgacgccaaggugaaacuaaucaagcaggaacucgauaaguauaaaaaugcaguaacugaccugcagcuucugaugcaguccacacccgccaccgggucuggaucggcuauauguucaggcguggcagucugcaagguguugcaccucgagggugagguuaacaaaaucaagagcgcccugcugaguacgaauaaagcuguggucucccucucuaacggggugagcguauuaacuuuuaagguucuggaucuuaagaauuacauugacaaacaauugcugccuauccuaaacaagcaguccuguucaauuccaaauaucgaaaccgugauagaguuccagcagaaaaacaauaggcuccuggaaauuacacgggaguuuagugucaacgccggagugacuaccccggugagcacauauaugcuuaccaauucugagcuguugucccucaucaacgauaugcccauuacgaacgaccaaaagaaacugaugucaaauaacguccagaucguucgccagcagagcuacaguaucaugugcauuauaaaggaagagguguuagcguauguagugcaacugccucucuacggcgucaucgauacuccauguuggaaacuucauacaucuccccugugcaccacuaauacaaaggaaggcuccaacauuuguuugacccgaacggaccgugggugguacugcgauaaugcaggaagcgugucguucuuuccucaggccgagaccuguaagguucagucuaacagaguguucugcgacacaaugaacucccuaacucugccaucagaagucaaucucugcaauguggauaucuuuaaccccaaauaugacuguaagauaaugaccaguaaaacagauguaagcuccucuguuauuacuagccugggugcuaucgugucaugcuacggcaagaccaaauguacagccaguaauaagaacagggggaucauuaagaccuucuccaauggaugcgacuaugucagcaacaaaggcguggacacugucucuguggguaauacgcuuuacuguguuaacaagcaagaggggcagucacuguaugugaaaggagagccuaucauuaacuuuuacgauccauugguauucccgagugacgaauuugaugcaagcauaucccaggucaaugagaagaucaaccagucucucgcuuucauucggaaaucggacgaacuguuacacaaugugaacgccggcaagagcacaaccaauaucaugaucacuaccauuauaaucguuauuaucgugauucugcuaucccucaucgcggucggccugcuuuuguauugcaaggcccgcucaacacccgugacccugaguaaagaucaacucucugggauaaacaauaucgcauucagcaacugaggacuaguggaagcauuuuccuggcugauuaaaagaaauuacucagcuauggucaucuguuccuguuagaaggcuaugcagcauauuauauacuaugcgcauguuaugaaaugcauaauaaaaaauuuuaaaaaaucuaaaagaucuaaaaaaaaaaaaaaaaaaaaaaaaaaaaaaaaaaaaaaaaaaaaaaaaaaaaaaaaaaaaaaaaugcaucccccccccccccccccccccccccccccccaaaggcucuuuucagagccaccagaauu

SEQ ID NO: 2491 - RNA, 1979 nt, Artificial Sequence
  mRNA product Design c-4 comprising derived and/or modified sequence from HRSV(A2)__F_DSCav1_mut2 (opt4)
gggagaguccgcucagccagguugcagaagcggcuuagcguguguccuaaucuucucucugcguguagguaggccugugccgcaaacaagcuuaccauggagcugcugauccugaaggccaacgccaucaccaccauccugaccgccgugaccuucugcuucgccagcggccagaacaucaccgaggaguucuaccagagcaccugcagcgccgugagcaagggcuaccugggcgcccugagaaccggcugguacaccagcgugaucaccaucgagcugagcaacaucaaggagaacaagugcaacggcaccgacgccaaggugaagcugaucaagcaggagcuggacaaguacaagaacgccgugaccgaccugcagcugcugaugcagagcacccccgccaccggcagcggcagcgccaucugcagcggcguggccgugugcaaggugcugcaccuggagggcgaggugaacaagaucaagagcgcccugcugagcaccaacaaggccguggugagccugagcaacggcgugagcgugcugaccuucaaggugcuggaccugaagaacuacaucgacaagcagcugcugcccauccugaacaagcagagcugcagcauccccaacaucgagaccgugaucgaguuccagcagaagaacaacagacugcuggagaucaccagagaguucagcgugaacgccggcgugaccacccccgugagcaccuacaugcugaccaacagcgagcugcugagccugaucaacgacaugcccaucaccaacgaccagaagaagcugaugagcaacaacgugcagaucgugagacagcagagcuacagcaucaugugcaucaucaaggaggaggugcuggccuacguggugcagcugccccuguacggcgugaucgacacccccugcuggaagcugcacaccagcccccugugcaccaccaacaccaaggagggcagcaacaucugccugaccagaaccgacagaggcugguacugcgacaacgccggcagcgugagcuucuucccccaggccgagaccugcaaggugcagagcaacagaguguucugcgacaccaugaacagccugacccugcccagcgaggugaaccugugcaacguggacaucuucaaccccaaguacgacugcaagaucaugaccagcaagaccgacgugagcagcagcgugaucaccagccugggcgccaucgugagcugcuacggcaagaccaagugcaccgccagcaacaagaacagaggcaucaucaagaccuucagcaacggcugcgacuacgugagcaacaagggcguggacaccgugagcgugggcaacacccuguacugcgugaacaagcaggagggccagagccuguacgugaagggcgagcccaucaucaacuucuacgacccccugguguuccccagcgacgaguucgacgccagcaucagccaggugaacgagaagaucaaccagagccuggccuucaucagaaagagcgacgagcugcugcacaacgugaacgccggcaagagcaccaccaacaucaugaucaccaccaucaucaucgugaucaucgugauccugcugagccugaucgccgugggccugcugcuguacugcaaggccagaagcacccccgugacccugagcaaggaccagcugagcggcaucaacaacaucgccuucagcaacugaggacuaguggaagcauuuuccuggcugauuaaaagaaauuacucagcuauggucaucuguuccuguuagaaggcuaugcagcauauuauauacuaugcgcauguuaugaaaugcauaauaaaaaauuuuaaaaaaucuaaaagaucuaaaaaaaaaaaaaaaaaaaaaaaaaaaaaaaaaaaaaaaaaaaaaaaaaaaaaaaaaaaaaaaaugcaucccccccccccccccccccccccccccccccaaaggcucuuuucagagccaccagaauu

SEQ ID NO: 2492 - RNA, 1979 nt, Artificial Sequence
  mRNA product Design c-4 comprising derived and/or modified sequence from HRSV(A2)__F_DSCav1_mut2 (opt5)
gggagaguccgcucagccagguugcagaagcggcuuagcguguguccuaaucuucucucugcguguagguaggccugugccgcaaacaagcuuaccauggagcugcucauccugaaggccaacgcuauuaccacaauccuuacggccgugaccuucugcuuugcgagcggccagaauauuacagaagaguucuaccaauccaccuguucugcugucagcaaaggguaucugggagcccucagaacaggcugguacaccuccguuaucacaauugaacugucuaacaucaaggagaauaaaugcaacgggaccgacgccaaggugaaacuuaucaagcaggaacuggauaaguauaaaaaugcugugacggaccuccagcugcugaugcagagcacccccgccacaggauccggcucugcuauuuguagcggggucgccgugugcaagguucuccaccuggagggagaggugaacaaaaucaaguccgcgcuucugagcaccaauaaagccgucgugucucucuccaacggcguuagcgugcugacauuuaagguccuugaucugaagaauuacauugacaaacaacuccugccuauccugaacaagcagucuuguuccauuccgaauaucgaaaccgugauugaguuccagcagaaaaacaaucggcuccuggaaaucacgcgcgaguuuagcgugaacgcuggcgucacaacccccguuucuacauauaugcuuaccaauuccgagcugcucagccugaucaacgauaugccuauuaccaacgaccaaaagaaacuuauguccaauaacgugcagaucgugagacagcagucuuacagcauuaugugcaucauuaaggaagagguccuggccuaugugguucaacucccccuguacggggugaucgauacaccuuguuggaaacugcauacgagcccccucugcaccacaaauaccaaggaaggauccaacaucugucugacacggaccgaccgcggcugguacugcgauaaugcugggucugucuccuucuuuccucaggccgagacguguaaggugcagagcaacagaguuuucugcgacacaaugaacucucuuacccugccgagcgaagugaaucucugcaaugucgauauuuuuaaccccaaauaugacuguaagaucaugaccuccaaaacagaugugucuagcuccgucauuaccagccugggagcgaucgugucuugcuacggcaagacaaaauguacggccuccaauaagaaccgggggauuaucaagaccuucagcaauggaugcgacuauguuucuaacaaaggcguggacacagucuccgugggcaauacccuuuacuguguuaacaagcaagaggggcagagccuguaugugaaaggagagccuaucauuaacuuuuacgauccccucgucuucccuuccgacgaauuugaugcuucuaucagccaggugaaugagaagauuaaccagucccuggccuucauccgcaaaucugacgaacugcuccacaaugugaacgcuggcaagagcacaaccaauauuaugaucacgaccauuaucaucguuauuaucgucauucugcuuucccugaucgccguggggcuccugcuguauugcaaggccagaagcacacccgugacccuuucuaaagaucaacucuccggaauuaacaauaucgcuuucagcaacugaggacuaguggaagcauuuuccuggcugauuaaaagaaauuacucagcuauggucaucuguuccuguuagaaggcuaugcagcauauuauauacuaugcgcauguuaugaaaugcauaauaaaaaauuuuaaaaaaucuaaaagaucuaaaaaaaaaaaaaaaaaaaaaaaaaaaaaaaaaaaaaaaaaaaaaaaaaaaaaaaaaaaaaaaaugcaucccccccccccccccccccccccccccccccaaaggcucuuuucagagccaccagaauu

SEQ ID NO: 2493 - RNA, 1979 nt, Artificial Sequence
  mRNA product Design c-4 comprising derived and/or modified sequence from HRSV(A2)__F_DSCav1_mut2 (opt6)
gggagaguccgcucagccagguugcagaagcggcuuagcguguguccuaaucuucucucugcguguagguaggccugugccgcaaacaagcuuaccauggaacuacuaauccuaaaagcaaacgcaauuacaacuauacuuaccgccguaacauuuugcuucgcaucugggcaaaacauuaccgaagaauuuuaucaaucaacaugcucagcagucuccaaaggauaccuuggagcauuaagaaccggcugguauaccuccguaauaacaauugaacuaucuaauauaaaagaaaauaaauguaauggaacugacgcaaaaguuaaacuaauaaaacaagaacucgacaaauacaaaaacgccgucacagaccuacaacuacuaaugcaaucaacccccgcaacaggaucaggauccgcaaucugcagcggcgucgcaguuugcaaaguccuacauuuagaaggagaaguaaacaaaauaaaaucugcucuccucucuacaaacaaagcaguagugucacuuucaaacggaguaucaguucuaacauucaaaguacuagaccuaaaaaauuacauagacaaacaacuacuuccaauucuaaacaaacaauccuguuccauacccaacauagaaacaguaauagaauuucaacaaaaaaauaacagacuccuagaaauuacaagagaauuuuccgucaaugcaggaguaacaaccccaguaucaaccuacauguuaacuaacucagaacucuuaucacuaauaaacgacaugccaaucacuaaugaccaaaaaaaacucaugucaaauaacguacaaauaguccgacaacaaucauacuccaucaugugcauuauaaaagaagaaguacuagcauacgucguccaauuaccacuauacggcgucauagacacaccauguuggaaacuccacacaucaccacuaugcacuacaaauacaaaagaaggcuccaacaucugccuaacaagaacagacagagguugguauugcgacaacgcaggaucaguaucauuuuucccccaagcagaaacauguaaaguacaaucaaauagagucuucugcgacaccaugaacucauuaacacuaccuucagaagucaaccuaugcaacguagacaucuucaacccuaaauaugacugcaaaaucaugaccagcaaaaccgacguuucaucuuccguaauaacaucacuaggcgcaauagucucauguuacggcaaaacaaaauguacagcaucaaauaaaaaccguggaauaauaaaaacauuuucuaaugguugugacuacguaagcaauaaaggaguagauacaguaucagucggcaacaccuuauacuguguaaacaaacaagaaggccaaaguuuauacgucaaaggagaacccaucaucaacuucuacgacccauuaguauucccaucagacgaauuugaugcaagcauuucacaagucaacgaaaaaaucaaucaaucauuagcauucauccgaaaaucagacgaauuauuacacaacguaaacgccggaaaaucaaccacuaauauaaugauaaccacaauaaucaucguaauaauaguaauacuucucucacuaaucgcagucggacuccuucuauacugcaaagcaagaucuacaccaguaacacuauccaaagaucaacuaaguggcauaaacaacauagcauuuucuaacuaaggacuaguggaagcauuuuccuggcugauuaaaagaaauuacucagcuauggucaucuguuccuguuagaaggcuaugcagcauauuauauacuaugcgcauguuaugaaaugcauaauaaaaaauuuuaaaaaaucuaaaagaucuaaaaaaaaaaaaaaaaaaaaaaaaaaaaaaaaaaaaaaaaaaaaaaaaaaaaaaaaaaaaaaaaugcaucccccccccccccccccccccccccccccccaaaggcucuuuucagagccaccagaauu

SEQ ID NO: 2494 - RNA, 1979 nt, Artificial Sequence
  mRNA product Design c-4 comprising derived and/or modified sequence from HRSV(A2)__F_DSCav1_mut2 (opt11)
gggagaguccgcucagccagguugcagaagcggcuuagcguguguccuaaucuucucucugcguguagguaggccugugccgcaaacaagcuuaccauggaacuccucauccuaaaagccaacgcgaucaccacaauccugacagccgucaccuucugcuucgccuccggccaaaacaucaccgaagaguucuaccaauccacaugcuccgccgucuccaagggcuaccugggcgcacuucguacaggcugguacaccuccguaauaaccaucgaacucuccaacaucaaagaaaacaaaugcaacggcacagacgcaaaagucaaacucaucaagcaagaacuugacaaauacaaaaaugcagucaccgaccuucaacuccucaugcaaucuacccccgccacaggcuccggcuccgcuaucugcuccggcgucgccgucugcaaaguccuccaccucgaaggugaaguaaacaaaauaaaauccgcccuccucuccaccaacaaagccgucgucucccuaucaaacggcgucuccgugcucaccuucaagguucucgaccugaaaaacuacauagacaaacagcuccuaccaauccuuaacaaacagagcugcuccauuccgaauaucgaaacgguaaucgaauuucaacagaaaaacaaccgccuccucgaaauaacgcgagaguucuccguaaacgcuggcgucaccacacccgucagcaccuacaugcuaacgaacuccgaacucuugucgcucaucaacgacaugcccauaaccaacgaccaaaagaaacuaauguccaauaacguacaaaucguacgccaacaaucuuacuccaucaugugcaucauaaaagaagaaguacuagcuuacgucguccaacucccacuguacggagucaucgacacccccugcuggaaacuccacaccucuccccucugcaccaccaacaccaaagagggcuccaacauuugccugacacgcaccgaccgcggcugguacugcgacaacgcaggcuccgucucguucuucccccaagccgaaaccugcaaaguccaauccaaccgcgucuucugcgacaccaugaacucccucacccuccccuccgaagucaaucuaugcaacguagacaucuucaacccgaaauaugacugcaaaauuaugacaucuaaaaccgacguguccuccucagucaucacuucccuaggagccaucguuuccuguuacggcaagaccaaaugcaccgccagcaacaaaaaccgaggcaucaucaaaaccuucuccaacggaugugacuaugucuccaacaagggcgucgacaccgucagcgucggcaacacccucuacugcgucaacaaacaagaaggccaaucccucuacgucaaaggagagcccauaaucaacuucuacgacccccucgucuucccauccgacgaguucgacgccucaaucucccaagucaacgagaaaaucaaccaauccuuagccuucauccguaaguccgacgaacuccuucacaacgucaacgccgguaaaucuaccaccaacaucaugauaacaacaauaauuaucgucaucaucgucauccuccuuucccucaucgcggucgggcuauugcucuacugcaaagcccgguccaccccaguaacccucucuaaagaccaacucagcggaaucaauaacauagccuucagcaauuaaggacuaguggaagcauuuuccuggcugauuaaaagaaauuacucagcuauggucaucuguuccuguuagaaggcuaugcagcauauuauauacuaugcgcauguuaugaaaugcauaauaaaaaauuuuaaaaaaucuaaaagaucuaaaaaaaaaaaaaaaaaaaaaaaaaaaaaaaaaaaaaaaaaaaaaaaaaaaaaaaaaaaaaaaaugcaucccccccccccccccccccccccccccccccaaaggcucuuuucagagccaccagaauu

SEQ ID NO: 2495 - RNA, 1897 nt, Artificial Sequence
  mRNA product Design c-5 comprising derived and/or modified sequence from HRSV(A2)__F_DSCav1_mut2 (opt1)
gggagagcggcucggccauuuugucccagucaguccggaggcugcggcugcagaaguaccgccugcggaguaacugcaaagaagcuuaccauggagcugcucauccugaaggccaacgccaucaccaccauccugacggcggugaccuucugcuucgccagcggccagaacaucaccgaggaguucuaccaguccacgugcagcgccgucuccaagggguaccucggcgcccugcggaccggcugguacaccuccgugaucaccaucgagcugagcaacaucaaggagaacaagugcaacgggaccgacgccaaggugaagcucaucaagcaggagcuggacaaguacaagaacgcggucacggaccugcagcuccugaugcaguccaccccggcaaccggcuccggcuccgccaucugcagcggcgucgccgugugcaaggugcugcaccucgagggggaggucaacaagaucaagagcgcccugcuguccaccaacaaggccguggugagccucuccaacggcgucagcgugcugaccuucaaggugcuggaccucaagaacuacaucgacaagcagcugcugcccauccugaacaagcagagcugcuccauccccaacaucgagacggugaucgaguuccagcagaagaacaaccggcuccuggagaucacccgcgaguucagcgugaacgccggggucaccacccccguguccacguacaugcugaccaacagcgagcuccugucccugaucaacgacaugccgaucaccaacgaccagaagaagcucaugagcaacaacgugcagaucguccggcagcaguccuacagcaucaugugcaucaucaaggaggaggugcuggcguacgugguccagcugccccucuacggcgugaucgacacccccugcuggaagcugcacacgagcccccugugcaccaccaacaccaaggagggguccaacaucugccucacgcgcaccgaccggggcugguacugcgacaacgccggcagcgucuccuucuucccgcaggccgagaccugcaaggugcagagcaaccgcguguucugcgacaccaugaacucccugacgcugcccagcgagguaaaccucugcaacgucgacaucuucaaccccaaguacgacugcaagaucaugaccuccaagaccgacgugagcuccagcgugaucaccucccugggggccaucgucagcugcuacggcaagacgaagugcaccgccagcaacaagaaccgggggaucaucaagaccuucuccaacggcugcgacuacgugagcaacaagggcguggacaccguguccgucgggaacacccuguacugcgugaacaagcaggagggccagagccucuacgugaagggggagcccaucaucaacuucuacgacccgcuggucuuccccuccgacgaguucgacgcgagcaucucccaggugaacgagaagaucaaccagagccuggccuucauccgcaaguccgacgagcugcuccacaacgugaacgccggcaagagcacgaccaacaucaugaucaccaccaucaucaucgucaucaucgugauccugcugucccucaucgccguggggcugcugcucuacugcaaggcccggagcacgcccgucacccuguccaaggaccagcugagcggcaucaacaacaucgcguucuccaacugaggacuagucccuguucccagagcccacuuuuuuuucuuuuuuugaaauaaaauagccugucuuucagaucuaaaaaaaaaaaaaaaaaaaaaaaaaaaaaaaaaaaaaaaaaaaaaaaaaaaaaaaaaaaaaaaaugcaucccccccccccccccccccccccccccccccaaaggcucuuuucagagccaccagaauu

SEQ ID NO: 2496 - RNA, 1897 nt, Artificial Sequence
  mRNA product Design c-5 comprising derived and/or modified sequence from HRSV(A2)__F_DSCav1_mut2 (opt1)
gggagagcggcucggccauuuugucccagucaguccggaggcugcggcugcagaaguaccgccugcggaguaacugcaaagaagcuuaccauggagcugcucauccugaaggccaacgccaucaccaccauccugacggcggugaccuucugcuucgccagcggccagaacaucaccgaggaguucuaccaguccacgugcagcgccgucuccaagggguaccucggcgcccugcgcaccgggugguacaccagcgugaucaccaucgagcuguccaacaucaaggagaacaagugcaacggcaccgacgccaaggugaagcucaucaagcaggagcuggacaaguacaagaacgcggucacggaccugcagcuccugaugcagagcacccccgccaccggguccggcagcgccaucugcuccggcguggccgugugcaagguccugcaccucgagggggaggugaacaagaucaagagcgcgcugcuguccaccaacaaggccguggucagccucuccaacggcgugagcgugcugacguucaagguccuggaccucaagaacuacaucgacaagcagcugcugccgauccucaacaagcaguccugcagcauccccaacaucgagaccgugaucgaguuccagcagaagaacaaccggcugcuggagaucacccgcgaguucuccgugaacgccggggucaccacgcccgugagcaccuacaugcucaccaacuccgagcugcugagccucaucaacgacaugcccaucaccaacgaccagaagaagcugaugagcaacaacgugcagaucguccggcagcaguccuacagcaucaugugcaucaucaaggaggaggugcuggccuacgugguccagcucccgcuguacggcgugaucgacacgcccugcuggaagcugcacaccagcccccucugcaccaccaacacgaaggagggguccaacaucugccugacccgcaccgaccggggcugguacugcgacaacgccggcuccgugagcuucuucccccaggcggagaccugcaagguccaguccaaccgcguguucugcgacacgaugaacagccugacccucccguccgaggucaaccugugcaacguggacaucuucaaccccaaguacgacugcaagaucaugaccagcaagaccgacguguccagcuccgucaucacgagccugggggccaucguguccugcuacggcaagaccaagugcaccgccagcaacaagaaccgggggaucaucaagaccuucuccaacggcugcgacuacgugagcaacaagggcgucgacacgguguccguggggaacacccucuacugcgucaacaagcaggagggccagagccuguacgugaagggggagcccaucaucaacuucuacgacccccugguguucccgagcgacgaguucgacgccuccaucagccaggucaacgagaagaucaaccagucccucgccuucauccgcaagagcgacgagcugcugcacaacgugaacgcgggcaaguccaccaccaacaucaugaucaccacgaucaucaucgugaucaucgucauccuccugagccugaucgccguggggcuccugcuguacugcaaggcccgguccacccccgugacccugagcaaggaccagcucuccggcaucaacaacaucgccuucagcaacugaggacuagucccuguucccagagcccacuuuuuuuucuuuuuuugaaauaaaauagccugucuuucagaucuaaaaaaaaaaaaaaaaaaaaaaaaaaaaaaaaaaaaaaaaaaaaaaaaaaaaaaaaaaaaaaaaugcaucccccccccccccccccccccccccccccccaaaggcucuuuucagagccaccagaauu

SEQ ID NO: 2497 - RNA, 1897 nt, Artificial Sequence
  mRNA product Design c-5 comprising derived and/or modified sequence from HRSV(A2)__F_DSCav1_mut2 (opt2)
gggagagcggcucggccauuuugucccagucaguccggaggcugcggcugcagaaguaccgccugcggaguaacugcaaagaagcuuaccauggagcuccucauccucaaggccaacgccaucaccaccauccucaccgccgucaccuucugcuucgccuccggccagaacaucaccgaggaguucuaccaguccaccugcuccgccgucuccaagggcuaccucggcgcccuccgcaccggcugguacaccuccgucaucaccaucgagcucuccaacaucaaggagaacaagugcaacggcaccgacgccaaggucaagcucaucaagcaggagcucgacaaguacaagaacgccgucaccgaccuccagcuccucaugcaguccacccccgccaccggcuccggcuccgccaucugcuccggcgucgccgucugcaagguccuccaccucgagggcgaggucaacaagaucaaguccgcccuccucuccaccaacaaggccgucgucucccucuccaacggcgucuccguccucaccuucaagguccucgaccucaagaacuacaucgacaagcagcuccuccccauccucaacaagcaguccugcuccauccccaacaucgagaccgucaucgaguuccagcagaagaacaaccgccuccucgagaucacccgcgaguucuccgucaacgccggcgucaccacccccgucuccaccuacaugcucaccaacuccgagcuccucucccucaucaacgacaugcccaucaccaacgaccagaagaagcucauguccaacaacguccagaucguccgccagcaguccuacuccaucaugugcaucaucaaggaggagguccucgccuacgucguccagcucccccucuacggcgucaucgacacccccugcuggaagcuccacaccuccccccucugcaccaccaacaccaaggagggcuccaacaucugccucacccgcaccgaccgcggcugguacugcgacaacgccggcuccgucuccuucuucccccaggccgagaccugcaagguccaguccaaccgcgucuucugcgacaccaugaacucccucacccuccccuccgaggucaaccucugcaacgucgacaucuucaaccccaaguacgacugcaagaucaugaccuccaagaccgacgucuccuccuccgucaucaccucccucggcgccaucgucuccugcuacggcaagaccaagugcaccgccuccaacaagaaccgcggcaucaucaagaccuucuccaacggcugcgacuacgucuccaacaagggcgucgacaccgucuccgucggcaacacccucuacugcgucaacaagcaggagggccagucccucuacgucaagggcgagcccaucaucaacuucuacgacccccucgucuuccccuccgacgaguucgacgccuccaucucccaggucaacgagaagaucaaccagucccucgccuucauccgcaaguccgacgagcuccuccacaacgucaacgccggcaaguccaccaccaacaucaugaucaccaccaucaucaucgucaucaucgucauccuccucucccucaucgccgucggccuccuccucuacugcaaggcccgcuccacccccgucacccucuccaaggaccagcucuccggcaucaacaacaucgccuucuccaacugaggacuagucccuguucccagagcccacuuuuuuuucuuuuuuugaaauaaaauagccugucuuucagaucuaaaaaaaaaaaaaaaaaaaaaaaaaaaaaaaaaaaaaaaaaaaaaaaaaaaaaaaaaaaaaaaaugcaucccccccccccccccccccccccccccccccaaaggcucuuuucagagccaccagaauu

SEQ ID NO: 2498 - RNA, 1897 nt, Artificial Sequence
  mRNA product Design c-5 comprising derived and/or modified sequence from HRSV(A2)__F_DSCav1_mut2 (opt3)
gggagagcggcucggccauuuugucccagucaguccggaggcugcggcugcagaaguaccgccugcggaguaacugcaaagaagcuuaccauggagcugcucauccuuaaggccaacgcuauuaccacaauacugacugcagugacguucugcuuugccagcggccagaauaucaccgaagaguucuaccaauccacauguucugcggucucaaaaggguauuugggagcuuuaagaacugguugguacaccaguguuauuacaaucgaacugagcaacauuaaggagaauaaaugcaacggcaccgacgccaaggugaaacuaaucaagcaggaacucgauaaguauaaaaaugcaguaacugaccugcagcuucugaugcaguccacacccgccaccgggucuggaucggcuauauguucaggcguggcagucugcaagguguugcaccucgagggugagguuaacaaaaucaagagcgcccugcugaguacgaauaaagcuguggucucccucucuaacggggugagcguauuaacuuuuaagguucuggaucuuaagaauuacauugacaaacaauugcugccuauccuaaacaagcaguccuguucaauuccaaauaucgaaaccgugauagaguuccagcagaaaaacaauaggcuccuggaaauuacacgggaguuuagugucaacgccggagugacuaccccggugagcacauauaugcuuaccaauucugagcuguugucccucaucaacgauaugcccauuacgaacgaccaaaagaaacugaugucaaauaacguccagaucguucgccagcagagcuacaguaucaugugcauuauaaaggaagagguguuagcguauguagugcaacugccucucuacggcgucaucgauacuccauguuggaaacuucauacaucuccccugugcaccacuaauacaaaggaaggcuccaacauuuguuugacccgaacggaccgugggugguacugcgauaaugcaggaagcgugucguucuuuccucaggccgagaccuguaagguucagucuaacagaguguucugcgacacaaugaacucccuaacucugccaucagaagucaaucucugcaauguggauaucuuuaaccccaaauaugacuguaagauaaugaccaguaaaacagauguaagcuccucuguuauuacuagccugggugcuaucgugucaugcuacggcaagaccaaauguacagccaguaauaagaacagggggaucauuaagaccuucuccaauggaugcgacuaugucagcaacaaaggcguggacacugucucuguggguaauacgcuuuacuguguuaacaagcaagaggggcagucacuguaugugaaaggagagccuaucauuaacuuuuacgauccauugguauucccgagugacgaauuugaugcaagcauaucccaggucaaugagaagaucaaccagucucucgcuuucauucggaaaucggacgaacuguuacacaaugugaacgccggcaagagcacaaccaauaucaugaucacuaccauuauaaucguuauuaucgugauucugcuaucccucaucgcggucggccugcuuuuguauugcaaggcccgcucaacacccgugacccugaguaaagaucaacucucugggauaaacaauaucgcauucagcaacugaggacuagucccuguucccagagcccacuuuuuuuucuuuuuuugaaauaaaauagccugucuuucagaucuaaaaaaaaaaaaaaaaaaaaaaaaaaaaaaaaaaaaaaaaaaaaaaaaaaaaaaaaaaaaaaaaugcaucccccccccccccccccccccccccccccccaaaggcucuuuucagagccaccagaauu

SEQ ID NO: 2499 - RNA, 1897 nt, Artificial Sequence
  mRNA product Design c-5 comprising derived and/or modified sequence from HRSV(A2)__F_DSCav1_mut2 (opt4)
gggagagcggcucggccauuuugucccagucaguccggaggcugcggcugcagaaguaccgccugcggaguaacugcaaagaagcuuaccauggagcugcugauccugaaggccaacgccaucaccaccauccugaccgccgugaccuucugcuucgccagcggccagaacaucaccgaggaguucuaccagagcaccugcagcgccgugagcaagggcuaccugggcgcccugagaaccggcugguacaccagcgugaucaccaucgagcugagcaacaucaaggagaacaagugcaacggcaccgacgccaaggugaagcugaucaagcaggagcuggacaaguacaagaacgccgugaccgaccugcagcugcugaugcagagcacccccgccaccggcagcggcagcgccaucugcagcggcguggccgugugcaaggugcugcaccuggagggcgaggugaacaagaucaagagcgcccugcugagcaccaacaaggccguggugagccugagcaacggcgugagcgugcugaccuucaaggugcuggaccugaagaacuacaucgacaagcagcugcugcccauccugaacaagcagagcugcagcauccccaacaucgagaccgugaucgaguuccagcagaagaacaacagacugcuggagaucaccagagaguucagcgugaacgccggcgugaccacccccgugagcaccuacaugcugaccaacagcgagcugcugagccugaucaacgacaugcccaucaccaacgaccagaagaagcugaugagcaacaacgugcagaucgugagacagcagagcuacagcaucaugugcaucaucaaggaggaggugcuggccuacguggugcagcugccccuguacggcgugaucgacacccccugcuggaagcugcacaccagcccccugugcaccaccaacaccaaggagggcagcaacaucugccugaccagaaccgacagaggcugguacugcgacaacgccggcagcgugagcuucuucccccaggccgagaccugcaaggugcagagcaacagaguguucugcgacaccaugaacagccugacccugcccagcgaggugaaccugugcaacguggacaucuucaaccccaaguacgacugcaagaucaugaccagcaagaccgacgugagcagcagcgugaucaccagccugggcgccaucgugagcugcuacggcaagaccaagugcaccgccagcaacaagaacagaggcaucaucaagaccuucagcaacggcugcgacuacgugagcaacaagggcguggacaccgugagcgugggcaacacccuguacugcgugaacaagcaggagggccagagccuguacgugaagggcgagcccaucaucaacuucuacgacccccugguguuccccagcgacgaguucgacgccagcaucagccaggugaacgagaagaucaaccagagccuggccuucaucagaaagagcgacgagcugcugcacaacgugaacgccggcaagagcaccaccaacaucaugaucaccaccaucaucaucgugaucaucgugauccugcugagccugaucgccgugggccugcugcuguacugcaaggccagaagcacccccgugacccugagcaaggaccagcugagcggcaucaacaacaucgccuucagcaacugaggacuagucccuguucccagagcccacuuuuuuuucuuuuuuugaaauaaaauagccugucuuucagaucuaaaaaaaaaaaaaaaaaaaaaaaaaaaaaaaaaaaaaaaaaaaaaaaaaaaaaaaaaaaaaaaaugcaucccccccccccccccccccccccccccccccaaaggcucuuuucagagccaccagaauu

SEQ ID NO: 2500 - RNA, 1897 nt, Artificial Sequence
  mRNA product Design c-5 comprising derived and/or modified sequence from HRSV(A2)__F_DSCav1_mut2 (opt5)
gggagagcggcucggccauuuugucccagucaguccggaggcugcggcugcagaaguaccgccugcggaguaacugcaaagaagcuuaccauggagcugcucauccugaaggccaacgcuauuaccacaauccuuacggccgugaccuucugcuuugcgagcggccagaauauuacagaagaguucuaccaauccaccuguucugcugucagcaaaggguaucugggagcccucagaacaggcugguacaccuccguuaucacaauugaacugucuaacaucaaggagaauaaaugcaacgggaccgacgccaaggugaaacuuaucaagcaggaacuggauaaguauaaaaaugcugugacggaccuccagcugcugaugcagagcacccccgccacaggauccggcucugcuauuuguagcggggucgccgugugcaagguucuccaccuggagggagaggugaacaaaaucaaguccgcgcuucugagcaccaauaaagccgucgugucucucuccaacggcguuagcgugcugacauuuaagguccuugaucugaagaauuacauugacaaacaacuccugccuauccugaacaagcagucuuguuccauuccgaauaucgaaaccgugauugaguuccagcagaaaaacaaucggcuccuggaaaucacgcgcgaguuuagcgugaacgcuggcgucacaacccccguuucuacauauaugcuuaccaauuccgagcugcucagccugaucaacgauaugccuauuaccaacgaccaaaagaaacuuauguccaauaacgugcagaucgugagacagcagucuuacagcauuaugugcaucauuaaggaagagguccuggccuaugugguucaacucccccuguacggggugaucgauacaccuuguuggaaacugcauacgagcccccucugcaccacaaauaccaaggaaggauccaacaucugucugacacggaccgaccgcggcugguacugcgauaaugcugggucugucuccuucuuuccucaggccgagacguguaaggugcagagcaacagaguuuucugcgacacaaugaacucucuuacccugccgagcgaagugaaucucugcaaugucgauauuuuuaaccccaaauaugacuguaagaucaugaccuccaaaacagaugugucuagcuccgucauuaccagccugggagcgaucgugucuugcuacggcaagacaaaauguacggccuccaauaagaaccgggggauuaucaagaccuucagcaauggaugcgacuauguuucuaacaaaggcguggacacagucuccgugggcaauacccuuuacuguguuaacaagcaagaggggcagagccuguaugugaaaggagagccuaucauuaacuuuuacgauccccucgucuucccuuccgacgaauuugaugcuucuaucagccaggugaaugagaagauuaaccagucccuggccuucauccgcaaaucugacgaacugcuccacaaugugaacgcuggcaagagcacaaccaauauuaugaucacgaccauuaucaucguuauuaucgucauucugcuuucccugaucgccguggggcuccugcuguauugcaaggccagaagcacacccgugacccuuucuaaagaucaacucuccggaauuaacaauaucgcuuucagcaacugaggacuagucccuguucccagagcccacuuuuuuuucuuuuuuugaaauaaaauagccugucuuucagaucuaaaaaaaaaaaaaaaaaaaaaaaaaaaaaaaaaaaaaaaaaaaaaaaaaaaaaaaaaaaaaaaaugcaucccccccccccccccccccccccccccccccaaaggcucuuuucagagccaccagaauu

SEQ ID NO: 2501 - RNA, 1897 nt, Artificial Sequence
  mRNA product Design c-5 comprising derived and/or modified sequence from HRSV(A2)__F_DSCav1_mut2 (opt6)
gggagagcggcucggccauuuugucccagucaguccggaggcugcggcugcagaaguaccgccugcggaguaacugcaaagaagcuuaccauggaacuacuaauccuaaaagcaaacgcaauuacaacuauacuuaccgccguaacauuuugcuucgcaucugggcaaaacauuaccgaagaauuuuaucaaucaacaugcucagcagucuccaaaggauaccuuggagcauuaagaaccggcugguauaccuccguaauaacaauugaacuaucuaauauaaaagaaaauaaauguaauggaacugacgcaaaaguuaaacuaauaaaacaagaacucgacaaauacaaaaacgccgucacagaccuacaacuacuaaugcaaucaacccccgcaacaggaucaggauccgcaaucugcagcggcgucgcaguuugcaaaguccuacauuuagaaggagaaguaaacaaaauaaaaucugcucuccucucuacaaacaaagcaguagugucacuuucaaacggaguaucaguucuaacauucaaaguacuagaccuaaaaaauuacauagacaaacaacuacuuccaauucuaaacaaacaauccuguuccauacccaacauagaaacaguaauagaauuucaacaaaaaaauaacagacuccuagaaauuacaagagaauuuuccgucaaugcaggaguaacaaccccaguaucaaccuacauguuaacuaacucagaacucuuaucacuaauaaacgacaugccaaucacuaaugaccaaaaaaaacucaugucaaauaacguacaaauaguccgacaacaaucauacuccaucaugugcauuauaaaagaagaaguacuagcauacgucguccaauuaccacuauacggcgucauagacacaccauguuggaaacuccacacaucaccacuaugcacuacaaauacaaaagaaggcuccaacaucugccuaacaagaacagacagagguugguauugcgacaacgcaggaucaguaucauuuuucccccaagcagaaacauguaaaguacaaucaaauagagucuucugcgacaccaugaacucauuaacacuaccuucagaagucaaccuaugcaacguagacaucuucaacccuaaauaugacugcaaaaucaugaccagcaaaaccgacguuucaucuuccguaauaacaucacuaggcgcaauagucucauguuacggcaaaacaaaauguacagcaucaaauaaaaaccguggaauaauaaaaacauuuucuaaugguugugacuacguaagcaauaaaggaguagauacaguaucagucggcaacaccuuauacuguguaaacaaacaagaaggccaaaguuuauacgucaaaggagaacccaucaucaacuucuacgacccauuaguauucccaucagacgaauuugaugcaagcauuucacaagucaacgaaaaaaucaaucaaucauuagcauucauccgaaaaucagacgaauuauuacacaacguaaacgccggaaaaucaaccacuaauauaaugauaaccacaauaaucaucguaauaauaguaauacuucucucacuaaucgcagucggacuccuucuauacugcaaagcaagaucuacaccaguaacacuauccaaagaucaacuaaguggcauaaacaacauagcauuuucuaacuaaggacuagucccuguucccagagcccacuuuuuuuucuuuuuuugaaauaaaauagccugucuuucagaucuaaaaaaaaaaaaaaaaaaaaaaaaaaaaaaaaaaaaaaaaaaaaaaaaaaaaaaaaaaaaaaaaugcaucccccccccccccccccccccccccccccccaaaggcucuuuucagagccaccagaauu

SEQ ID NO: 2502 - RNA, 1897 nt, Artificial Sequence
  mRNA product Design c-5 comprising derived and/or modified sequence from HRSV(A2)__F_DSCav1_mut2 (opt11)
gggagagcggcucggccauuuugucccagucaguccggaggcugcggcugcagaaguaccgccugcggaguaacugcaaagaagcuuaccauggaacuccucauccuaaaagccaacgcgaucaccacaauccugacagccgucaccuucugcuucgccuccggccaaaacaucaccgaagaguucuaccaauccacaugcuccgccgucuccaagggcuaccugggcgcacuucguacaggcugguacaccuccguaauaaccaucgaacucuccaacaucaaagaaaacaaaugcaacggcacagacgcaaaagucaaacucaucaagcaagaacuugacaaauacaaaaaugcagucaccgaccuucaacuccucaugcaaucuacccccgccacaggcuccggcuccgcuaucugcuccggcgucgccgucugcaaaguccuccaccucgaaggugaaguaaacaaaauaaaauccgcccuccucuccaccaacaaagccgucgucucccuaucaaacggcgucuccgugcucaccuucaagguucucgaccugaaaaacuacauagacaaacagcuccuaccaauccuuaacaaacagagcugcuccauuccgaauaucgaaacgguaaucgaauuucaacagaaaaacaaccgccuccucgaaauaacgcgagaguucuccguaaacgcuggcgucaccacacccgucagcaccuacaugcuaacgaacuccgaacucuugucgcucaucaacgacaugcccauaaccaacgaccaaaagaaacuaauguccaauaacguacaaaucguacgccaacaaucuuacuccaucaugugcaucauaaaagaagaaguacuagcuuacgucguccaacucccacuguacggagucaucgacacccccugcuggaaacuccacaccucuccccucugcaccaccaacaccaaagagggcuccaacauuugccugacacgcaccgaccgcggcugguacugcgacaacgcaggcuccgucucguucuucccccaagccgaaaccugcaaaguccaauccaaccgcgucuucugcgacaccaugaacucccucacccuccccuccgaagucaaucuaugcaacguagacaucuucaacccgaaauaugacugcaaaauuaugacaucuaaaaccgacguguccuccucagucaucacuucccuaggagccaucguuuccuguuacggcaagaccaaaugcaccgccagcaacaaaaaccgaggcaucaucaaaaccuucuccaacggaugugacuaugucuccaacaagggcgucgacaccgucagcgucggcaacacccucuacugcgucaacaaacaagaaggccaaucccucuacgucaaaggagagcccauaaucaacuucuacgacccccucgucuucccauccgacgaguucgacgccucaaucucccaagucaacgagaaaaucaaccaauccuuagccuucauccguaaguccgacgaacuccuucacaacgucaacgccgguaaaucuaccaccaacaucaugauaacaacaauaauuaucgucaucaucgucauccuccuuucccucaucgcggucgggcuauugcucuacugcaaagcccgguccaccccaguaacccucucuaaagaccaacucagcggaaucaauaacauagccuucagcaauuaaggacuagucccuguucccagagcccacuuuuuuuucuuuuuuugaaauaaaauagccugucuuucagaucuaaaaaaaaaaaaaaaaaaaaaaaaaaaaaaaaaaaaaaaaaaaaaaaaaaaaaaaaaaaaaaaaugcaucccccccccccccccccccccccccccccccaaaggcucuuuucagagccaccagaauu

SEQ ID NO: 2503 - RNA, 1906 nt, Artificial Sequence
  mRNA product Design d-1 comprising derived and/or modified sequence from HRSV(A2)__F_DSCav1_mut2 (opt1)
gggagacccgugacccggaaguuguacggcuacgcgacuuucccucccacaaacccucgcgcccuuccuuuccuacuugggcccggcagaaagcuuaccauggagcugcucauccugaaggccaacgccaucaccaccauccugacggcggugaccuucugcuucgccagcggccagaacaucaccgaggaguucuaccaguccacgugcagcgccgucuccaagggguaccucggcgcccugcggaccggcugguacaccuccgugaucaccaucgagcugagcaacaucaaggagaacaagugcaacgggaccgacgccaaggugaagcucaucaagcaggagcuggacaaguacaagaacgcggucacggaccugcagcuccugaugcaguccaccccggcaaccggcuccggcuccgccaucugcagcggcgucgccgugugcaaggugcugcaccucgagggggaggucaacaagaucaagagcgcccugcuguccaccaacaaggccguggugagccucuccaacggcgucagcgugcugaccuucaaggugcuggaccucaagaacuacaucgacaagcagcugcugcccauccugaacaagcagagcugcuccauccccaacaucgagacggugaucgaguuccagcagaagaacaaccggcuccuggagaucacccgcgaguucagcgugaacgccggggucaccacccccguguccacguacaugcugaccaacagcgagcuccugucccugaucaacgacaugccgaucaccaacgaccagaagaagcucaugagcaacaacgugcagaucguccggcagcaguccuacagcaucaugugcaucaucaaggaggaggugcuggcguacgugguccagcugccccucuacggcgugaucgacacccccugcuggaagcugcacacgagcccccugugcaccaccaacaccaaggagggguccaacaucugccucacgcgcaccgaccggggcugguacugcgacaacgccggcagcgucuccuucuucccgcaggccgagaccugcaaggugcagagcaaccgcguguucugcgacaccaugaacucccugacgcugcccagcgagguaaaccucugcaacgucgacaucuucaaccccaaguacgacugcaagaucaugaccuccaagaccgacgugagcuccagcgugaucaccucccugggggccaucgucagcugcuacggcaagacgaagugcaccgccagcaacaagaaccgggggaucaucaagaccuucuccaacggcugcgacuacgugagcaacaagggcguggacaccguguccgucgggaacacccuguacugcgugaacaagcaggagggccagagccucuacgugaagggggagcccaucaucaacuucuacgacccgcuggucuuccccuccgacgaguucgacgcgagcaucucccaggugaacgagaagaucaaccagagccuggccuucauccgcaaguccgacgagcugcuccacaacgugaacgccggcaagagcacgaccaacaucaugaucaccaccaucaucaucgucaucaucgugauccugcugucccucaucgccguggggcugcugcucuacugcaaggcccggagcacgcccgucacccuguccaaggaccagcugagcggcaucaacaacaucgcguucuccaacugaggacuagucccuguucccagagcccacuuuuuuuucuuuuuuugaaauaaaauagccugucuuucagaucuaaaaaaaaaaaaaaaaaaaaaaaaaaaaaaaaaaaaaaaaaaaaaaaaaaaaaaaaaaaaaaaaugcaucccccccccccccccccccccccccccccccaaaggcucuuuucagagccaccagaauu

SEQ ID NO: 2504 - RNA, 1906 nt, Artificial Sequence
  mRNA product Design d-1 comprising derived and/or modified sequence from HRSV(A2)__F_DSCav1_mut2 (opt1)
gggagacccgugacccggaaguuguacggcuacgcgacuuucccucccacaaacccucgcgcccuuccuuuccuacuugggcccggcagaaagcuuaccauggagcugcucauccugaaggccaacgccaucaccaccauccugacggcggugaccuucugcuucgccagcggccagaacaucaccgaggaguucuaccaguccacgugcagcgccgucuccaagggguaccucggcgcccugcgcaccgggugguacaccagcgugaucaccaucgagcuguccaacaucaaggagaacaagugcaacggcaccgacgccaaggugaagcucaucaagcaggagcuggacaaguacaagaacgcggucacggaccugcagcuccugaugcagagcacccccgccaccggguccggcagcgccaucugcuccggcguggccgugugcaagguccugcaccucgagggggaggugaacaagaucaagagcgcgcugcuguccaccaacaaggccguggucagccucuccaacggcgugagcgugcugacguucaagguccuggaccucaagaacuacaucgacaagcagcugcugccgauccucaacaagcaguccugcagcauccccaacaucgagaccgugaucgaguuccagcagaagaacaaccggcugcuggagaucacccgcgaguucuccgugaacgccggggucaccacgcccgugagcaccuacaugcucaccaacuccgagcugcugagccucaucaacgacaugcccaucaccaacgaccagaagaagcugaugagcaacaacgugcagaucguccggcagcaguccuacagcaucaugugcaucaucaaggaggaggugcuggccuacgugguccagcucccgcuguacggcgugaucgacacgcccugcuggaagcugcacaccagcccccucugcaccaccaacacgaaggagggguccaacaucugccugacccgcaccgaccggggcugguacugcgacaacgccggcuccgugagcuucuucccccaggcggagaccugcaagguccaguccaaccgcguguucugcgacacgaugaacagccugacccucccguccgaggucaaccugugcaacguggacaucuucaaccccaaguacgacugcaagaucaugaccagcaagaccgacguguccagcuccgucaucacgagccugggggccaucguguccugcuacggcaagaccaagugcaccgccagcaacaagaaccgggggaucaucaagaccuucuccaacggcugcgacuacgugagcaacaagggcgucgacacgguguccguggggaacacccucuacugcgucaacaagcaggagggccagagccuguacgugaagggggagcccaucaucaacuucuacgacccccugguguucccgagcgacgaguucgacgccuccaucagccaggucaacgagaagaucaaccagucccucgccuucauccgcaagagcgacgagcugcugcacaacgugaacgcgggcaaguccaccaccaacaucaugaucaccacgaucaucaucgugaucaucgucauccuccugagccugaucgccguggggcuccugcuguacugcaaggcccgguccacccccgugacccugagcaaggaccagcucuccggcaucaacaacaucgccuucagcaacugaggacuagucccuguucccagagcccacuuuuuuuucuuuuuuugaaauaaaauagccugucuuucagaucuaaaaaaaaaaaaaaaaaaaaaaaaaaaaaaaaaaaaaaaaaaaaaaaaaaaaaaaaaaaaaaaaugcaucccccccccccccccccccccccccccccccaaaggcucuuuucagagccaccagaauu

SEQ ID NO: 2505 - RNA, 1906 nt, Artificial Sequence
  mRNA product Design d-1 comprising derived and/or modified sequence from HRSV(A2)__F_DSCav1_mut2 (opt2)
gggagacccgugacccggaaguuguacggcuacgcgacuuucccucccacaaacccucgcgcccuuccuuuccuacuugggcccggcagaaagcuuaccauggagcuccucauccucaaggccaacgccaucaccaccauccucaccgccgucaccuucugcuucgccuccggccagaacaucaccgaggaguucuaccaguccaccugcuccgccgucuccaagggcuaccucggcgcccuccgcaccggcugguacaccuccgucaucaccaucgagcucuccaacaucaaggagaacaagugcaacggcaccgacgccaaggucaagcucaucaagcaggagcucgacaaguacaagaacgccgucaccgaccuccagcuccucaugcaguccacccccgccaccggcuccggcuccgccaucugcuccggcgucgccgucugcaagguccuccaccucgagggcgaggucaacaagaucaaguccgcccuccucuccaccaacaaggccgucgucucccucuccaacggcgucuccguccucaccuucaagguccucgaccucaagaacuacaucgacaagcagcuccuccccauccucaacaagcaguccugcuccauccccaacaucgagaccgucaucgaguuccagcagaagaacaaccgccuccucgagaucacccgcgaguucuccgucaacgccggcgucaccacccccgucuccaccuacaugcucaccaacuccgagcuccucucccucaucaacgacaugcccaucaccaacgaccagaagaagcucauguccaacaacguccagaucguccgccagcaguccuacuccaucaugugcaucaucaaggaggagguccucgccuacgucguccagcucccccucuacggcgucaucgacacccccugcuggaagcuccacaccuccccccucugcaccaccaacaccaaggagggcuccaacaucugccucacccgcaccgaccgcggcugguacugcgacaacgccggcuccgucuccuucuucccccaggccgagaccugcaagguccaguccaaccgcgucuucugcgacaccaugaacucccucacccuccccuccgaggucaaccucugcaacgucgacaucuucaaccccaaguacgacugcaagaucaugaccuccaagaccgacgucuccuccuccgucaucaccucccucggcgccaucgucuccugcuacggcaagaccaagugcaccgccuccaacaagaaccgcggcaucaucaagaccuucuccaacggcugcgacuacgucuccaacaagggcgucgacaccgucuccgucggcaacacccucuacugcgucaacaagcaggagggccagucccucuacgucaagggcgagcccaucaucaacuucuacgacccccucgucuuccccuccgacgaguucgacgccuccaucucccaggucaacgagaagaucaaccagucccucgccuucauccgcaaguccgacgagcuccuccacaacgucaacgccggcaaguccaccaccaacaucaugaucaccaccaucaucaucgucaucaucgucauccuccucucccucaucgccgucggccuccuccucuacugcaaggcccgcuccacccccgucacccucuccaaggaccagcucuccggcaucaacaacaucgccuucuccaacugaggacuagucccuguucccagagcccacuuuuuuuucuuuuuuugaaauaaaauagccugucuuucagaucuaaaaaaaaaaaaaaaaaaaaaaaaaaaaaaaaaaaaaaaaaaaaaaaaaaaaaaaaaaaaaaaaugcaucccccccccccccccccccccccccccccccaaaggcucuuuucagagccaccagaauu

SEQ ID NO: 2506 - RNA, 1906 nt, Artificial Sequence
  mRNA product Design d-1 comprising derived and/or modified sequence from HRSV(A2)__F_DSCav1_mut2 (opt3)
gggagacccgugacccggaaguuguacggcuacgcgacuuucccucccacaaacccucgcgcccuuccuuuccuacuugggcccggcagaaagcuuaccauggagcugcucauccuuaaggccaacgcuauuaccacaauacugacugcagugacguucugcuuugccagcggccagaauaucaccgaagaguucuaccaauccacauguucugcggucucaaaaggguauuugggagcuuuaagaacugguugguacaccaguguuauuacaaucgaacugagcaacauuaaggagaauaaaugcaacggcaccgacgccaaggugaaacuaaucaagcaggaacucgauaaguauaaaaaugcaguaacugaccugcagcuucugaugcaguccacacccgccaccgggucuggaucggcuauauguucaggcguggcagucugcaagguguugcaccucgagggugagguuaacaaaaucaagagcgcccugcugaguacgaauaaagcuguggucucccucucuaacggggugagcguauuaacuuuuaagguucuggaucuuaagaauuacauugacaaacaauugcugccuauccuaaacaagcaguccuguucaauuccaaauaucgaaaccgugauagaguuccagcagaaaaacaauaggcuccuggaaauuacacgggaguuuagugucaacgccggagugacuaccccggugagcacauauaugcuuaccaauucugagcuguugucccucaucaacgauaugcccauuacgaacgaccaaaagaaacugaugucaaauaacguccagaucguucgccagcagagcuacaguaucaugugcauuauaaaggaagagguguuagcguauguagugcaacugccucucuacggcgucaucgauacuccauguuggaaacuucauacaucuccccugugcaccacuaauacaaaggaaggcuccaacauuuguuugacccgaacggaccgugggugguacugcgauaaugcaggaagcgugucguucuuuccucaggccgagaccuguaagguucagucuaacagaguguucugcgacacaaugaacucccuaacucugccaucagaagucaaucucugcaauguggauaucuuuaaccccaaauaugacuguaagauaaugaccaguaaaacagauguaagcuccucuguuauuacuagccugggugcuaucgugucaugcuacggcaagaccaaauguacagccaguaauaagaacagggggaucauuaagaccuucuccaauggaugcgacuaugucagcaacaaaggcguggacacugucucuguggguaauacgcuuuacuguguuaacaagcaagaggggcagucacuguaugugaaaggagagccuaucauuaacuuuuacgauccauugguauucccgagugacgaauuugaugcaagcauaucccaggucaaugagaagaucaaccagucucucgcuuucauucggaaaucggacgaacuguuacacaaugugaacgccggcaagagcacaaccaauaucaugaucacuaccauuauaaucguuauuaucgugauucugcuaucccucaucgcggucggccugcuuuuguauugcaaggcccgcucaacacccgugacccugaguaaagaucaacucucugggauaaacaauaucgcauucagcaacugaggacuagucccuguucccagagcccacuuuuuuuucuuuuuuugaaauaaaauagccugucuuucagaucuaaaaaaaaaaaaaaaaaaaaaaaaaaaaaaaaaaaaaaaaaaaaaaaaaaaaaaaaaaaaaaaaugcaucccccccccccccccccccccccccccccccaaaggcucuuuucagagccaccagaauu

SEQ ID NO: 2507 - RNA, 1906 nt, Artificial Sequence
  mRNA product Design d-1 comprising derived and/or modified sequence from HRSV(A2)__F_DSCav1_mut2 (opt4)
gggagacccgugacccggaaguuguacggcuacgcgacuuucccucccacaaacccucgcgcccuuccuuuccuacuugggcccggcagaaagcuuaccauggagcugcugauccugaaggccaacgccaucaccaccauccugaccgccgugaccuucugcuucgccagcggccagaacaucaccgaggaguucuaccagagcaccugcagcgccgugagcaagggcuaccugggcgcccugagaaccggcugguacaccagcgugaucaccaucgagcugagcaacaucaaggagaacaagugcaacggcaccgacgccaaggugaagcugaucaagcaggagcuggacaaguacaagaacgccgugaccgaccugcagcugcugaugcagagcacccccgccaccggcagcggcagcgccaucugcagcggcguggccgugugcaaggugcugcaccuggagggcgaggugaacaagaucaagagcgcccugcugagcaccaacaaggccguggugagccugagcaacggcgugagcgugcugaccuucaaggugcuggaccugaagaacuacaucgacaagcagcugcugcccauccugaacaagcagagcugcagcauccccaacaucgagaccgugaucgaguuccagcagaagaacaacagacugcuggagaucaccagagaguucagcgugaacgccggcgugaccacccccgugagcaccuacaugcugaccaacagcgagcugcugagccugaucaacgacaugcccaucaccaacgaccagaagaagcugaugagcaacaacgugcagaucgugagacagcagagcuacagcaucaugugcaucaucaaggaggaggugcuggccuacguggugcagcugccccuguacggcgugaucgacacccccugcuggaagcugcacaccagcccccugugcaccaccaacaccaaggagggcagcaacaucugccugaccagaaccgacagaggcugguacugcgacaacgccggcagcgugagcuucuucccccaggccgagaccugcaaggugcagagcaacagaguguucugcgacaccaugaacagccugacccugcccagcgaggugaaccugugcaacguggacaucuucaaccccaaguacgacugcaagaucaugaccagcaagaccgacgugagcagcagcgugaucaccagccugggcgccaucgugagcugcuacggcaagaccaagugcaccgccagcaacaagaacagaggcaucaucaagaccuucagcaacggcugcgacuacgugagcaacaagggcguggacaccgugagcgugggcaacacccuguacugcgugaacaagcaggagggccagagccuguacgugaagggcgagcccaucaucaacuucuacgacccccugguguuccccagcgacgaguucgacgccagcaucagccaggugaacgagaagaucaaccagagccuggccuucaucagaaagagcgacgagcugcugcacaacgugaacgccggcaagagcaccaccaacaucaugaucaccaccaucaucaucgugaucaucgugauccugcugagccugaucgccgugggccugcugcuguacugcaaggccagaagcacccccgugacccugagcaaggaccagcugagcggcaucaacaacaucgccuucagcaacugaggacuagucccuguucccagagcccacuuuuuuuucuuuuuuugaaauaaaauagccugucuuucagaucuaaaaaaaaaaaaaaaaaaaaaaaaaaaaaaaaaaaaaaaaaaaaaaaaaaaaaaaaaaaaaaaaugcaucccccccccccccccccccccccccccccccaaaggcucuuuucagagccaccagaauu

SEQ ID NO: 2508 - RNA, 1906 nt, Artificial Sequence
  mRNA product Design d-1 comprising derived and/or modified sequence from HRSV(A2)__F_DSCav1_mut2 (opt5)
gggagacccgugacccggaaguuguacggcuacgcgacuuucccucccacaaacccucgcgcccuuccuuuccuacuugggcccggcagaaagcuuaccauggagcugcucauccugaaggccaacgcuauuaccacaauccuuacggccgugaccuucugcuuugcgagcggccagaauauuacagaagaguucuaccaauccaccuguucugcugucagcaaaggguaucugggagcccucagaacaggcugguacaccuccguuaucacaauugaacugucuaacaucaaggagaauaaaugcaacgggaccgacgccaaggugaaacuuaucaagcaggaacuggauaaguauaaaaaugcugugacggaccuccagcugcugaugcagagcacccccgccacaggauccggcucugcuauuuguagcggggucgccgugugcaagguucuccaccuggagggagaggugaacaaaaucaaguccgcgcuucugagcaccaauaaagccgucgugucucucuccaacggcguuagcgugcugacauuuaagguccuugaucugaagaauuacauugacaaacaacuccugccuauccugaacaagcagucuuguuccauuccgaauaucgaaaccgugauugaguuccagcagaaaaacaaucggcuccuggaaaucacgcgcgaguuuagcgugaacgcuggcgucacaacccccguuucuacauauaugcuuaccaauuccgagcugcucagccugaucaacgauaugccuauuaccaacgaccaaaagaaacuuauguccaauaacgugcagaucgugagacagcagucuuacagcauuaugugcaucauuaaggaagagguccuggccuaugugguucaacucccccuguacggggugaucgauacaccuuguuggaaacugcauacgagcccccucugcaccacaaauaccaaggaaggauccaacaucugucugacacggaccgaccgcggcugguacugcgauaaugcugggucugucuccuucuuuccucaggccgagacguguaaggugcagagcaacagaguuuucugcgacacaaugaacucucuuacccugccgagcgaagugaaucucugcaaugucgauauuuuuaaccccaaauaugacuguaagaucaugaccuccaaaacagaugugucuagcuccgucauuaccagccugggagcgaucgugucuugcuacggcaagacaaaauguacggccuccaauaagaaccgggggauuaucaagaccuucagcaauggaugcgacuauguuucuaacaaaggcguggacacagucuccgugggcaauacccuuuacuguguuaacaagcaagaggggcagagccuguaugugaaaggagagccuaucauuaacuuuuacgauccccucgucuucccuuccgacgaauuugaugcuucuaucagccaggugaaugagaagauuaaccagucccuggccuucauccgcaaaucugacgaacugcuccacaaugugaacgcuggcaagagcacaaccaauauuaugaucacgaccauuaucaucguuauuaucgucauucugcuuucccugaucgccguggggcuccugcuguauugcaaggccagaagcacacccgugacccuuucuaaagaucaacucuccggaauuaacaauaucgcuuucagcaacugaggacuagucccuguucccagagcccacuuuuuuuucuuuuuuugaaauaaaauagccugucuuucagaucuaaaaaaaaaaaaaaaaaaaaaaaaaaaaaaaaaaaaaaaaaaaaaaaaaaaaaaaaaaaaaaaaugcaucccccccccccccccccccccccccccccccaaaggcucuuuucagagccaccagaauu

SEQ ID NO: 2509 - RNA, 1906 nt, Artificial Sequence
  mRNA product Design d-1 comprising derived and/or modified sequence from HRSV(A2)__F_DSCav1_mut2 (opt6)
gggagacccgugacccggaaguuguacggcuacgcgacuuucccucccacaaacccucgcgcccuuccuuuccuacuugggcccggcagaaagcuuaccauggaacuacuaauccuaaaagcaaacgcaauuacaacuauacuuaccgccguaacauuuugcuucgcaucugggcaaaacauuaccgaagaauuuuaucaaucaacaugcucagcagucuccaaaggauaccuuggagcauuaagaaccggcugguauaccuccguaauaacaauugaacuaucuaauauaaaagaaaauaaauguaauggaacugacgcaaaaguuaaacuaauaaaacaagaacucgacaaauacaaaaacgccgucacagaccuacaacuacuaaugcaaucaacccccgcaacaggaucaggauccgcaaucugcagcggcgucgcaguuugcaaaguccuacauuuagaaggagaaguaaacaaaauaaaaucugcucuccucucuacaaacaaagcaguagugucacuuucaaacggaguaucaguucuaacauucaaaguacuagaccuaaaaaauuacauagacaaacaacuacuuccaauucuaaacaaacaauccuguuccauacccaacauagaaacaguaauagaauuucaacaaaaaaauaacagacuccuagaaauuacaagagaauuuuccgucaaugcaggaguaacaaccccaguaucaaccuacauguuaacuaacucagaacucuuaucacuaauaaacgacaugccaaucacuaaugaccaaaaaaaacucaugucaaauaacguacaaauaguccgacaacaaucauacuccaucaugugcauuauaaaagaagaaguacuagcauacgucguccaauuaccacuauacggcgucauagacacaccauguuggaaacuccacacaucaccacuaugcacuacaaauacaaaagaaggcuccaacaucugccuaacaagaacagacagagguugguauugcgacaacgcaggaucaguaucauuuuucccccaagcagaaacauguaaaguacaaucaaauagagucuucugcgacaccaugaacucauuaacacuaccuucagaagucaaccuaugcaacguagacaucuucaacccuaaauaugacugcaaaaucaugaccagcaaaaccgacguuucaucuuccguaauaacaucacuaggcgcaauagucucauguuacggcaaaacaaaauguacagcaucaaauaaaaaccguggaauaauaaaaacauuuucuaaugguugugacuacguaagcaauaaaggaguagauacaguaucagucggcaacaccuuauacuguguaaacaaacaagaaggccaaaguuuauacgucaaaggagaacccaucaucaacuucuacgacccauuaguauucccaucagacgaauuugaugcaagcauuucacaagucaacgaaaaaaucaaucaaucauuagcauucauccgaaaaucagacgaauuauuacacaacguaaacgccggaaaaucaaccacuaauauaaugauaaccacaauaaucaucguaauaauaguaauacuucucucacuaaucgcagucggacuccuucuauacugcaaagcaagaucuacaccaguaacacuauccaaagaucaacuaaguggcauaaacaacauagcauuuucuaacuaaggacuagucccuguucccagagcccacuuuuuuuucuuuuuuugaaauaaaauagccugucuuucagaucuaaaaaaaaaaaaaaaaaaaaaaaaaaaaaaaaaaaaaaaaaaaaaaaaaaaaaaaaaaaaaaaaugcaucccccccccccccccccccccccccccccccaaaggcucuuuucagagccaccagaauu

SEQ ID NO: 2510 - RNA, 1906 nt, Artificial Sequence
  mRNA product Design d-1 comprising derived and/or modified sequence from HRSV(A2)__F_DSCav1_mut2 (opt11)
gggagacccgugacccggaaguuguacggcuacgcgacuuucccucccacaaacccucgcgcccuuccuuuccuacuugggcccggcagaaagcuuaccauggaacuccucauccuaaaagccaacgcgaucaccacaauccugacagccgucaccuucugcuucgccuccggccaaaacaucaccgaagaguucuaccaauccacaugcuccgccgucuccaagggcuaccugggcgcacuucguacaggcugguacaccuccguaauaaccaucgaacucuccaacaucaaagaaaacaaaugcaacggcacagacgcaaaagucaaacucaucaagcaagaacuugacaaauacaaaaaugcagucaccgaccuucaacuccucaugcaaucuacccccgccacaggcuccggcuccgcuaucugcuccggcgucgccgucugcaaaguccuccaccucgaaggugaaguaaacaaaauaaaauccgcccuccucuccaccaacaaagccgucgucucccuaucaaacggcgucuccgugcucaccuucaagguucucgaccugaaaaacuacauagacaaacagcuccuaccaauccuuaacaaacagagcugcuccauuccgaauaucgaaacgguaaucgaauuucaacagaaaaacaaccgccuccucgaaauaacgcgagaguucuccguaaacgcuggcgucaccacacccgucagcaccuacaugcuaacgaacuccgaacucuugucgcucaucaacgacaugcccauaaccaacgaccaaaagaaacuaauguccaauaacguacaaaucguacgccaacaaucuuacuccaucaugugcaucauaaaagaagaaguacuagcuuacgucguccaacucccacuguacggagucaucgacacccccugcuggaaacuccacaccucuccccucugcaccaccaacaccaaagagggcuccaacauuugccugacacgcaccgaccgcggcugguacugcgacaacgcaggcuccgucucguucuucccccaagccgaaaccugcaaaguccaauccaaccgcgucuucugcgacaccaugaacucccucacccuccccuccgaagucaaucuaugcaacguagacaucuucaacccgaaauaugacugcaaaauuaugacaucuaaaaccgacguguccuccucagucaucacuucccuaggagccaucguuuccuguuacggcaagaccaaaugcaccgccagcaacaaaaaccgaggcaucaucaaaaccuucuccaacggaugugacuaugucuccaacaagggcgucgacaccgucagcgucggcaacacccucuacugcgucaacaaacaagaaggccaaucccucuacgucaaaggagagcccauaaucaacuucuacgacccccucgucuucccauccgacgaguucgacgccucaaucucccaagucaacgagaaaaucaaccaauccuuagccuucauccguaaguccgacgaacuccuucacaacgucaacgccgguaaaucuaccaccaacaucaugauaacaacaauaauuaucgucaucaucgucauccuccuuucccucaucgcggucgggcuauugcucuacugcaaagcccgguccaccccaguaacccucucuaaagaccaacucagcggaaucaauaacauagccuucagcaauuaaggacuagucccuguucccagagcccacuuuuuuuucuuuuuuugaaauaaaauagccugucuuucagaucuaaaaaaaaaaaaaaaaaaaaaaaaaaaaaaaaaaaaaaaaaaaaaaaaaaaaaaaaaaaaaaaaugcaucccccccccccccccccccccccccccccccaaaggcucuuuucagagccaccagaauu

SEQ ID NO: 2511 - RNA, 1961 nt, Artificial Sequence
  mRNA product Design d-2 comprising derived and/or modified sequence from HRSV(A2)__F_DSCav1_mut2 (opt1)
gggagagcggcucggccauuuugucccagucaguccggaggcugcggcugcagaaguaccgccugcggaguaacugcaaagaagcuuaccauggagcugcucauccugaaggccaacgccaucaccaccauccugacggcggugaccuucugcuucgccagcggccagaacaucaccgaggaguucuaccaguccacgugcagcgccgucuccaagggguaccucggcgcccugcggaccggcugguacaccuccgugaucaccaucgagcugagcaacaucaaggagaacaagugcaacgggaccgacgccaaggugaagcucaucaagcaggagcuggacaaguacaagaacgcggucacggaccugcagcuccugaugcaguccaccccggcaaccggcuccggcuccgccaucugcagcggcgucgccgugugcaaggugcugcaccucgagggggaggucaacaagaucaagagcgcccugcuguccaccaacaaggccguggugagccucuccaacggcgucagcgugcugaccuucaaggugcuggaccucaagaacuacaucgacaagcagcugcugcccauccugaacaagcagagcugcuccauccccaacaucgagacggugaucgaguuccagcagaagaacaaccggcuccuggagaucacccgcgaguucagcgugaacgccggggucaccacccccguguccacguacaugcugaccaacagcgagcuccugucccugaucaacgacaugccgaucaccaacgaccagaagaagcucaugagcaacaacgugcagaucguccggcagcaguccuacagcaucaugugcaucaucaaggaggaggugcuggcguacgugguccagcugccccucuacggcgugaucgacacccccugcuggaagcugcacacgagcccccugugcaccaccaacaccaaggagggguccaacaucugccucacgcgcaccgaccggggcugguacugcgacaacgccggcagcgucuccuucuucccgcaggccgagaccugcaaggugcagagcaaccgcguguucugcgacaccaugaacucccugacgcugcccagcgagguaaaccucugcaacgucgacaucuucaaccccaaguacgacugcaagaucaugaccuccaagaccgacgugagcuccagcgugaucaccucccugggggccaucgucagcugcuacggcaagacgaagugcaccgccagcaacaagaaccgggggaucaucaagaccuucuccaacggcugcgacuacgugagcaacaagggcguggacaccguguccgucgggaacacccuguacugcgugaacaagcaggagggccagagccucuacgugaagggggagcccaucaucaacuucuacgacccgcuggucuuccccuccgacgaguucgacgcgagcaucucccaggugaacgagaagaucaaccagagccuggccuucauccgcaaguccgacgagcugcuccacaacgugaacgccggcaagagcacgaccaacaucaugaucaccaccaucaucaucgucaucaucgugauccugcugucccucaucgccguggggcugcugcucuacugcaaggcccggagcacgcccgucacccuguccaaggaccagcugagcggcaucaacaacaucgcguucuccaacugaggacuaguaauaaggaaacuguaugaaugucugugggcaggaagugaagagauccuucuguaaagguuuuuggaauuaugucugcugaauaauaaacuuuuuugaaauaauaaaucugguagaaaaaugagaucuaaaaaaaaaaaaaaaaaaaaaaaaaaaaaaaaaaaaaaaaaaaaaaaaaaaaaaaaaaaaaaaaugcaucccccccccccccccccccccccccccccccaaaggcucuuuucagagccaccagaauu

SEQ ID NO: 2512 - RNA, 1961 nt, Artificial Sequence
  mRNA product Design d-2 comprising derived and/or modified sequence from HRSV(A2)__F_DSCav1_mut2 (opt1)
gggagagcggcucggccauuuugucccagucaguccggaggcugcggcugcagaaguaccgccugcggaguaacugcaaagaagcuuaccauggagcugcucauccugaaggccaacgccaucaccaccauccugacggcggugaccuucugcuucgccagcggccagaacaucaccgaggaguucuaccaguccacgugcagcgccgucuccaagggguaccucggcgcccugcgcaccgggugguacaccagcgugaucaccaucgagcuguccaacaucaaggagaacaagugcaacggcaccgacgccaaggugaagcucaucaagcaggagcuggacaaguacaagaacgcggucacggaccugcagcuccugaugcagagcacccccgccaccggguccggcagcgccaucugcuccggcguggccgugugcaagguccugcaccucgagggggaggugaacaagaucaagagcgcgcugcuguccaccaacaaggccguggucagccucuccaacggcgugagcgugcugacguucaagguccuggaccucaagaacuacaucgacaagcagcugcugccgauccucaacaagcaguccugcagcauccccaacaucgagaccgugaucgaguuccagcagaagaacaaccggcugcuggagaucacccgcgaguucuccgugaacgccggggucaccacgcccgugagcaccuacaugcucaccaacuccgagcugcugagccucaucaacgacaugcccaucaccaacgaccagaagaagcugaugagcaacaacgugcagaucguccggcagcaguccuacagcaucaugugcaucaucaaggaggaggugcuggccuacgugguccagcucccgcuguacggcgugaucgacacgcccugcuggaagcugcacaccagcccccucugcaccaccaacacgaaggagggguccaacaucugccugacccgcaccgaccggggcugguacugcgacaacgccggcuccgugagcuucuucccccaggcggagaccugcaagguccaguccaaccgcguguucugcgacacgaugaacagccugacccucccguccgaggucaaccugugcaacguggacaucuucaaccccaaguacgacugcaagaucaugaccagcaagaccgacguguccagcuccgucaucacgagccugggggccaucguguccugcuacggcaagaccaagugcaccgccagcaacaagaaccgggggaucaucaagaccuucuccaacggcugcgacuacgugagcaacaagggcgucgacacgguguccguggggaacacccucuacugcgucaacaagcaggagggccagagccuguacgugaagggggagcccaucaucaacuucuacgacccccugguguucccgagcgacgaguucgacgccuccaucagccaggucaacgagaagaucaaccagucccucgccuucauccgcaagagcgacgagcugcugcacaacgugaacgcgggcaaguccaccaccaacaucaugaucaccacgaucaucaucgugaucaucgucauccuccugagccugaucgccguggggcuccugcuguacugcaaggcccgguccacccccgugacccugagcaaggaccagcucuccggcaucaacaacaucgccuucagcaacugaggacuaguaauaaggaaacuguaugaaugucugugggcaggaagugaagagauccuucuguaaagguuuuuggaauuaugucugcugaauaauaaacuuuuuugaaauaauaaaucugguagaaaaaugagaucuaaaaaaaaaaaaaaaaaaaaaaaaaaaaaaaaaaaaaaaaaaaaaaaaaaaaaaaaaaaaaaaaugcaucccccccccccccccccccccccccccccccaaaggcucuuuucagagccaccagaauu

SEQ ID NO: 2513 - RNA, 1961 nt, Artificial Sequence
  mRNA product Design d-2 comprising derived and/or modified sequence from HRSV(A2)__F_DSCav1_mut2 (opt2)
gggagagcggcucggccauuuugucccagucaguccggaggcugcggcugcagaaguaccgccugcggaguaacugcaaagaagcuuaccauggagcuccucauccucaaggccaacgccaucaccaccauccucaccgccgucaccuucugcuucgccuccggccagaacaucaccgaggaguucuaccaguccaccugcuccgccgucuccaagggcuaccucggcgcccuccgcaccggcugguacaccuccgucaucaccaucgagcucuccaacaucaaggagaacaagugcaacggcaccgacgccaaggucaagcucaucaagcaggagcucgacaaguacaagaacgccgucaccgaccuccagcuccucaugcaguccacccccgccaccggcuccggcuccgccaucugcuccggcgucgccgucugcaagguccuccaccucgagggcgaggucaacaagaucaaguccgcccuccucuccaccaacaaggccgucgucucccucuccaacggcgucuccguccucaccuucaagguccucgaccucaagaacuacaucgacaagcagcuccuccccauccucaacaagcaguccugcuccauccccaacaucgagaccgucaucgaguuccagcagaagaacaaccgccuccucgagaucacccgcgaguucuccgucaacgccggcgucaccacccccgucuccaccuacaugcucaccaacuccgagcuccucucccucaucaacgacaugcccaucaccaacgaccagaagaagcucauguccaacaacguccagaucguccgccagcaguccuacuccaucaugugcaucaucaaggaggagguccucgccuacgucguccagcucccccucuacggcgucaucgacacccccugcuggaagcuccacaccuccccccucugcaccaccaacaccaaggagggcuccaacaucugccucacccgcaccgaccgcggcugguacugcgacaacgccggcuccgucuccuucuucccccaggccgagaccugcaagguccaguccaaccgcgucuucugcgacaccaugaacucccucacccuccccuccgaggucaaccucugcaacgucgacaucuucaaccccaaguacgacugcaagaucaugaccuccaagaccgacgucuccuccuccgucaucaccucccucggcgccaucgucuccugcuacggcaagaccaagugcaccgccuccaacaagaaccgcggcaucaucaagaccuucuccaacggcugcgacuacgucuccaacaagggcgucgacaccgucuccgucggcaacacccucuacugcgucaacaagcaggagggccagucccucuacgucaagggcgagcccaucaucaacuucuacgacccccucgucuuccccuccgacgaguucgacgccuccaucucccaggucaacgagaagaucaaccagucccucgccuucauccgcaaguccgacgagcuccuccacaacgucaacgccggcaaguccaccaccaacaucaugaucaccaccaucaucaucgucaucaucgucauccuccucucccucaucgccgucggccuccuccucuacugcaaggcccgcuccacccccgucacccucuccaaggaccagcucuccggcaucaacaacaucgccuucuccaacugaggacuaguaauaaggaaacuguaugaaugucugugggcaggaagugaagagauccuucuguaaagguuuuuggaauuaugucugcugaauaauaaacuuuuuugaaauaauaaaucugguagaaaaaugagaucuaaaaaaaaaaaaaaaaaaaaaaaaaaaaaaaaaaaaaaaaaaaaaaaaaaaaaaaaaaaaaaaaugcaucccccccccccccccccccccccccccccccaaaggcucuuuucagagccaccagaauu

SEQ ID NO: 2514 - RNA, 1961 nt, Artificial Sequence
  mRNA product Design d-2 comprising derived and/or modified sequence from HRSV(A2)__F_DSCav1_mut2 (opt3)
gggagagcggcucggccauuuugucccagucaguccggaggcugcggcugcagaaguaccgccugcggaguaacugcaaagaagcuuaccauggagcugcucauccuuaaggccaacgcuauuaccacaauacugacugcagugacguucugcuuugccagcggccagaauaucaccgaagaguucuaccaauccacauguucugcggucucaaaaggguauuugggagcuuuaagaacugguugguacaccaguguuauuacaaucgaacugagcaacauuaaggagaauaaaugcaacggcaccgacgccaaggugaaacuaaucaagcaggaacucgauaaguauaaaaaugcaguaacugaccugcagcuucugaugcaguccacacccgccaccgggucuggaucggcuauauguucaggcguggcagucugcaagguguugcaccucgagggugagguuaacaaaaucaagagcgcccugcugaguacgaauaaagcuguggucucccucucuaacggggugagcguauuaacuuuuaagguucuggaucuuaagaauuacauugacaaacaauugcugccuauccuaaacaagcaguccuguucaauuccaaauaucgaaaccgugauagaguuccagcagaaaaacaauaggcuccuggaaauuacacgggaguuuagugucaacgccggagugacuaccccggugagcacauauaugcuuaccaauucugagcuguugucccucaucaacgauaugcccauuacgaacgaccaaaagaaacugaugucaaauaacguccagaucguucgccagcagagcuacaguaucaugugcauuauaaaggaagagguguuagcguauguagugcaacugccucucuacggcgucaucgauacuccauguuggaaacuucauacaucuccccugugcaccacuaauacaaaggaaggcuccaacauuuguuugacccgaacggaccgugggugguacugcgauaaugcaggaagcgugucguucuuuccucaggccgagaccuguaagguucagucuaacagaguguucugcgacacaaugaacucccuaacucugccaucagaagucaaucucugcaauguggauaucuuuaaccccaaauaugacuguaagauaaugaccaguaaaacagauguaagcuccucuguuauuacuagccugggugcuaucgugucaugcuacggcaagaccaaauguacagccaguaauaagaacagggggaucauuaagaccuucuccaauggaugcgacuaugucagcaacaaaggcguggacacugucucuguggguaauacgcuuuacuguguuaacaagcaagaggggcagucacuguaugugaaaggagagccuaucauuaacuuuuacgauccauugguauucccgagugacgaauuugaugcaagcauaucccaggucaaugagaagaucaaccagucucucgcuuucauucggaaaucggacgaacuguuacacaaugugaacgccggcaagagcacaaccaauaucaugaucacuaccauuauaaucguuauuaucgugauucugcuaucccucaucgcggucggccugcuuuuguauugcaaggcccgcucaacacccgugacccugaguaaagaucaacucucugggauaaacaauaucgcauucagcaacugaggacuaguaauaaggaaacuguaugaaugucugugggcaggaagugaagagauccuucuguaaagguuuuuggaauuaugucugcugaauaauaaacuuuuuugaaauaauaaaucugguagaaaaaugagaucuaaaaaaaaaaaaaaaaaaaaaaaaaaaaaaaaaaaaaaaaaaaaaaaaaaaaaaaaaaaaaaaaugcaucccccccccccccccccccccccccccccccaaaggcucuuuucagagccaccagaauu

SEQ ID NO: 2515 - RNA, 1961 nt, Artificial Sequence
  mRNA product Design d-2 comprising derived and/or modified sequence from HRSV(A2)__F_DSCav1_mut2 (opt4)
gggagagcggcucggccauuuugucccagucaguccggaggcugcggcugcagaaguaccgccugcggaguaacugcaaagaagcuuaccauggagcugcugauccugaaggccaacgccaucaccaccauccugaccgccgugaccuucugcuucgccagcggccagaacaucaccgaggaguucuaccagagcaccugcagcgccgugagcaagggcuaccugggcgcccugagaaccggcugguacaccagcgugaucaccaucgagcugagcaacaucaaggagaacaagugcaacggcaccgacgccaaggugaagcugaucaagcaggagcuggacaaguacaagaacgccgugaccgaccugcagcugcugaugcagagcacccccgccaccggcagcggcagcgccaucugcagcggcguggccgugugcaaggugcugcaccuggagggcgaggugaacaagaucaagagcgcccugcugagcaccaacaaggccguggugagccugagcaacggcgugagcgugcugaccuucaaggugcuggaccugaagaacuacaucgacaagcagcugcugcccauccugaacaagcagagcugcagcauccccaacaucgagaccgugaucgaguuccagcagaagaacaacagacugcuggagaucaccagagaguucagcgugaacgccggcgugaccacccccgugagcaccuacaugcugaccaacagcgagcugcugagccugaucaacgacaugcccaucaccaacgaccagaagaagcugaugagcaacaacgugcagaucgugagacagcagagcuacagcaucaugugcaucaucaaggaggaggugcuggccuacguggugcagcugccccuguacggcgugaucgacacccccugcuggaagcugcacaccagcccccugugcaccaccaacaccaaggagggcagcaacaucugccugaccagaaccgacagaggcugguacugcgacaacgccggcagcgugagcuucuucccccaggccgagaccugcaaggugcagagcaacagaguguucugcgacaccaugaacagccugacccugcccagcgaggugaaccugugcaacguggacaucuucaaccccaaguacgacugcaagaucaugaccagcaagaccgacgugagcagcagcgugaucaccagccugggcgccaucgugagcugcuacggcaagaccaagugcaccgccagcaacaagaacagaggcaucaucaagaccuucagcaacggcugcgacuacgugagcaacaagggcguggacaccgugagcgugggcaacacccuguacugcgugaacaagcaggagggccagagccuguacgugaagggcgagcccaucaucaacuucuacgacccccugguguuccccagcgacgaguucgacgccagcaucagccaggugaacgagaagaucaaccagagccuggccuucaucagaaagagcgacgagcugcugcacaacgugaacgccggcaagagcaccaccaacaucaugaucaccaccaucaucaucgugaucaucgugauccugcugagccugaucgccgugggccugcugcuguacugcaaggccagaagcacccccgugacccugagcaaggaccagcugagcggcaucaacaacaucgccuucagcaacugaggacuaguaauaaggaaacuguaugaaugucugugggcaggaagugaagagauccuucuguaaagguuuuuggaauuaugucugcugaauaauaaacuuuuuugaaauaauaaaucugguagaaaaaugagaucuaaaaaaaaaaaaaaaaaaaaaaaaaaaaaaaaaaaaaaaaaaaaaaaaaaaaaaaaaaaaaaaaugcaucccccccccccccccccccccccccccccccaaaggcucuuuucagagccaccagaauu

SEQ ID NO: 2516 - RNA, 1961 nt, Artificial Sequence
  mRNA product Design d-2 comprising derived and/or modified sequence from HRSV(A2)__F_DSCav1_mut2 (opt5)
gggagagcggcucggccauuuugucccagucaguccggaggcugcggcugcagaaguaccgccugcggaguaacugcaaagaagcuuaccauggagcugcucauccugaaggccaacgcuauuaccacaauccuuacggccgugaccuucugcuuugcgagcggccagaauauuacagaagaguucuaccaauccaccuguucugcugucagcaaaggguaucugggagcccucagaacaggcugguacaccuccguuaucacaauugaacugucuaacaucaaggagaauaaaugcaacgggaccgacgccaaggugaaacuuaucaagcaggaacuggauaaguauaaaaaugcugugacggaccuccagcugcugaugcagagcacccccgccacaggauccggcucugcuauuuguagcggggucgccgugugcaagguucuccaccuggagggagaggugaacaaaaucaaguccgcgcuucugagcaccaauaaagccgucgugucucucuccaacggcguuagcgugcugacauuuaagguccuugaucugaagaauuacauugacaaacaacuccugccuauccugaacaagcagucuuguuccauuccgaauaucgaaaccgugauugaguuccagcagaaaaacaaucggcuccuggaaaucacgcgcgaguuuagcgugaacgcuggcgucacaacccccguuucuacauauaugcuuaccaauuccgagcugcucagccugaucaacgauaugccuauuaccaacgaccaaaagaaacuuauguccaauaacgugcagaucgugagacagcagucuuacagcauuaugugcaucauuaaggaagagguccuggccuaugugguucaacucccccuguacggggugaucgauacaccuuguuggaaacugcauacgagcccccucugcaccacaaauaccaaggaaggauccaacaucugucugacacggaccgaccgcggcugguacugcgauaaugcugggucugucuccuucuuuccucaggccgagacguguaaggugcagagcaacagaguuuucugcgacacaaugaacucucuuacccugccgagcgaagugaaucucugcaaugucgauauuuuuaaccccaaauaugacuguaagaucaugaccuccaaaacagaugugucuagcuccgucauuaccagccugggagcgaucgugucuugcuacggcaagacaaaauguacggccuccaauaagaaccgggggauuaucaagaccuucagcaauggaugcgacuauguuucuaacaaaggcguggacacagucuccgugggcaauacccuuuacuguguuaacaagcaagaggggcagagccuguaugugaaaggagagccuaucauuaacuuuuacgauccccucgucuucccuuccgacgaauuugaugcuucuaucagccaggugaaugagaagauuaaccagucccuggccuucauccgcaaaucugacgaacugcuccacaaugugaacgcuggcaagagcacaaccaauauuaugaucacgaccauuaucaucguuauuaucgucauucugcuuucccugaucgccguggggcuccugcuguauugcaaggccagaagcacacccgugacccuuucuaaagaucaacucuccggaauuaacaauaucgcuuucagcaacugaggacuaguaauaaggaaacuguaugaaugucugugggcaggaagugaagagauccuucuguaaagguuuuuggaauuaugucugcugaauaauaaacuuuuuugaaauaauaaaucugguagaaaaaugagaucuaaaaaaaaaaaaaaaaaaaaaaaaaaaaaaaaaaaaaaaaaaaaaaaaaaaaaaaaaaaaaaaaugcaucccccccccccccccccccccccccccccccaaaggcucuuuucagagccaccagaauu

SEQ ID NO: 2517 - RNA, 1961 nt, Artificial Sequence
  mRNA product Design d-2 comprising derived and/or modified sequence from HRSV(A2)__F_DSCav1_mut2 (opt6)
gggagagcggcucggccauuuugucccagucaguccggaggcugcggcugcagaaguaccgccugcggaguaacugcaaagaagcuuaccauggaacuacuaauccuaaaagcaaacgcaauuacaacuauacuuaccgccguaacauuuugcuucgcaucugggcaaaacauuaccgaagaauuuuaucaaucaacaugcucagcagucuccaaaggauaccuuggagcauuaagaaccggcugguauaccuccguaauaacaauugaacuaucuaauauaaaagaaaauaaauguaauggaacugacgcaaaaguuaaacuaauaaaacaagaacucgacaaauacaaaaacgccgucacagaccuacaacuacuaaugcaaucaacccccgcaacaggaucaggauccgcaaucugcagcggcgucgcaguuugcaaaguccuacauuuagaaggagaaguaaacaaaauaaaaucugcucuccucucuacaaacaaagcaguagugucacuuucaaacggaguaucaguucuaacauucaaaguacuagaccuaaaaaauuacauagacaaacaacuacuuccaauucuaaacaaacaauccuguuccauacccaacauagaaacaguaauagaauuucaacaaaaaaauaacagacuccuagaaauuacaagagaauuuuccgucaaugcaggaguaacaaccccaguaucaaccuacauguuaacuaacucagaacucuuaucacuaauaaacgacaugccaaucacuaaugaccaaaaaaaacucaugucaaauaacguacaaauaguccgacaacaaucauacuccaucaugugcauuauaaaagaagaaguacuagcauacgucguccaauuaccacuauacggcgucauagacacaccauguuggaaacuccacacaucaccacuaugcacuacaaauacaaaagaaggcuccaacaucugccuaacaagaacagacagagguugguauugcgacaacgcaggaucaguaucauuuuucccccaagcagaaacauguaaaguacaaucaaauagagucuucugcgacaccaugaacucauuaacacuaccuucagaagucaaccuaugcaacguagacaucuucaacccuaaauaugacugcaaaaucaugaccagcaaaaccgacguuucaucuuccguaauaacaucacuaggcgcaauagucucauguuacggcaaaacaaaauguacagcaucaaauaaaaaccguggaauaauaaaaacauuuucuaaugguugugacuacguaagcaauaaaggaguagauacaguaucagucggcaacaccuuauacuguguaaacaaacaagaaggccaaaguuuauacgucaaaggagaacccaucaucaacuucuacgacccauuaguauucccaucagacgaauuugaugcaagcauuucacaagucaacgaaaaaaucaaucaaucauuagcauucauccgaaaaucagacgaauuauuacacaacguaaacgccggaaaaucaaccacuaauauaaugauaaccacaauaaucaucguaauaauaguaauacuucucucacuaaucgcagucggacuccuucuauacugcaaagcaagaucuacaccaguaacacuauccaaagaucaacuaaguggcauaaacaacauagcauuuucuaacuaaggacuaguaauaaggaaacuguaugaaugucugugggcaggaagugaagagauccuucuguaaagguuuuuggaauuaugucugcugaauaauaaacuuuuuugaaauaauaaaucugguagaaaaaugagaucuaaaaaaaaaaaaaaaaaaaaaaaaaaaaaaaaaaaaaaaaaaaaaaaaaaaaaaaaaaaaaaaaugcaucccccccccccccccccccccccccccccccaaaggcucuuuucagagccaccagaauu

SEQ ID NO: 2518 - RNA, 1961 nt, Artificial Sequence
  mRNA product Design d-2 comprising derived and/or modified sequence from HRSV(A2)__F_DSCav1_mut2 (opt11)
gggagagcggcucggccauuuugucccagucaguccggaggcugcggcugcagaaguaccgccugcggaguaacugcaaagaagcuuaccauggaacuccucauccuaaaagccaacgcgaucaccacaauccugacagccgucaccuucugcuucgccuccggccaaaacaucaccgaagaguucuaccaauccacaugcuccgccgucuccaagggcuaccugggcgcacuucguacaggcugguacaccuccguaauaaccaucgaacucuccaacaucaaagaaaacaaaugcaacggcacagacgcaaaagucaaacucaucaagcaagaacuugacaaauacaaaaaugcagucaccgaccuucaacuccucaugcaaucuacccccgccacaggcuccggcuccgcuaucugcuccggcgucgccgucugcaaaguccuccaccucgaaggugaaguaaacaaaauaaaauccgcccuccucuccaccaacaaagccgucgucucccuaucaaacggcgucuccgugcucaccuucaagguucucgaccugaaaaacuacauagacaaacagcuccuaccaauccuuaacaaacagagcugcuccauuccgaauaucgaaacgguaaucgaauuucaacagaaaaacaaccgccuccucgaaauaacgcgagaguucuccguaaacgcuggcgucaccacacccgucagcaccuacaugcuaacgaacuccgaacucuugucgcucaucaacgacaugcccauaaccaacgaccaaaagaaacuaauguccaauaacguacaaaucguacgccaacaaucuuacuccaucaugugcaucauaaaagaagaaguacuagcuuacgucguccaacucccacuguacggagucaucgacacccccugcuggaaacuccacaccucuccccucugcaccaccaacaccaaagagggcuccaacauuugccugacacgcaccgaccgcggcugguacugcgacaacgcaggcuccgucucguucuucccccaagccgaaaccugcaaaguccaauccaaccgcgucuucugcgacaccaugaacucccucacccuccccuccgaagucaaucuaugcaacguagacaucuucaacccgaaauaugacugcaaaauuaugacaucuaaaaccgacguguccuccucagucaucacuucccuaggagccaucguuuccuguuacggcaagaccaaaugcaccgccagcaacaaaaaccgaggcaucaucaaaaccuucuccaacggaugugacuaugucuccaacaagggcgucgacaccgucagcgucggcaacacccucuacugcgucaacaaacaagaaggccaaucccucuacgucaaaggagagcccauaaucaacuucuacgacccccucgucuucccauccgacgaguucgacgccucaaucucccaagucaacgagaaaaucaaccaauccuuagccuucauccguaaguccgacgaacuccuucacaacgucaacgccgguaaaucuaccaccaacaucaugauaacaacaauaauuaucgucaucaucgucauccuccuuucccucaucgcggucgggcuauugcucuacugcaaagcccgguccaccccaguaacccucucuaaagaccaacucagcggaaucaauaacauagccuucagcaauuaaggacuaguaauaaggaaacuguaugaaugucugugggcaggaagugaagagauccuucuguaaagguuuuuggaauuaugucugcugaauaauaaacuuuuuugaaauaauaaaucugguagaaaaaugagaucuaaaaaaaaaaaaaaaaaaaaaaaaaaaaaaaaaaaaaaaaaaaaaaaaaaaaaaaaaaaaaaaaugcaucccccccccccccccccccccccccccccccaaaggcucuuuucagagccaccagaauu

SEQ ID NO: 2519 - RNA, 2277 nt, Artificial Sequence
  mRNA product Design d-3 comprising derived and/or modified sequence from HRSV(A2)__F_DSCav1_mut2 (opt1)
gggagagggcgcuuggcuugcaaggacccugagcugcggcauugaagcacacccaacccaacucgacugaagucagccucacugaaccggaucugagaaucuucucucucugggcuugccagggcucuccgaaccuagcuagcauccucuucaauuccaacuagaaagcuuaccauggagcugcucauccugaaggccaacgccaucaccaccauccugacggcggugaccuucugcuucgccagcggccagaacaucaccgaggaguucuaccaguccacgugcagcgccgucuccaagggguaccucggcgcccugcggaccggcugguacaccuccgugaucaccaucgagcugagcaacaucaaggagaacaagugcaacgggaccgacgccaaggugaagcucaucaagcaggagcuggacaaguacaagaacgcggucacggaccugcagcuccugaugcaguccaccccggcaaccggcuccggcuccgccaucugcagcggcgucgccgugugcaaggugcugcaccucgagggggaggucaacaagaucaagagcgcccugcuguccaccaacaaggccguggugagccucuccaacggcgucagcgugcugaccuucaaggugcuggaccucaagaacuacaucgacaagcagcugcugcccauccugaacaagcagagcugcuccauccccaacaucgagacggugaucgaguuccagcagaagaacaaccggcuccuggagaucacccgcgaguucagcgugaacgccggggucaccacccccguguccacguacaugcugaccaacagcgagcuccugucccugaucaacgacaugccgaucaccaacgaccagaagaagcucaugagcaacaacgugcagaucguccggcagcaguccuacagcaucaugugcaucaucaaggaggaggugcuggcguacgugguccagcugccccucuacggcgugaucgacacccccugcuggaagcugcacacgagcccccugugcaccaccaacaccaaggagggguccaacaucugccucacgcgcaccgaccggggcugguacugcgacaacgccggcagcgucuccuucuucccgcaggccgagaccugcaaggugcagagcaaccgcguguucugcgacaccaugaacucccugacgcugcccagcgagguaaaccucugcaacgucgacaucuucaaccccaaguacgacugcaagaucaugaccuccaagaccgacgugagcuccagcgugaucaccucccugggggccaucgucagcugcuacggcaagacgaagugcaccgccagcaacaagaaccgggggaucaucaagaccuucuccaacggcugcgacuacgugagcaacaagggcguggacaccguguccgucgggaacacccuguacugcgugaacaagcaggagggccagagccucuacgugaagggggagcccaucaucaacuucuacgacccgcuggucuuccccuccgacgaguucgacgcgagcaucucccaggugaacgagaagaucaaccagagccuggccuucauccgcaaguccgacgagcugcuccacaacgugaacgccggcaagagcacgaccaacaucaugaucaccaccaucaucaucgucaucaucgugauccugcugucccucaucgccguggggcugcugcucuacugcaaggcccggagcacgcccgucacccuguccaaggaccagcugagcggcaucaacaacaucgcguucuccaacugaggacuagugaagggaacacccaaauuuaauucagccuuaagcacaauuaauuaagagugaaacguaauuguacaagcaguuggucacccaccauagggcaugaucaacaccgcaaccuuuccuuuuucccccagugauucugaaaaaccccucuucccuucagcuugcuuagauguuccaaauuuaguaagcuuaaggcggccuacagaagaaaaagaaaaaaaaggccacaaaaguucccucucacuuucaguaaauaaaauaaaagcagcaacagaaauaaagaaauaaaugaaauucaaaaugaaauaaauauuguguugugcagcauuaaaaaaucaauaaaaauuaaaaaugagcaagaucuaaaaaaaaaaaaaaaaaaaaaaaaaaaaaaaaaaaaaaaaaaaaaaaaaaaaaaaaaaaaaaaaugcaucccccccccccccccccccccccccccccccaaaggcucuuuucagagccaccagaauu

SEQ ID NO: 2520 - RNA, 2277 nt, Artificial Sequence
  mRNA product Design d-3 comprising derived and/or modified sequence from HRSV(A2)__F_DSCav1_mut2 (opt1)
gggagagggcgcuuggcuugcaaggacccugagcugcggcauugaagcacacccaacccaacucgacugaagucagccucacugaaccggaucugagaaucuucucucucugggcuugccagggcucuccgaaccuagcuagcauccucuucaauuccaacuagaaagcuuaccauggagcugcucauccugaaggccaacgccaucaccaccauccugacggcggugaccuucugcuucgccagcggccagaacaucaccgaggaguucuaccaguccacgugcagcgccgucuccaagggguaccucggcgcccugcgcaccgggugguacaccagcgugaucaccaucgagcuguccaacaucaaggagaacaagugcaacggcaccgacgccaaggugaagcucaucaagcaggagcuggacaaguacaagaacgcggucacggaccugcagcuccugaugcagagcacccccgccaccggguccggcagcgccaucugcuccggcguggccgugugcaagguccugcaccucgagggggaggugaacaagaucaagagcgcgcugcuguccaccaacaaggccguggucagccucuccaacggcgugagcgugcugacguucaagguccuggaccucaagaacuacaucgacaagcagcugcugccgauccucaacaagcaguccugcagcauccccaacaucgagaccgugaucgaguuccagcagaagaacaaccggcugcuggagaucacccgcgaguucuccgugaacgccggggucaccacgcccgugagcaccuacaugcucaccaacuccgagcugcugagccucaucaacgacaugcccaucaccaacgaccagaagaagcugaugagcaacaacgugcagaucguccggcagcaguccuacagcaucaugugcaucaucaaggaggaggugcuggccuacgugguccagcucccgcuguacggcgugaucgacacgcccugcuggaagcugcacaccagcccccucugcaccaccaacacgaaggagggguccaacaucugccugacccgcaccgaccggggcugguacugcgacaacgccggcuccgugagcuucuucccccaggcggagaccugcaagguccaguccaaccgcguguucugcgacacgaugaacagccugacccucccguccgaggucaaccugugcaacguggacaucuucaaccccaaguacgacugcaagaucaugaccagcaagaccgacguguccagcuccgucaucacgagccugggggccaucguguccugcuacggcaagaccaagugcaccgccagcaacaagaaccgggggaucaucaagaccuucuccaacggcugcgacuacgugagcaacaagggcgucgacacgguguccguggggaacacccucuacugcgucaacaagcaggagggccagagccuguacgugaagggggagcccaucaucaacuucuacgacccccugguguucccgagcgacgaguucgacgccuccaucagccaggucaacgagaagaucaaccagucccucgccuucauccgcaagagcgacgagcugcugcacaacgugaacgcgggcaaguccaccaccaacaucaugaucaccacgaucaucaucgugaucaucgucauccuccugagccugaucgccguggggcuccugcuguacugcaaggcccgguccacccccgugacccugagcaaggaccagcucuccggcaucaacaacaucgccuucagcaacugaggacuagugaagggaacacccaaauuuaauucagccuuaagcacaauuaauuaagagugaaacguaauuguacaagcaguuggucacccaccauagggcaugaucaacaccgcaaccuuuccuuuuucccccagugauucugaaaaaccccucuucccuucagcuugcuuagauguuccaaauuuaguaagcuuaaggcggccuacagaagaaaaagaaaaaaaaggccacaaaaguucccucucacuuucaguaaauaaaauaaaagcagcaacagaaauaaagaaauaaaugaaauucaaaaugaaauaaauauuguguugugcagcauuaaaaaaucaauaaaaauuaaaaaugagcaagaucuaaaaaaaaaaaaaaaaaaaaaaaaaaaaaaaaaaaaaaaaaaaaaaaaaaaaaaaaaaaaaaaaugcaucccccccccccccccccccccccccccccccaaaggcucuuuucagagccaccagaauu

SEQ ID NO: 2521 - RNA, 2277 nt, Artificial Sequence
  mRNA product Design d-3 comprising derived and/or modified sequence from HRSV(A2)__F_DSCav1_mut2 (opt2)
gggagagggcgcuuggcuugcaaggacccugagcugcggcauugaagcacacccaacccaacucgacugaagucagccucacugaaccggaucugagaaucuucucucucugggcuugccagggcucuccgaaccuagcuagcauccucuucaauuccaacuagaaagcuuaccauggagcuccucauccucaaggccaacgccaucaccaccauccucaccgccgucaccuucugcuucgccuccggccagaacaucaccgaggaguucuaccaguccaccugcuccgccgucuccaagggcuaccucggcgcccuccgcaccggcugguacaccuccgucaucaccaucgagcucuccaacaucaaggagaacaagugcaacggcaccgacgccaaggucaagcucaucaagcaggagcucgacaaguacaagaacgccgucaccgaccuccagcuccucaugcaguccacccccgccaccggcuccggcuccgccaucugcuccggcgucgccgucugcaagguccuccaccucgagggcgaggucaacaagaucaaguccgcccuccucuccaccaacaaggccgucgucucccucuccaacggcgucuccguccucaccuucaagguccucgaccucaagaacuacaucgacaagcagcuccuccccauccucaacaagcaguccugcuccauccccaacaucgagaccgucaucgaguuccagcagaagaacaaccgccuccucgagaucacccgcgaguucuccgucaacgccggcgucaccacccccgucuccaccuacaugcucaccaacuccgagcuccucucccucaucaacgacaugcccaucaccaacgaccagaagaagcucauguccaacaacguccagaucguccgccagcaguccuacuccaucaugugcaucaucaaggaggagguccucgccuacgucguccagcucccccucuacggcgucaucgacacccccugcuggaagcuccacaccuccccccucugcaccaccaacaccaaggagggcuccaacaucugccucacccgcaccgaccgcggcugguacugcgacaacgccggcuccgucuccuucuucccccaggccgagaccugcaagguccaguccaaccgcgucuucugcgacaccaugaacucccucacccuccccuccgaggucaaccucugcaacgucgacaucuucaaccccaaguacgacugcaagaucaugaccuccaagaccgacgucuccuccuccgucaucaccucccucggcgccaucgucuccugcuacggcaagaccaagugcaccgccuccaacaagaaccgcggcaucaucaagaccuucuccaacggcugcgacuacgucuccaacaagggcgucgacaccgucuccgucggcaacacccucuacugcgucaacaagcaggagggccagucccucuacgucaagggcgagcccaucaucaacuucuacgacccccucgucuuccccuccgacgaguucgacgccuccaucucccaggucaacgagaagaucaaccagucccucgccuucauccgcaaguccgacgagcuccuccacaacgucaacgccggcaaguccaccaccaacaucaugaucaccaccaucaucaucgucaucaucgucauccuccucucccucaucgccgucggccuccuccucuacugcaaggcccgcuccacccccgucacccucuccaaggaccagcucuccggcaucaacaacaucgccuucuccaacugaggacuagugaagggaacacccaaauuuaauucagccuuaagcacaauuaauuaagagugaaacguaauuguacaagcaguuggucacccaccauagggcaugaucaacaccgcaaccuuuccuuuuucccccagugauucugaaaaaccccucuucccuucagcuugcuuagauguuccaaauuuaguaagcuuaaggcggccuacagaagaaaaagaaaaaaaaggccacaaaaguucccucucacuuucaguaaauaaaauaaaagcagcaacagaaauaaagaaauaaaugaaauucaaaaugaaauaaauauuguguugugcagcauuaaaaaaucaauaaaaauuaaaaaugagcaagaucuaaaaaaaaaaaaaaaaaaaaaaaaaaaaaaaaaaaaaaaaaaaaaaaaaaaaaaaaaaaaaaaaugcaucccccccccccccccccccccccccccccccaaaggcucuuuucagagccaccagaauu

SEQ ID NO: 2522 - RNA, 2277 nt, Artificial Sequence
  mRNA product Design d-3 comprising derived and/or modified sequence from HRSV(A2)__F_DSCav1_mut2 (opt3)
gggagagggcgcuuggcuugcaaggacccugagcugcggcauugaagcacacccaacccaacucgacugaagucagccucacugaaccggaucugagaaucuucucucucugggcuugccagggcucuccgaaccuagcuagcauccucuucaauuccaacuagaaagcuuaccauggagcugcucauccuuaaggccaacgcuauuaccacaauacugacugcagugacguucugcuuugccagcggccagaauaucaccgaagaguucuaccaauccacauguucugcggucucaaaaggguauuugggagcuuuaagaacugguugguacaccaguguuauuacaaucgaacugagcaacauuaaggagaauaaaugcaacggcaccgacgccaaggugaaacuaaucaagcaggaacucgauaaguauaaaaaugcaguaacugaccugcagcuucugaugcaguccacacccgccaccgggucuggaucggcuauauguucaggcguggcagucugcaagguguugcaccucgagggugagguuaacaaaaucaagagcgcccugcugaguacgaauaaagcuguggucucccucucuaacggggugagcguauuaacuuuuaagguucuggaucuuaagaauuacauugacaaacaauugcugccuauccuaaacaagcaguccuguucaauuccaaauaucgaaaccgugauagaguuccagcagaaaaacaauaggcuccuggaaauuacacgggaguuuagugucaacgccggagugacuaccccggugagcacauauaugcuuaccaauucugagcuguugucccucaucaacgauaugcccauuacgaacgaccaaaagaaacugaugucaaauaacguccagaucguucgccagcagagcuacaguaucaugugcauuauaaaggaagagguguuagcguauguagugcaacugccucucuacggcgucaucgauacuccauguuggaaacuucauacaucuccccugugcaccacuaauacaaaggaaggcuccaacauuuguuugacccgaacggaccgugggugguacugcgauaaugcaggaagcgugucguucuuuccucaggccgagaccuguaagguucagucuaacagaguguucugcgacacaaugaacucccuaacucugccaucagaagucaaucucugcaauguggauaucuuuaaccccaaauaugacuguaagauaaugaccaguaaaacagauguaagcuccucuguuauuacuagccugggugcuaucgugucaugcuacggcaagaccaaauguacagccaguaauaagaacagggggaucauuaagaccuucuccaauggaugcgacuaugucagcaacaaaggcguggacacugucucuguggguaauacgcuuuacuguguuaacaagcaagaggggcagucacuguaugugaaaggagagccuaucauuaacuuuuacgauccauugguauucccgagugacgaauuugaugcaagcauaucccaggucaaugagaagaucaaccagucucucgcuuucauucggaaaucggacgaacuguuacacaaugugaacgccggcaagagcacaaccaauaucaugaucacuaccauuauaaucguuauuaucgugauucugcuaucccucaucgcggucggccugcuuuuguauugcaaggcccgcucaacacccgugacccugaguaaagaucaacucucugggauaaacaauaucgcauucagcaacugaggacuagugaagggaacacccaaauuuaauucagccuuaagcacaauuaauuaagagugaaacguaauuguacaagcaguuggucacccaccauagggcaugaucaacaccgcaaccuuuccuuuuucccccagugauucugaaaaaccccucuucccuucagcuugcuuagauguuccaaauuuaguaagcuuaaggcggccuacagaagaaaaagaaaaaaaaggccacaaaaguucccucucacuuucaguaaauaaaauaaaagcagcaacagaaauaaagaaauaaaugaaauucaaaaugaaauaaauauuguguugugcagcauuaaaaaaucaauaaaaauuaaaaaugagcaagaucuaaaaaaaaaaaaaaaaaaaaaaaaaaaaaaaaaaaaaaaaaaaaaaaaaaaaaaaaaaaaaaaaugcaucccccccccccccccccccccccccccccccaaaggcucuuuucagagccaccagaauu

SEQ ID NO: 2523 - RNA, 2277 nt, Artificial Sequence
  mRNA product Design d-3 comprising derived and/or modified sequence from HRSV(A2)__F_DSCav1_mut2 (opt4)
gggagagggcgcuuggcuugcaaggacccugagcugcggcauugaagcacacccaacccaacucgacugaagucagccucacugaaccggaucugagaaucuucucucucugggcuugccagggcucuccgaaccuagcuagcauccucuucaauuccaacuagaaagcuuaccauggagcugcugauccugaaggccaacgccaucaccaccauccugaccgccgugaccuucugcuucgccagcggccagaacaucaccgaggaguucuaccagagcaccugcagcgccgugagcaagggcuaccugggcgcccugagaaccggcugguacaccagcgugaucaccaucgagcugagcaacaucaaggagaacaagugcaacggcaccgacgccaaggugaagcugaucaagcaggagcuggacaaguacaagaacgccgugaccgaccugcagcugcugaugcagagcacccccgccaccggcagcggcagcgccaucugcagcggcguggccgugugcaaggugcugcaccuggagggcgaggugaacaagaucaagagcgcccugcugagcaccaacaaggccguggugagccugagcaacggcgugagcgugcugaccuucaaggugcuggaccugaagaacuacaucgacaagcagcugcugcccauccugaacaagcagagcugcagcauccccaacaucgagaccgugaucgaguuccagcagaagaacaacagacugcuggagaucaccagagaguucagcgugaacgccggcgugaccacccccgugagcaccuacaugcugaccaacagcgagcugcugagccugaucaacgacaugcccaucaccaacgaccagaagaagcugaugagcaacaacgugcagaucgugagacagcagagcuacagcaucaugugcaucaucaaggaggaggugcuggccuacguggugcagcugccccuguacggcgugaucgacacccccugcuggaagcugcacaccagcccccugugcaccaccaacaccaaggagggcagcaacaucugccugaccagaaccgacagaggcugguacugcgacaacgccggcagcgugagcuucuucccccaggccgagaccugcaaggugcagagcaacagaguguucugcgacaccaugaacagccugacccugcccagcgaggugaaccugugcaacguggacaucuucaaccccaaguacgacugcaagaucaugaccagcaagaccgacgugagcagcagcgugaucaccagccugggcgccaucgugagcugcuacggcaagaccaagugcaccgccagcaacaagaacagaggcaucaucaagaccuucagcaacggcugcgacuacgugagcaacaagggcguggacaccgugagcgugggcaacacccuguacugcgugaacaagcaggagggccagagccuguacgugaagggcgagcccaucaucaacuucuacgacccccugguguuccccagcgacgaguucgacgccagcaucagccaggugaacgagaagaucaaccagagccuggccuucaucagaaagagcgacgagcugcugcacaacgugaacgccggcaagagcaccaccaacaucaugaucaccaccaucaucaucgugaucaucgugauccugcugagccugaucgccgugggccugcugcuguacugcaaggccagaagcacccccgugacccugagcaaggaccagcugagcggcaucaacaacaucgccuucagcaacugaggacuagugaagggaacacccaaauuuaauucagccuuaagcacaauuaauuaagagugaaacguaauuguacaagcaguuggucacccaccauagggcaugaucaacaccgcaaccuuuccuuuuucccccagugauucugaaaaaccccucuucccuucagcuugcuuagauguuccaaauuuaguaagcuuaaggcggccuacagaagaaaaagaaaaaaaaggccacaaaaguucccucucacuuucaguaaauaaaauaaaagcagcaacagaaauaaagaaauaaaugaaauucaaaaugaaauaaauauuguguugugcagcauuaaaaaaucaauaaaaauuaaaaaugagcaagaucuaaaaaaaaaaaaaaaaaaaaaaaaaaaaaaaaaaaaaaaaaaaaaaaaaaaaaaaaaaaaaaaaugcaucccccccccccccccccccccccccccccccaaaggcucuuuucagagccaccagaauu

SEQ ID NO: 2524 - RNA, 2277 nt, Artificial Sequence
  mRNA product Design d-3 comprising derived and/or modified sequence from HRSV(A2)__F_DSCav1_mut2 (opt5)
gggagagggcgcuuggcuugcaaggacccugagcugcggcauugaagcacacccaacccaacucgacugaagucagccucacugaaccggaucugagaaucuucucucucugggcuugccagggcucuccgaaccuagcuagcauccucuucaauuccaacuagaaagcuuaccauggagcugcucauccugaaggccaacgcuauuaccacaauccuuacggccgugaccuucugcuuugcgagcggccagaauauuacagaagaguucuaccaauccaccuguucugcugucagcaaaggguaucugggagcccucagaacaggcugguacaccuccguuaucacaauugaacugucuaacaucaaggagaauaaaugcaacgggaccgacgccaaggugaaacuuaucaagcaggaacuggauaaguauaaaaaugcugugacggaccuccagcugcugaugcagagcacccccgccacaggauccggcucugcuauuuguagcggggucgccgugugcaagguucuccaccuggagggagaggugaacaaaaucaaguccgcgcuucugagcaccaauaaagccgucgugucucucuccaacggcguuagcgugcugacauuuaagguccuugaucugaagaauuacauugacaaacaacuccugccuauccugaacaagcagucuuguuccauuccgaauaucgaaaccgugauugaguuccagcagaaaaacaaucggcuccuggaaaucacgcgcgaguuuagcgugaacgcuggcgucacaacccccguuucuacauauaugcuuaccaauuccgagcugcucagccugaucaacgauaugccuauuaccaacgaccaaaagaaacuuauguccaauaacgugcagaucgugagacagcagucuuacagcauuaugugcaucauuaaggaagagguccuggccuaugugguucaacucccccuguacggggugaucgauacaccuuguuggaaacugcauacgagcccccucugcaccacaaauaccaaggaaggauccaacaucugucugacacggaccgaccgcggcugguacugcgauaaugcugggucugucuccuucuuuccucaggccgagacguguaaggugcagagcaacagaguuuucugcgacacaaugaacucucuuacccugccgagcgaagugaaucucugcaaugucgauauuuuuaaccccaaauaugacuguaagaucaugaccuccaaaacagaugugucuagcuccgucauuaccagccugggagcgaucgugucuugcuacggcaagacaaaauguacggccuccaauaagaaccgggggauuaucaagaccuucagcaauggaugcgacuauguuucuaacaaaggcguggacacagucuccgugggcaauacccuuuacuguguuaacaagcaagaggggcagagccuguaugugaaaggagagccuaucauuaacuuuuacgauccccucgucuucccuuccgacgaauuugaugcuucuaucagccaggugaaugagaagauuaaccagucccuggccuucauccgcaaaucugacgaacugcuccacaaugugaacgcuggcaagagcacaaccaauauuaugaucacgaccauuaucaucguuauuaucgucauucugcuuucccugaucgccguggggcuccugcuguauugcaaggccagaagcacacccgugacccuuucuaaagaucaacucuccggaauuaacaauaucgcuuucagcaacugaggacuagugaagggaacacccaaauuuaauucagccuuaagcacaauuaauuaagagugaaacguaauuguacaagcaguuggucacccaccauagggcaugaucaacaccgcaaccuuuccuuuuucccccagugauucugaaaaaccccucuucccuucagcuugcuuagauguuccaaauuuaguaagcuuaaggcggccuacagaagaaaaagaaaaaaaaggccacaaaaguucccucucacuuucaguaaauaaaauaaaagcagcaacagaaauaaagaaauaaaugaaauucaaaaugaaauaaauauuguguugugcagcauuaaaaaaucaauaaaaauuaaaaaugagcaagaucuaaaaaaaaaaaaaaaaaaaaaaaaaaaaaaaaaaaaaaaaaaaaaaaaaaaaaaaaaaaaaaaaugcaucccccccccccccccccccccccccccccccaaaggcucuuuucagagccaccagaauu

SEQ ID NO: 2525 - RNA, 2277 nt, Artificial Sequence
  mRNA product Design d-3 comprising derived and/or modified sequence from HRSV(A2)__F_DSCav1_mut2 (opt6)
gggagagggcgcuuggcuugcaaggacccugagcugcggcauugaagcacacccaacccaacucgacugaagucagccucacugaaccggaucugagaaucuucucucucugggcuugccagggcucuccgaaccuagcuagcauccucuucaauuccaacuagaaagcuuaccauggaacuacuaauccuaaaagcaaacgcaauuacaacuauacuuaccgccguaacauuuugcuucgcaucugggcaaaacauuaccgaagaauuuuaucaaucaacaugcucagcagucuccaaaggauaccuuggagcauuaagaaccggcugguauaccuccguaauaacaauugaacuaucuaauauaaaagaaaauaaauguaauggaacugacgcaaaaguuaaacuaauaaaacaagaacucgacaaauacaaaaacgccgucacagaccuacaacuacuaaugcaaucaacccccgcaacaggaucaggauccgcaaucugcagcggcgucgcaguuugcaaaguccuacauuuagaaggagaaguaaacaaaauaaaaucugcucuccucucuacaaacaaagcaguagugucacuuucaaacggaguaucaguucuaacauucaaaguacuagaccuaaaaaauuacauagacaaacaacuacuuccaauucuaaacaaacaauccuguuccauacccaacauagaaacaguaauagaauuucaacaaaaaaauaacagacuccuagaaauuacaagagaauuuuccgucaaugcaggaguaacaaccccaguaucaaccuacauguuaacuaacucagaacucuuaucacuaauaaacgacaugccaaucacuaaugaccaaaaaaaacucaugucaaauaacguacaaauaguccgacaacaaucauacuccaucaugugcauuauaaaagaagaaguacuagcauacgucguccaauuaccacuauacggcgucauagacacaccauguuggaaacuccacacaucaccacuaugcacuacaaauacaaaagaaggcuccaacaucugccuaacaagaacagacagagguugguauugcgacaacgcaggaucaguaucauuuuucccccaagcagaaacauguaaaguacaaucaaauagagucuucugcgacaccaugaacucauuaacacuaccuucagaagucaaccuaugcaacguagacaucuucaacccuaaauaugacugcaaaaucaugaccagcaaaaccgacguuucaucuuccguaauaacaucacuaggcgcaauagucucauguuacggcaaaacaaaauguacagcaucaaauaaaaaccguggaauaauaaaaacauuuucuaaugguugugacuacguaagcaauaaaggaguagauacaguaucagucggcaacaccuuauacuguguaaacaaacaagaaggccaaaguuuauacgucaaaggagaacccaucaucaacuucuacgacccauuaguauucccaucagacgaauuugaugcaagcauuucacaagucaacgaaaaaaucaaucaaucauuagcauucauccgaaaaucagacgaauuauuacacaacguaaacgccggaaaaucaaccacuaauauaaugauaaccacaauaaucaucguaauaauaguaauacuucucucacuaaucgcagucggacuccuucuauacugcaaagcaagaucuacaccaguaacacuauccaaagaucaacuaaguggcauaaacaacauagcauuuucuaacuaaggacuagugaagggaacacccaaauuuaauucagccuuaagcacaauuaauuaagagugaaacguaauuguacaagcaguuggucacccaccauagggcaugaucaacaccgcaaccuuuccuuuuucccccagugauucugaaaaaccccucuucccuucagcuugcuuagauguuccaaauuuaguaagcuuaaggcggccuacagaagaaaaagaaaaaaaaggccacaaaaguucccucucacuuucaguaaauaaaauaaaagcagcaacagaaauaaagaaauaaaugaaauucaaaaugaaauaaauauuguguugugcagcauuaaaaaaucaauaaaaauuaaaaaugagcaagaucuaaaaaaaaaaaaaaaaaaaaaaaaaaaaaaaaaaaaaaaaaaaaaaaaaaaaaaaaaaaaaaaaugcaucccccccccccccccccccccccccccccccaaaggcucuuuucagagccaccagaauu

SEQ ID NO: 2526 - RNA, 2277 nt, Artificial Sequence
  mRNA product Design d-3 comprising derived and/or modified sequence from HRSV(A2)__F_DSCav1_mut2 (opt11)
gggagagggcgcuuggcuugcaaggacccugagcugcggcauugaagcacacccaacccaacucgacugaagucagccucacugaaccggaucugagaaucuucucucucugggcuugccagggcucuccgaaccuagcuagcauccucuucaauuccaacuagaaagcuuaccauggaacuccucauccuaaaagccaacgcgaucaccacaauccugacagccgucaccuucugcuucgccuccggccaaaacaucaccgaagaguucuaccaauccacaugcuccgccgucuccaagggcuaccugggcgcacuucguacaggcugguacaccuccguaauaaccaucgaacucuccaacaucaaagaaaacaaaugcaacggcacagacgcaaaagucaaacucaucaagcaagaacuugacaaauacaaaaaugcagucaccgaccuucaacuccucaugcaaucuacccccgccacaggcuccggcuccgcuaucugcuccggcgucgccgucugcaaaguccuccaccucgaaggugaaguaaacaaaauaaaauccgcccuccucuccaccaacaaagccgucgucucccuaucaaacggcgucuccgugcucaccuucaagguucucgaccugaaaaacuacauagacaaacagcuccuaccaauccuuaacaaacagagcugcuccauuccgaauaucgaaacgguaaucgaauuucaacagaaaaacaaccgccuccucgaaauaacgcgagaguucuccguaaacgcuggcgucaccacacccgucagcaccuacaugcuaacgaacuccgaacucuugucgcucaucaacgacaugcccauaaccaacgaccaaaagaaacuaauguccaauaacguacaaaucguacgccaacaaucuuacuccaucaugugcaucauaaaagaagaaguacuagcuuacgucguccaacucccacuguacggagucaucgacacccccugcuggaaacuccacaccucuccccucugcaccaccaacaccaaagagggcuccaacauuugccugacacgcaccgaccgcggcugguacugcgacaacgcaggcuccgucucguucuucccccaagccgaaaccugcaaaguccaauccaaccgcgucuucugcgacaccaugaacucccucacccuccccuccgaagucaaucuaugcaacguagacaucuucaacccgaaauaugacugcaaaauuaugacaucuaaaaccgacguguccuccucagucaucacuucccuaggagccaucguuuccuguuacggcaagaccaaaugcaccgccagcaacaaaaaccgaggcaucaucaaaaccuucuccaacggaugugacuaugucuccaacaagggcgucgacaccgucagcgucggcaacacccucuacugcgucaacaaacaagaaggccaaucccucuacgucaaaggagagcccauaaucaacuucuacgacccccucgucuucccauccgacgaguucgacgccucaaucucccaagucaacgagaaaaucaaccaauccuuagccuucauccguaaguccgacgaacuccuucacaacgucaacgccgguaaaucuaccaccaacaucaugauaacaacaauaauuaucgucaucaucgucauccuccuuucccucaucgcggucgggcuauugcucuacugcaaagcccgguccaccccaguaacccucucuaaagaccaacucagcggaaucaauaacauagccuucagcaauuaaggacuagugaagggaacacccaaauuuaauucagccuuaagcacaauuaauuaagagugaaacguaauuguacaagcaguuggucacccaccauagggcaugaucaacaccgcaaccuuuccuuuuucccccagugauucugaaaaaccccucuucccuucagcuugcuuagauguuccaaauuuaguaagcuuaaggcggccuacagaagaaaaagaaaaaaaaggccacaaaaguucccucucacuuucaguaaauaaaauaaaagcagcaacagaaauaaagaaauaaaugaaauucaaaaugaaauaaauauuguguugugcagcauuaaaaaaucaauaaaaauuaaaaaugagcaagaucuaaaaaaaaaaaaaaaaaaaaaaaaaaaaaaaaaaaaaaaaaaaaaaaaaaaaaaaaaaaaaaaaugcaucccccccccccccccccccccccccccccccaaaggcucuuuucagagccaccagaauu

SEQ ID NO: 2527 - RNA, 1960 nt, Artificial Sequence
  mRNA product Design d-4 comprising derived and/or modified sequence from HRSV(A2)__F_DSCav1_mut2 (opt1)
gggagagucccgcagucggcguccagcggcucugcuuguucgugugugugucguugcaggccuuauucaagcuuaccauggagcugcucauccugaaggccaacgccaucaccaccauccugacggcggugaccuucugcuucgccagcggccagaacaucaccgaggaguucuaccaguccacgugcagcgccgucuccaagggguaccucggcgcccugcggaccggcugguacaccuccgugaucaccaucgagcugagcaacaucaaggagaacaagugcaacgggaccgacgccaaggugaagcucaucaagcaggagcuggacaaguacaagaacgcggucacggaccugcagcuccugaugcaguccaccccggcaaccggcuccggcuccgccaucugcagcggcgucgccgugugcaaggugcugcaccucgagggggaggucaacaagaucaagagcgcccugcuguccaccaacaaggccguggugagccucuccaacggcgucagcgugcugaccuucaaggugcuggaccucaagaacuacaucgacaagcagcugcugcccauccugaacaagcagagcugcuccauccccaacaucgagacggugaucgaguuccagcagaagaacaaccggcuccuggagaucacccgcgaguucagcgugaacgccggggucaccacccccguguccacguacaugcugaccaacagcgagcuccugucccugaucaacgacaugccgaucaccaacgaccagaagaagcucaugagcaacaacgugcagaucguccggcagcaguccuacagcaucaugugcaucaucaaggaggaggugcuggcguacgugguccagcugccccucuacggcgugaucgacacccccugcuggaagcugcacacgagcccccugugcaccaccaacaccaaggagggguccaacaucugccucacgcgcaccgaccggggcugguacugcgacaacgccggcagcgucuccuucuucccgcaggccgagaccugcaaggugcagagcaaccgcguguucugcgacaccaugaacucccugacgcugcccagcgagguaaaccucugcaacgucgacaucuucaaccccaaguacgacugcaagaucaugaccuccaagaccgacgugagcuccagcgugaucaccucccugggggccaucgucagcugcuacggcaagacgaagugcaccgccagcaacaagaaccgggggaucaucaagaccuucuccaacggcugcgacuacgugagcaacaagggcguggacaccguguccgucgggaacacccuguacugcgugaacaagcaggagggccagagccucuacgugaagggggagcccaucaucaacuucuacgacccgcuggucuuccccuccgacgaguucgacgcgagcaucucccaggugaacgagaagaucaaccagagccuggccuucauccgcaaguccgacgagcugcuccacaacgugaacgccggcaagagcacgaccaacaucaugaucaccaccaucaucaucgucaucaucgugauccugcugucccucaucgccguggggcugcugcucuacugcaaggcccggagcacgcccgucacccuguccaaggaccagcugagcggcaucaacaacaucgcguucuccaacugaggacuaguggaagcauuuuccuggcugauuaaaagaaauuacucagcuauggucaucuguuccuguuagaaggcuaugcagcauauuauauacuaugcgcauguuaugaaaugcauaauaaaaaauuuuaaaaaaucuaaaagaucuaaaaaaaaaaaaaaaaaaaaaaaaaaaaaaaaaaaaaaaaaaaaaaaaaaaaaaaaaaaaaaaaugcaucccccccccccccccccccccccccccccccaaaggcucuuuucagagccaccagaauu

SEQ ID NO: 2528 - RNA, 1960 nt, Artificial Sequence
  mRNA product Design d-4 comprising derived and/or modified sequence from HRSV(A2)__F_DSCav1_mut2 (opt1)
gggagagucccgcagucggcguccagcggcucugcuuguucgugugugugucguugcaggccuuauucaagcuuaccauggagcugcucauccugaaggccaacgccaucaccaccauccugacggcggugaccuucugcuucgccagcggccagaacaucaccgaggaguucuaccaguccacgugcagcgccgucuccaagggguaccucggcgcccugcgcaccgggugguacaccagcgugaucaccaucgagcuguccaacaucaaggagaacaagugcaacggcaccgacgccaaggugaagcucaucaagcaggagcuggacaaguacaagaacgcggucacggaccugcagcuccugaugcagagcacccccgccaccggguccggcagcgccaucugcuccggcguggccgugugcaagguccugcaccucgagggggaggugaacaagaucaagagcgcgcugcuguccaccaacaaggccguggucagccucuccaacggcgugagcgugcugacguucaagguccuggaccucaagaacuacaucgacaagcagcugcugccgauccucaacaagcaguccugcagcauccccaacaucgagaccgugaucgaguuccagcagaagaacaaccggcugcuggagaucacccgcgaguucuccgugaacgccggggucaccacgcccgugagcaccuacaugcucaccaacuccgagcugcugagccucaucaacgacaugcccaucaccaacgaccagaagaagcugaugagcaacaacgugcagaucguccggcagcaguccuacagcaucaugugcaucaucaaggaggaggugcuggccuacgugguccagcucccgcuguacggcgugaucgacacgcccugcuggaagcugcacaccagcccccucugcaccaccaacacgaaggagggguccaacaucugccugacccgcaccgaccggggcugguacugcgacaacgccggcuccgugagcuucuucccccaggcggagaccugcaagguccaguccaaccgcguguucugcgacacgaugaacagccugacccucccguccgaggucaaccugugcaacguggacaucuucaaccccaaguacgacugcaagaucaugaccagcaagaccgacguguccagcuccgucaucacgagccugggggccaucguguccugcuacggcaagaccaagugcaccgccagcaacaagaaccgggggaucaucaagaccuucuccaacggcugcgacuacgugagcaacaagggcgucgacacgguguccguggggaacacccucuacugcgucaacaagcaggagggccagagccuguacgugaagggggagcccaucaucaacuucuacgacccccugguguucccgagcgacgaguucgacgccuccaucagccaggucaacgagaagaucaaccagucccucgccuucauccgcaagagcgacgagcugcugcacaacgugaacgcgggcaaguccaccaccaacaucaugaucaccacgaucaucaucgugaucaucgucauccuccugagccugaucgccguggggcuccugcuguacugcaaggcccgguccacccccgugacccugagcaaggaccagcucuccggcaucaacaacaucgccuucagcaacugaggacuaguggaagcauuuuccuggcugauuaaaagaaauuacucagcuauggucaucuguuccuguuagaaggcuaugcagcauauuauauacuaugcgcauguuaugaaaugcauaauaaaaaauuuuaaaaaaucuaaaagaucuaaaaaaaaaaaaaaaaaaaaaaaaaaaaaaaaaaaaaaaaaaaaaaaaaaaaaaaaaaaaaaaaugcaucccccccccccccccccccccccccccccccaaaggcucuuuucagagccaccagaauu

SEQ ID NO: 2529 - RNA, 1960 nt, Artificial Sequence
  mRNA product Design d-4 comprising derived and/or modified sequence from HRSV(A2)__F_DSCav1_mut2 (opt2)
gggagagucccgcagucggcguccagcggcucugcuuguucgugugugugucguugcaggccuuauucaagcuuaccauggagcuccucauccucaaggccaacgccaucaccaccauccucaccgccgucaccuucugcuucgccuccggccagaacaucaccgaggaguucuaccaguccaccugcuccgccgucuccaagggcuaccucggcgcccuccgcaccggcugguacaccuccgucaucaccaucgagcucuccaacaucaaggagaacaagugcaacggcaccgacgccaaggucaagcucaucaagcaggagcucgacaaguacaagaacgccgucaccgaccuccagcuccucaugcaguccacccccgccaccggcuccggcuccgccaucugcuccggcgucgccgucugcaagguccuccaccucgagggcgaggucaacaagaucaaguccgcccuccucuccaccaacaaggccgucgucucccucuccaacggcgucuccguccucaccuucaagguccucgaccucaagaacuacaucgacaagcagcuccuccccauccucaacaagcaguccugcuccauccccaacaucgagaccgucaucgaguuccagcagaagaacaaccgccuccucgagaucacccgcgaguucuccgucaacgccggcgucaccacccccgucuccaccuacaugcucaccaacuccgagcuccucucccucaucaacgacaugcccaucaccaacgaccagaagaagcucauguccaacaacguccagaucguccgccagcaguccuacuccaucaugugcaucaucaaggaggagguccucgccuacgucguccagcucccccucuacggcgucaucgacacccccugcuggaagcuccacaccuccccccucugcaccaccaacaccaaggagggcuccaacaucugccucacccgcaccgaccgcggcugguacugcgacaacgccggcuccgucuccuucuucccccaggccgagaccugcaagguccaguccaaccgcgucuucugcgacaccaugaacucccucacccuccccuccgaggucaaccucugcaacgucgacaucuucaaccccaaguacgacugcaagaucaugaccuccaagaccgacgucuccuccuccgucaucaccucccucggcgccaucgucuccugcuacggcaagaccaagugcaccgccuccaacaagaaccgcggcaucaucaagaccuucuccaacggcugcgacuacgucuccaacaagggcgucgacaccgucuccgucggcaacacccucuacugcgucaacaagcaggagggccagucccucuacgucaagggcgagcccaucaucaacuucuacgacccccucgucuuccccuccgacgaguucgacgccuccaucucccaggucaacgagaagaucaaccagucccucgccuucauccgcaaguccgacgagcuccuccacaacgucaacgccggcaaguccaccaccaacaucaugaucaccaccaucaucaucgucaucaucgucauccuccucucccucaucgccgucggccuccuccucuacugcaaggcccgcuccacccccgucacccucuccaaggaccagcucuccggcaucaacaacaucgccuucuccaacugaggacuaguggaagcauuuuccuggcugauuaaaagaaauuacucagcuauggucaucuguuccuguuagaaggcuaugcagcauauuauauacuaugcgcauguuaugaaaugcauaauaaaaaauuuuaaaaaaucuaaaagaucuaaaaaaaaaaaaaaaaaaaaaaaaaaaaaaaaaaaaaaaaaaaaaaaaaaaaaaaaaaaaaaaaugcaucccccccccccccccccccccccccccccccaaaggcucuuuucagagccaccagaauu

SEQ ID NO: 2530 - RNA, 1960 nt, Artificial Sequence
  mRNA product Design d-4 comprising derived and/or modified sequence from HRSV(A2)__F_DSCav1_mut2 (opt3)
gggagagucccgcagucggcguccagcggcucugcuuguucgugugugugucguugcaggccuuauucaagcuuaccauggagcugcucauccuuaaggccaacgcuauuaccacaauacugacugcagugacguucugcuuugccagcggccagaauaucaccgaagaguucuaccaauccacauguucugcggucucaaaaggguauuugggagcuuuaagaacugguugguacaccaguguuauuacaaucgaacugagcaacauuaaggagaauaaaugcaacggcaccgacgccaaggugaaacuaaucaagcaggaacucgauaaguauaaaaaugcaguaacugaccugcagcuucugaugcaguccacacccgccaccgggucuggaucggcuauauguucaggcguggcagucugcaagguguugcaccucgagggugagguuaacaaaaucaagagcgcccugcugaguacgaauaaagcuguggucucccucucuaacggggugagcguauuaacuuuuaagguucuggaucuuaagaauuacauugacaaacaauugcugccuauccuaaacaagcaguccuguucaauuccaaauaucgaaaccgugauagaguuccagcagaaaaacaauaggcuccuggaaauuacacgggaguuuagugucaacgccggagugacuaccccggugagcacauauaugcuuaccaauucugagcuguugucccucaucaacgauaugcccauuacgaacgaccaaaagaaacugaugucaaauaacguccagaucguucgccagcagagcuacaguaucaugugcauuauaaaggaagagguguuagcguauguagugcaacugccucucuacggcgucaucgauacuccauguuggaaacuucauacaucuccccugugcaccacuaauacaaaggaaggcuccaacauuuguuugacccgaacggaccgugggugguacugcgauaaugcaggaagcgugucguucuuuccucaggccgagaccuguaagguucagucuaacagaguguucugcgacacaaugaacucccuaacucugccaucagaagucaaucucugcaauguggauaucuuuaaccccaaauaugacuguaagauaaugaccaguaaaacagauguaagcuccucuguuauuacuagccugggugcuaucgugucaugcuacggcaagaccaaauguacagccaguaauaagaacagggggaucauuaagaccuucuccaauggaugcgacuaugucagcaacaaaggcguggacacugucucuguggguaauacgcuuuacuguguuaacaagcaagaggggcagucacuguaugugaaaggagagccuaucauuaacuuuuacgauccauugguauucccgagugacgaauuugaugcaagcauaucccaggucaaugagaagaucaaccagucucucgcuuucauucggaaaucggacgaacuguuacacaaugugaacgccggcaagagcacaaccaauaucaugaucacuaccauuauaaucguuauuaucgugauucugcuaucccucaucgcggucggccugcuuuuguauugcaaggcccgcucaacacccgugacccugaguaaagaucaacucucugggauaaacaauaucgcauucagcaacugaggacuaguggaagcauuuuccuggcugauuaaaagaaauuacucagcuauggucaucuguuccuguuagaaggcuaugcagcauauuauauacuaugcgcauguuaugaaaugcauaauaaaaaauuuuaaaaaaucuaaaagaucuaaaaaaaaaaaaaaaaaaaaaaaaaaaaaaaaaaaaaaaaaaaaaaaaaaaaaaaaaaaaaaaaugcaucccccccccccccccccccccccccccccccaaaggcucuuuucagagccaccagaauu

SEQ ID NO: 2531 - RNA, 1960 nt, Artificial Sequence
  mRNA product Design d-4 comprising derived and/or modified sequence from HRSV(A2)__F_DSCav1_mut2 (opt4)
gggagagucccgcagucggcguccagcggcucugcuuguucgugugugugucguugcaggccuuauucaagcuuaccauggagcugcugauccugaaggccaacgccaucaccaccauccugaccgccgugaccuucugcuucgccagcggccagaacaucaccgaggaguucuaccagagcaccugcagcgccgugagcaagggcuaccugggcgcccugagaaccggcugguacaccagcgugaucaccaucgagcugagcaacaucaaggagaacaagugcaacggcaccgacgccaaggugaagcugaucaagcaggagcuggacaaguacaagaacgccgugaccgaccugcagcugcugaugcagagcacccccgccaccggcagcggcagcgccaucugcagcggcguggccgugugcaaggugcugcaccuggagggcgaggugaacaagaucaagagcgcccugcugagcaccaacaaggccguggugagccugagcaacggcgugagcgugcugaccuucaaggugcuggaccugaagaacuacaucgacaagcagcugcugcccauccugaacaagcagagcugcagcauccccaacaucgagaccgugaucgaguuccagcagaagaacaacagacugcuggagaucaccagagaguucagcgugaacgccggcgugaccacccccgugagcaccuacaugcugaccaacagcgagcugcugagccugaucaacgacaugcccaucaccaacgaccagaagaagcugaugagcaacaacgugcagaucgugagacagcagagcuacagcaucaugugcaucaucaaggaggaggugcuggccuacguggugcagcugccccuguacggcgugaucgacacccccugcuggaagcugcacaccagcccccugugcaccaccaacaccaaggagggcagcaacaucugccugaccagaaccgacagaggcugguacugcgacaacgccggcagcgugagcuucuucccccaggccgagaccugcaaggugcagagcaacagaguguucugcgacaccaugaacagccugacccugcccagcgaggugaaccugugcaacguggacaucuucaaccccaaguacgacugcaagaucaugaccagcaagaccgacgugagcagcagcgugaucaccagccugggcgccaucgugagcugcuacggcaagaccaagugcaccgccagcaacaagaacagaggcaucaucaagaccuucagcaacggcugcgacuacgugagcaacaagggcguggacaccgugagcgugggcaacacccuguacugcgugaacaagcaggagggccagagccuguacgugaagggcgagcccaucaucaacuucuacgacccccugguguuccccagcgacgaguucgacgccagcaucagccaggugaacgagaagaucaaccagagccuggccuucaucagaaagagcgacgagcugcugcacaacgugaacgccggcaagagcaccaccaacaucaugaucaccaccaucaucaucgugaucaucgugauccugcugagccugaucgccgugggccugcugcuguacugcaaggccagaagcacccccgugacccugagcaaggaccagcugagcggcaucaacaacaucgccuucagcaacugaggacuaguggaagcauuuuccuggcugauuaaaagaaauuacucagcuauggucaucuguuccuguuagaaggcuaugcagcauauuauauacuaugcgcauguuaugaaaugcauaauaaaaaauuuuaaaaaaucuaaaagaucuaaaaaaaaaaaaaaaaaaaaaaaaaaaaaaaaaaaaaaaaaaaaaaaaaaaaaaaaaaaaaaaaugcaucccccccccccccccccccccccccccccccaaaggcucuuuucagagccaccagaauu

SEQ ID NO: 2532 - RNA, 1960 nt, Artificial Sequence
  mRNA product Design d-4 comprising derived and/or modified sequence from HRSV(A2)__F_DSCav1_mut2 (opt5)
gggagagucccgcagucggcguccagcggcucugcuuguucgugugugugucguugcaggccuuauucaagcuuaccauggagcugcucauccugaaggccaacgcuauuaccacaauccuuacggccgugaccuucugcuuugcgagcggccagaauauuacagaagaguucuaccaauccaccuguucugcugucagcaaaggguaucugggagcccucagaacaggcugguacaccuccguuaucacaauugaacugucuaacaucaaggagaauaaaugcaacgggaccgacgccaaggugaaacuuaucaagcaggaacuggauaaguauaaaaaugcugugacggaccuccagcugcugaugcagagcacccccgccacaggauccggcucugcuauuuguagcggggucgccgugugcaagguucuccaccuggagggagaggugaacaaaaucaaguccgcgcuucugagcaccaauaaagccgucgugucucucuccaacggcguuagcgugcugacauuuaagguccuugaucugaagaauuacauugacaaacaacuccugccuauccugaacaagcagucuuguuccauuccgaauaucgaaaccgugauugaguuccagcagaaaaacaaucggcuccuggaaaucacgcgcgaguuuagcgugaacgcuggcgucacaacccccguuucuacauauaugcuuaccaauuccgagcugcucagccugaucaacgauaugccuauuaccaacgaccaaaagaaacuuauguccaauaacgugcagaucgugagacagcagucuuacagcauuaugugcaucauuaaggaagagguccuggccuaugugguucaacucccccuguacggggugaucgauacaccuuguuggaaacugcauacgagcccccucugcaccacaaauaccaaggaaggauccaacaucugucugacacggaccgaccgcggcugguacugcgauaaugcugggucugucuccuucuuuccucaggccgagacguguaaggugcagagcaacagaguuuucugcgacacaaugaacucucuuacccugccgagcgaagugaaucucugcaaugucgauauuuuuaaccccaaauaugacuguaagaucaugaccuccaaaacagaugugucuagcuccgucauuaccagccugggagcgaucgugucuugcuacggcaagacaaaauguacggccuccaauaagaaccgggggauuaucaagaccuucagcaauggaugcgacuauguuucuaacaaaggcguggacacagucuccgugggcaauacccuuuacuguguuaacaagcaagaggggcagagccuguaugugaaaggagagccuaucauuaacuuuuacgauccccucgucuucccuuccgacgaauuugaugcuucuaucagccaggugaaugagaagauuaaccagucccuggccuucauccgcaaaucugacgaacugcuccacaaugugaacgcuggcaagagcacaaccaauauuaugaucacgaccauuaucaucguuauuaucgucauucugcuuucccugaucgccguggggcuccugcuguauugcaaggccagaagcacacccgugacccuuucuaaagaucaacucuccggaauuaacaauaucgcuuucagcaacugaggacuaguggaagcauuuuccuggcugauuaaaagaaauuacucagcuauggucaucuguuccuguuagaaggcuaugcagcauauuauauacuaugcgcauguuaugaaaugcauaauaaaaaauuuuaaaaaaucuaaaagaucuaaaaaaaaaaaaaaaaaaaaaaaaaaaaaaaaaaaaaaaaaaaaaaaaaaaaaaaaaaaaaaaaugcaucccccccccccccccccccccccccccccccaaaggcucuuuucagagccaccagaauu

SEQ ID NO: 2533 - RNA, 1960 nt, Artificial Sequence
  mRNA product Design d-4 comprising derived and/or modified sequence from HRSV(A2)__F_DSCav1_mut2 (opt6)
gggagagucccgcagucggcguccagcggcucugcuuguucgugugugugucguugcaggccuuauucaagcuuaccauggaacuacuaauccuaaaagcaaacgcaauuacaacuauacuuaccgccguaacauuuugcuucgcaucugggcaaaacauuaccgaagaauuuuaucaaucaacaugcucagcagucuccaaaggauaccuuggagcauuaagaaccggcugguauaccuccguaauaacaauugaacuaucuaauauaaaagaaaauaaauguaauggaacugacgcaaaaguuaaacuaauaaaacaagaacucgacaaauacaaaaacgccgucacagaccuacaacuacuaaugcaaucaacccccgcaacaggaucaggauccgcaaucugcagcggcgucgcaguuugcaaaguccuacauuuagaaggagaaguaaacaaaauaaaaucugcucuccucucuacaaacaaagcaguagugucacuuucaaacggaguaucaguucuaacauucaaaguacuagaccuaaaaaauuacauagacaaacaacuacuuccaauucuaaacaaacaauccuguuccauacccaacauagaaacaguaauagaauuucaacaaaaaaauaacagacuccuagaaauuacaagagaauuuuccgucaaugcaggaguaacaaccccaguaucaaccuacauguuaacuaacucagaacucuuaucacuaauaaacgacaugccaaucacuaaugaccaaaaaaaacucaugucaaauaacguacaaauaguccgacaacaaucauacuccaucaugugcauuauaaaagaagaaguacuagcauacgucguccaauuaccacuauacggcgucauagacacaccauguuggaaacuccacacaucaccacuaugcacuacaaauacaaaagaaggcuccaacaucugccuaacaagaacagacagagguugguauugcgacaacgcaggaucaguaucauuuuucccccaagcagaaacauguaaaguacaaucaaauagagucuucugcgacaccaugaacucauuaacacuaccuucagaagucaaccuaugcaacguagacaucuucaacccuaaauaugacugcaaaaucaugaccagcaaaaccgacguuucaucuuccguaauaacaucacuaggcgcaauagucucauguuacggcaaaacaaaauguacagcaucaaauaaaaaccguggaauaauaaaaacauuuucuaaugguugugacuacguaagcaauaaaggaguagauacaguaucagucggcaacaccuuauacuguguaaacaaacaagaaggccaaaguuuauacgucaaaggagaacccaucaucaacuucuacgacccauuaguauucccaucagacgaauuugaugcaagcauuucacaagucaacgaaaaaaucaaucaaucauuagcauucauccgaaaaucagacgaauuauuacacaacguaaacgccggaaaaucaaccacuaauauaaugauaaccacaauaaucaucguaauaauaguaauacuucucucacuaaucgcagucggacuccuucuauacugcaaagcaagaucuacaccaguaacacuauccaaagaucaacuaaguggcauaaacaacauagcauuuucuaacuaaggacuaguggaagcauuuuccuggcugauuaaaagaaauuacucagcuauggucaucuguuccuguuagaaggcuaugcagcauauuauauacuaugcgcauguuaugaaaugcauaauaaaaaauuuuaaaaaaucuaaaagaucuaaaaaaaaaaaaaaaaaaaaaaaaaaaaaaaaaaaaaaaaaaaaaaaaaaaaaaaaaaaaaaaaugcaucccccccccccccccccccccccccccccccaaaggcucuuuucagagccaccagaauu

SEQ ID NO: 2534 - RNA, 1960 nt, Artificial Sequence
  mRNA product Design d-4 comprising derived and/or modified sequence from HRSV(A2)__F_DSCav1_mut2 (opt11)
gggagagucccgcagucggcguccagcggcucugcuuguucgugugugugucguugcaggccuuauucaagcuuaccauggaacuccucauccuaaaagccaacgcgaucaccacaauccugacagccgucaccuucugcuucgccuccggccaaaacaucaccgaagaguucuaccaauccacaugcuccgccgucuccaagggcuaccugggcgcacuucguacaggcugguacaccuccguaauaaccaucgaacucuccaacaucaaagaaaacaaaugcaacggcacagacgcaaaagucaaacucaucaagcaagaacuugacaaauacaaaaaugcagucaccgaccuucaacuccucaugcaaucuacccccgccacaggcuccggcuccgcuaucugcuccggcgucgccgucugcaaaguccuccaccucgaaggugaaguaaacaaaauaaaauccgcccuccucuccaccaacaaagccgucgucucccuaucaaacggcgucuccgugcucaccuucaagguucucgaccugaaaaacuacauagacaaacagcuccuaccaauccuuaacaaacagagcugcuccauuccgaauaucgaaacgguaaucgaauuucaacagaaaaacaaccgccuccucgaaauaacgcgagaguucuccguaaacgcuggcgucaccacacccgucagcaccuacaugcuaacgaacuccgaacucuugucgcucaucaacgacaugcccauaaccaacgaccaaaagaaacuaauguccaauaacguacaaaucguacgccaacaaucuuacuccaucaugugcaucauaaaagaagaaguacuagcuuacgucguccaacucccacuguacggagucaucgacacccccugcuggaaacuccacaccucuccccucugcaccaccaacaccaaagagggcuccaacauuugccugacacgcaccgaccgcggcugguacugcgacaacgcaggcuccgucucguucuucccccaagccgaaaccugcaaaguccaauccaaccgcgucuucugcgacaccaugaacucccucacccuccccuccgaagucaaucuaugcaacguagacaucuucaacccgaaauaugacugcaaaauuaugacaucuaaaaccgacguguccuccucagucaucacuucccuaggagccaucguuuccuguuacggcaagaccaaaugcaccgccagcaacaaaaaccgaggcaucaucaaaaccuucuccaacggaugugacuaugucuccaacaagggcgucgacaccgucagcgucggcaacacccucuacugcgucaacaaacaagaaggccaaucccucuacgucaaaggagagcccauaaucaacuucuacgacccccucgucuucccauccgacgaguucgacgccucaaucucccaagucaacgagaaaaucaaccaauccuuagccuucauccguaaguccgacgaacuccuucacaacgucaacgccgguaaaucuaccaccaacaucaugauaacaacaauaauuaucgucaucaucgucauccuccuuucccucaucgcggucgggcuauugcucuacugcaaagcccgguccaccccaguaacccucucuaaagaccaacucagcggaaucaauaacauagccuucagcaauuaaggacuaguggaagcauuuuccuggcugauuaaaagaaauuacucagcuauggucaucuguuccuguuagaaggcuaugcagcauauuauauacuaugcgcauguuaugaaaugcauaauaaaaaauuuuaaaaaaucuaaaagaucuaaaaaaaaaaaaaaaaaaaaaaaaaaaaaaaaaaaaaaaaaaaaaaaaaaaaaaaaaaaaaaaaugcaucccccccccccccccccccccccccccccccaaaggcucuuuucagagccaccagaauu

SEQ ID NO: 2535 - RNA, 2057 nt, Artificial Sequence
  mRNA product Design d-5 comprising derived and/or modified sequence from HRSV(A2)__F_DSCav1_mut2 (opt1)
gggagagggcgcuuggcuugcaaggacccugagcugcggcauugaagcacacccaacccaacucgacugaagucagccucacugaaccggaucugagaaucuucucucucugggcuugccagggcucuccgaaccuagcuagcauccucuucaauuccaacuagaaagcuuaccauggagcugcucauccugaaggccaacgccaucaccaccauccugacggcggugaccuucugcuucgccagcggccagaacaucaccgaggaguucuaccaguccacgugcagcgccgucuccaagggguaccucggcgcccugcggaccggcugguacaccuccgugaucaccaucgagcugagcaacaucaaggagaacaagugcaacgggaccgacgccaaggugaagcucaucaagcaggagcuggacaaguacaagaacgcggucacggaccugcagcuccugaugcaguccaccccggcaaccggcuccggcuccgccaucugcagcggcgucgccgugugcaaggugcugcaccucgagggggaggucaacaagaucaagagcgcccugcuguccaccaacaaggccguggugagccucuccaacggcgucagcgugcugaccuucaaggugcuggaccucaagaacuacaucgacaagcagcugcugcccauccugaacaagcagagcugcuccauccccaacaucgagacggugaucgaguuccagcagaagaacaaccggcuccuggagaucacccgcgaguucagcgugaacgccggggucaccacccccguguccacguacaugcugaccaacagcgagcuccugucccugaucaacgacaugccgaucaccaacgaccagaagaagcucaugagcaacaacgugcagaucguccggcagcaguccuacagcaucaugugcaucaucaaggaggaggugcuggcguacgugguccagcugccccucuacggcgugaucgacacccccugcuggaagcugcacacgagcccccugugcaccaccaacaccaaggagggguccaacaucugccucacgcgcaccgaccggggcugguacugcgacaacgccggcagcgucuccuucuucccgcaggccgagaccugcaaggugcagagcaaccgcguguucugcgacaccaugaacucccugacgcugcccagcgagguaaaccucugcaacgucgacaucuucaaccccaaguacgacugcaagaucaugaccuccaagaccgacgugagcuccagcgugaucaccucccugggggccaucgucagcugcuacggcaagacgaagugcaccgccagcaacaagaaccgggggaucaucaagaccuucuccaacggcugcgacuacgugagcaacaagggcguggacaccguguccgucgggaacacccuguacugcgugaacaagcaggagggccagagccucuacgugaagggggagcccaucaucaacuucuacgacccgcuggucuuccccuccgacgaguucgacgcgagcaucucccaggugaacgagaagaucaaccagagccuggccuucauccgcaaguccgacgagcugcuccacaacgugaacgccggcaagagcacgaccaacaucaugaucaccaccaucaucaucgucaucaucgugauccugcugucccucaucgccguggggcugcugcucuacugcaaggcccggagcacgcccgucacccuguccaaggaccagcugagcggcaucaacaacaucgcguucuccaacugaggacuaguggaagcauuuuccuggcugauuaaaagaaauuacucagcuauggucaucuguuccuguuagaaggcuaugcagcauauuauauacuaugcgcauguuaugaaaugcauaauaaaaaauuuuaaaaaaucuaaaagaucuaaaaaaaaaaaaaaaaaaaaaaaaaaaaaaaaaaaaaaaaaaaaaaaaaaaaaaaaaaaaaaaaugcaucccccccccccccccccccccccccccccccaaaggcucuuuucagagccaccagaauu

SEQ ID NO: 2536 - RNA, 2057 nt, Artificial Sequence
  mRNA product Design d-5 comprising derived and/or modified sequence from HRSV(A2)__F_DSCav1_mut2 (opt1)
gggagagggcgcuuggcuugcaaggacccugagcugcggcauugaagcacacccaacccaacucgacugaagucagccucacugaaccggaucugagaaucuucucucucugggcuugccagggcucuccgaaccuagcuagcauccucuucaauuccaacuagaaagcuuaccauggagcugcucauccugaaggccaacgccaucaccaccauccugacggcggugaccuucugcuucgccagcggccagaacaucaccgaggaguucuaccaguccacgugcagcgccgucuccaagggguaccucggcgcccugcgcaccgggugguacaccagcgugaucaccaucgagcuguccaacaucaaggagaacaagugcaacggcaccgacgccaaggugaagcucaucaagcaggagcuggacaaguacaagaacgcggucacggaccugcagcuccugaugcagagcacccccgccaccggguccggcagcgccaucugcuccggcguggccgugugcaagguccugcaccucgagggggaggugaacaagaucaagagcgcgcugcuguccaccaacaaggccguggucagccucuccaacggcgugagcgugcugacguucaagguccuggaccucaagaacuacaucgacaagcagcugcugccgauccucaacaagcaguccugcagcauccccaacaucgagaccgugaucgaguuccagcagaagaacaaccggcugcuggagaucacccgcgaguucuccgugaacgccggggucaccacgcccgugagcaccuacaugcucaccaacuccgagcugcugagccucaucaacgacaugcccaucaccaacgaccagaagaagcugaugagcaacaacgugcagaucguccggcagcaguccuacagcaucaugugcaucaucaaggaggaggugcuggccuacgugguccagcucccgcuguacggcgugaucgacacgcccugcuggaagcugcacaccagcccccucugcaccaccaacacgaaggagggguccaacaucugccugacccgcaccgaccggggcugguacugcgacaacgccggcuccgugagcuucuucccccaggcggagaccugcaagguccaguccaaccgcguguucugcgacacgaugaacagccugacccucccguccgaggucaaccugugcaacguggacaucuucaaccccaaguacgacugcaagaucaugaccagcaagaccgacguguccagcuccgucaucacgagccugggggccaucguguccugcuacggcaagaccaagugcaccgccagcaacaagaaccgggggaucaucaagaccuucuccaacggcugcgacuacgugagcaacaagggcgucgacacgguguccguggggaacacccucuacugcgucaacaagcaggagggccagagccuguacgugaagggggagcccaucaucaacuucuacgacccccugguguucccgagcgacgaguucgacgccuccaucagccaggucaacgagaagaucaaccagucccucgccuucauccgcaagagcgacgagcugcugcacaacgugaacgcgggcaaguccaccaccaacaucaugaucaccacgaucaucaucgugaucaucgucauccuccugagccugaucgccguggggcuccugcuguacugcaaggcccgguccacccccgugacccugagcaaggaccagcucuccggcaucaacaacaucgccuucagcaacugaggacuaguggaagcauuuuccuggcugauuaaaagaaauuacucagcuauggucaucuguuccuguuagaaggcuaugcagcauauuauauacuaugcgcauguuaugaaaugcauaauaaaaaauuuuaaaaaaucuaaaagaucuaaaaaaaaaaaaaaaaaaaaaaaaaaaaaaaaaaaaaaaaaaaaaaaaaaaaaaaaaaaaaaaaugcaucccccccccccccccccccccccccccccccaaaggcucuuuucagagccaccagaauu

SEQ ID NO: 2537 - RNA, 2057 nt, Artificial Sequence
  mRNA product Design d-5 comprising derived and/or modified sequence from HRSV(A2)__F_DSCav1_mut2 (opt2)
gggagagggcgcuuggcuugcaaggacccugagcugcggcauugaagcacacccaacccaacucgacugaagucagccucacugaaccggaucugagaaucuucucucucugggcuugccagggcucuccgaaccuagcuagcauccucuucaauuccaacuagaaagcuuaccauggagcuccucauccucaaggccaacgccaucaccaccauccucaccgccgucaccuucugcuucgccuccggccagaacaucaccgaggaguucuaccaguccaccugcuccgccgucuccaagggcuaccucggcgcccuccgcaccggcugguacaccuccgucaucaccaucgagcucuccaacaucaaggagaacaagugcaacggcaccgacgccaaggucaagcucaucaagcaggagcucgacaaguacaagaacgccgucaccgaccuccagcuccucaugcaguccacccccgccaccggcuccggcuccgccaucugcuccggcgucgccgucugcaagguccuccaccucgagggcgaggucaacaagaucaaguccgcccuccucuccaccaacaaggccgucgucucccucuccaacggcgucuccguccucaccuucaagguccucgaccucaagaacuacaucgacaagcagcuccuccccauccucaacaagcaguccugcuccauccccaacaucgagaccgucaucgaguuccagcagaagaacaaccgccuccucgagaucacccgcgaguucuccgucaacgccggcgucaccacccccgucuccaccuacaugcucaccaacuccgagcuccucucccucaucaacgacaugcccaucaccaacgaccagaagaagcucauguccaacaacguccagaucguccgccagcaguccuacuccaucaugugcaucaucaaggaggagguccucgccuacgucguccagcucccccucuacggcgucaucgacacccccugcuggaagcuccacaccuccccccucugcaccaccaacaccaaggagggcuccaacaucugccucacccgcaccgaccgcggcugguacugcgacaacgccggcuccgucuccuucuucccccaggccgagaccugcaagguccaguccaaccgcgucuucugcgacaccaugaacucccucacccuccccuccgaggucaaccucugcaacgucgacaucuucaaccccaaguacgacugcaagaucaugaccuccaagaccgacgucuccuccuccgucaucaccucccucggcgccaucgucuccugcuacggcaagaccaagugcaccgccuccaacaagaaccgcggcaucaucaagaccuucuccaacggcugcgacuacgucuccaacaagggcgucgacaccgucuccgucggcaacacccucuacugcgucaacaagcaggagggccagucccucuacgucaagggcgagcccaucaucaacuucuacgacccccucgucuuccccuccgacgaguucgacgccuccaucucccaggucaacgagaagaucaaccagucccucgccuucauccgcaaguccgacgagcuccuccacaacgucaacgccggcaaguccaccaccaacaucaugaucaccaccaucaucaucgucaucaucgucauccuccucucccucaucgccgucggccuccuccucuacugcaaggcccgcuccacccccgucacccucuccaaggaccagcucuccggcaucaacaacaucgccuucuccaacugaggacuaguggaagcauuuuccuggcugauuaaaagaaauuacucagcuauggucaucuguuccuguuagaaggcuaugcagcauauuauauacuaugcgcauguuaugaaaugcauaauaaaaaauuuuaaaaaaucuaaaagaucuaaaaaaaaaaaaaaaaaaaaaaaaaaaaaaaaaaaaaaaaaaaaaaaaaaaaaaaaaaaaaaaaugcaucccccccccccccccccccccccccccccccaaaggcucuuuucagagccaccagaauu

SEQ ID NO: 2538 - RNA, 2057 nt, Artificial Sequence
  mRNA product Design d-5 comprising derived and/or modified sequence from HRSV(A2)__F_DSCav1_mut2 (opt3)
gggagagggcgcuuggcuugcaaggacccugagcugcggcauugaagcacacccaacccaacucgacugaagucagccucacugaaccggaucugagaaucuucucucucugggcuugccagggcucuccgaaccuagcuagcauccucuucaauuccaacuagaaagcuuaccauggagcugcucauccuuaaggccaacgcuauuaccacaauacugacugcagugacguucugcuuugccagcggccagaauaucaccgaagaguucuaccaauccacauguucugcggucucaaaaggguauuugggagcuuuaagaacugguugguacaccaguguuauuacaaucgaacugagcaacauuaaggagaauaaaugcaacggcaccgacgccaaggugaaacuaaucaagcaggaacucgauaaguauaaaaaugcaguaacugaccugcagcuucugaugcaguccacacccgccaccgggucuggaucggcuauauguucaggcguggcagucugcaagguguugcaccucgagggugagguuaacaaaaucaagagcgcccugcugaguacgaauaaagcuguggucucccucucuaacggggugagcguauuaacuuuuaagguucuggaucuuaagaauuacauugacaaacaauugcugccuauccuaaacaagcaguccuguucaauuccaaauaucgaaaccgugauagaguuccagcagaaaaacaauaggcuccuggaaauuacacgggaguuuagugucaacgccggagugacuaccccggugagcacauauaugcuuaccaauucugagcuguugucccucaucaacgauaugcccauuacgaacgaccaaaagaaacugaugucaaauaacguccagaucguucgccagcagagcuacaguaucaugugcauuauaaaggaagagguguuagcguauguagugcaacugccucucuacggcgucaucgauacuccauguuggaaacuucauacaucuccccugugcaccacuaauacaaaggaaggcuccaacauuuguuugacccgaacggaccgugggugguacugcgauaaugcaggaagcgugucguucuuuccucaggccgagaccuguaagguucagucuaacagaguguucugcgacacaaugaacucccuaacucugccaucagaagucaaucucugcaauguggauaucuuuaaccccaaauaugacuguaagauaaugaccaguaaaacagauguaagcuccucuguuauuacuagccugggugcuaucgugucaugcuacggcaagaccaaauguacagccaguaauaagaacagggggaucauuaagaccuucuccaauggaugcgacuaugucagcaacaaaggcguggacacugucucuguggguaauacgcuuuacuguguuaacaagcaagaggggcagucacuguaugugaaaggagagccuaucauuaacuuuuacgauccauugguauucccgagugacgaauuugaugcaagcauaucccaggucaaugagaagaucaaccagucucucgcuuucauucggaaaucggacgaacuguuacacaaugugaacgccggcaagagcacaaccaauaucaugaucacuaccauuauaaucguuauuaucgugauucugcuaucccucaucgcggucggccugcuuuuguauugcaaggcccgcucaacacccgugacccugaguaaagaucaacucucugggauaaacaauaucgcauucagcaacugaggacuaguggaagcauuuuccuggcugauuaaaagaaauuacucagcuauggucaucuguuccuguuagaaggcuaugcagcauauuauauacuaugcgcauguuaugaaaugcauaauaaaaaauuuuaaaaaaucuaaaagaucuaaaaaaaaaaaaaaaaaaaaaaaaaaaaaaaaaaaaaaaaaaaaaaaaaaaaaaaaaaaaaaaaugcaucccccccccccccccccccccccccccccccaaaggcucuuuucagagccaccagaauu

SEQ ID NO: 2539 - RNA, 2057 nt, Artificial Sequence
  mRNA product Design d-5 comprising derived and/or modified sequence from HRSV(A2)__F_DSCav1_mut2 (opt4)
gggagagggcgcuuggcuugcaaggacccugagcugcggcauugaagcacacccaacccaacucgacugaagucagccucacugaaccggaucugagaaucuucucucucugggcuugccagggcucuccgaaccuagcuagcauccucuucaauuccaacuagaaagcuuaccauggagcugcugauccugaaggccaacgccaucaccaccauccugaccgccgugaccuucugcuucgccagcggccagaacaucaccgaggaguucuaccagagcaccugcagcgccgugagcaagggcuaccugggcgcccugagaaccggcugguacaccagcgugaucaccaucgagcugagcaacaucaaggagaacaagugcaacggcaccgacgccaaggugaagcugaucaagcaggagcuggacaaguacaagaacgccgugaccgaccugcagcugcugaugcagagcacccccgccaccggcagcggcagcgccaucugcagcggcguggccgugugcaaggugcugcaccuggagggcgaggugaacaagaucaagagcgcccugcugagcaccaacaaggccguggugagccugagcaacggcgugagcgugcugaccuucaaggugcuggaccugaagaacuacaucgacaagcagcugcugcccauccugaacaagcagagcugcagcauccccaacaucgagaccgugaucgaguuccagcagaagaacaacagacugcuggagaucaccagagaguucagcgugaacgccggcgugaccacccccgugagcaccuacaugcugaccaacagcgagcugcugagccugaucaacgacaugcccaucaccaacgaccagaagaagcugaugagcaacaacgugcagaucgugagacagcagagcuacagcaucaugugcaucaucaaggaggaggugcuggccuacguggugcagcugccccuguacggcgugaucgacacccccugcuggaagcugcacaccagcccccugugcaccaccaacaccaaggagggcagcaacaucugccugaccagaaccgacagaggcugguacugcgacaacgccggcagcgugagcuucuucccccaggccgagaccugcaaggugcagagcaacagaguguucugcgacaccaugaacagccugacccugcccagcgaggugaaccugugcaacguggacaucuucaaccccaaguacgacugcaagaucaugaccagcaagaccgacgugagcagcagcgugaucaccagccugggcgccaucgugagcugcuacggcaagaccaagugcaccgccagcaacaagaacagaggcaucaucaagaccuucagcaacggcugcgacuacgugagcaacaagggcguggacaccgugagcgugggcaacacccuguacugcgugaacaagcaggagggccagagccuguacgugaagggcgagcccaucaucaacuucuacgacccccugguguuccccagcgacgaguucgacgccagcaucagccaggugaacgagaagaucaaccagagccuggccuucaucagaaagagcgacgagcugcugcacaacgugaacgccggcaagagcaccaccaacaucaugaucaccaccaucaucaucgugaucaucgugauccugcugagccugaucgccgugggccugcugcuguacugcaaggccagaagcacccccgugacccugagcaaggaccagcugagcggcaucaacaacaucgccuucagcaacugaggacuaguggaagcauuuuccuggcugauuaaaagaaauuacucagcuauggucaucuguuccuguuagaaggcuaugcagcauauuauauacuaugcgcauguuaugaaaugcauaauaaaaaauuuuaaaaaaucuaaaagaucuaaaaaaaaaaaaaaaaaaaaaaaaaaaaaaaaaaaaaaaaaaaaaaaaaaaaaaaaaaaaaaaaugcaucccccccccccccccccccccccccccccccaaaggcucuuuucagagccaccagaauu

SEQ ID NO: 2540 - RNA, 2057 nt, Artificial Sequence
  mRNA product Design d-5 comprising derived and/or modified sequence from HRSV(A2)__F_DSCav1_mut2 (opt5)
gggagagggcgcuuggcuugcaaggacccugagcugcggcauugaagcacacccaacccaacucgacugaagucagccucacugaaccggaucugagaaucuucucucucugggcuugccagggcucuccgaaccuagcuagcauccucuucaauuccaacuagaaagcuuaccauggagcugcucauccugaaggccaacgcuauuaccacaauccuuacggccgugaccuucugcuuugcgagcggccagaauauuacagaagaguucuaccaauccaccuguucugcugucagcaaaggguaucugggagcccucagaacaggcugguacaccuccguuaucacaauugaacugucuaacaucaaggagaauaaaugcaacgggaccgacgccaaggugaaacuuaucaagcaggaacuggauaaguauaaaaaugcugugacggaccuccagcugcugaugcagagcacccccgccacaggauccggcucugcuauuuguagcggggucgccgugugcaagguucuccaccuggagggagaggugaacaaaaucaaguccgcgcuucugagcaccaauaaagccgucgugucucucuccaacggcguuagcgugcugacauuuaagguccuugaucugaagaauuacauugacaaacaacuccugccuauccugaacaagcagucuuguuccauuccgaauaucgaaaccgugauugaguuccagcagaaaaacaaucggcuccuggaaaucacgcgcgaguuuagcgugaacgcuggcgucacaacccccguuucuacauauaugcuuaccaauuccgagcugcucagccugaucaacgauaugccuauuaccaacgaccaaaagaaacuuauguccaauaacgugcagaucgugagacagcagucuuacagcauuaugugcaucauuaaggaagagguccuggccuaugugguucaacucccccuguacggggugaucgauacaccuuguuggaaacugcauacgagcccccucugcaccacaaauaccaaggaaggauccaacaucugucugacacggaccgaccgcggcugguacugcgauaaugcugggucugucuccuucuuuccucaggccgagacguguaaggugcagagcaacagaguuuucugcgacacaaugaacucucuuacccugccgagcgaagugaaucucugcaaugucgauauuuuuaaccccaaauaugacuguaagaucaugaccuccaaaacagaugugucuagcuccgucauuaccagccugggagcgaucgugucuugcuacggcaagacaaaauguacggccuccaauaagaaccgggggauuaucaagaccuucagcaauggaugcgacuauguuucuaacaaaggcguggacacagucuccgugggcaauacccuuuacuguguuaacaagcaagaggggcagagccuguaugugaaaggagagccuaucauuaacuuuuacgauccccucgucuucccuuccgacgaauuugaugcuucuaucagccaggugaaugagaagauuaaccagucccuggccuucauccgcaaaucugacgaacugcuccacaaugugaacgcuggcaagagcacaaccaauauuaugaucacgaccauuaucaucguuauuaucgucauucugcuuucccugaucgccguggggcuccugcuguauugcaaggccagaagcacacccgugacccuuucuaaagaucaacucuccggaauuaacaauaucgcuuucagcaacugaggacuaguggaagcauuuuccuggcugauuaaaagaaauuacucagcuauggucaucuguuccuguuagaaggcuaugcagcauauuauauacuaugcgcauguuaugaaaugcauaauaaaaaauuuuaaaaaaucuaaaagaucuaaaaaaaaaaaaaaaaaaaaaaaaaaaaaaaaaaaaaaaaaaaaaaaaaaaaaaaaaaaaaaaaugcaucccccccccccccccccccccccccccccccaaaggcucuuuucagagccaccagaauu

SEQ ID NO: 2541 - RNA, 2057 nt, Artificial Sequence
  mRNA product Design d-5 comprising derived and/or modified sequence from HRSV(A2)__F_DSCav1_mut2 (opt6)
gggagagggcgcuuggcuugcaaggacccugagcugcggcauugaagcacacccaacccaacucgacugaagucagccucacugaaccggaucugagaaucuucucucucugggcuugccagggcucuccgaaccuagcuagcauccucuucaauuccaacuagaaagcuuaccauggaacuacuaauccuaaaagcaaacgcaauuacaacuauacuuaccgccguaacauuuugcuucgcaucugggcaaaacauuaccgaagaauuuuaucaaucaacaugcucagcagucuccaaaggauaccuuggagcauuaagaaccggcugguauaccuccguaauaacaauugaacuaucuaauauaaaagaaaauaaauguaauggaacugacgcaaaaguuaaacuaauaaaacaagaacucgacaaauacaaaaacgccgucacagaccuacaacuacuaaugcaaucaacccccgcaacaggaucaggauccgcaaucugcagcggcgucgcaguuugcaaaguccuacauuuagaaggagaaguaaacaaaauaaaaucugcucuccucucuacaaacaaagcaguagugucacuuucaaacggaguaucaguucuaacauucaaaguacuagaccuaaaaaauuacauagacaaacaacuacuuccaauucuaaacaaacaauccuguuccauacccaacauagaaacaguaauagaauuucaacaaaaaaauaacagacuccuagaaauuacaagagaauuuuccgucaaugcaggaguaacaaccccaguaucaaccuacauguuaacuaacucagaacucuuaucacuaauaaacgacaugccaaucacuaaugaccaaaaaaaacucaugucaaauaacguacaaauaguccgacaacaaucauacuccaucaugugcauuauaaaagaagaaguacuagcauacgucguccaauuaccacuauacggcgucauagacacaccauguuggaaacuccacacaucaccacuaugcacuacaaauacaaaagaaggcuccaacaucugccuaacaagaacagacagagguugguauugcgacaacgcaggaucaguaucauuuuucccccaagcagaaacauguaaaguacaaucaaauagagucuucugcgacaccaugaacucauuaacacuaccuucagaagucaaccuaugcaacguagacaucuucaacccuaaauaugacugcaaaaucaugaccagcaaaaccgacguuucaucuuccguaauaacaucacuaggcgcaauagucucauguuacggcaaaacaaaauguacagcaucaaauaaaaaccguggaauaauaaaaacauuuucuaaugguugugacuacguaagcaauaaaggaguagauacaguaucagucggcaacaccuuauacuguguaaacaaacaagaaggccaaaguuuauacgucaaaggagaacccaucaucaacuucuacgacccauuaguauucccaucagacgaauuugaugcaagcauuucacaagucaacgaaaaaaucaaucaaucauuagcauucauccgaaaaucagacgaauuauuacacaacguaaacgccggaaaaucaaccacuaauauaaugauaaccacaauaaucaucguaauaauaguaauacuucucucacuaaucgcagucggacuccuucuauacugcaaagcaagaucuacaccaguaacacuauccaaagaucaacuaaguggcauaaacaacauagcauuuucuaacuaaggacuaguggaagcauuuuccuggcugauuaaaagaaauuacucagcuauggucaucuguuccuguuagaaggcuaugcagcauauuauauacuaugcgcauguuaugaaaugcauaauaaaaaauuuuaaaaaaucuaaaagaucuaaaaaaaaaaaaaaaaaaaaaaaaaaaaaaaaaaaaaaaaaaaaaaaaaaaaaaaaaaaaaaaaugcaucccccccccccccccccccccccccccccccaaaggcucuuuucagagccaccagaauu

SEQ ID NO: 2542 - RNA, 2057 nt, Artificial Sequence
  mRNA product Design d-5 comprising derived and/or modified sequence from HRSV(A2)__F_DSCav1_mut2 (opt11)
gggagagggcgcuuggcuugcaaggacccugagcugcggcauugaagcacacccaacccaacucgacugaagucagccucacugaaccggaucugagaaucuucucucucugggcuugccagggcucuccgaaccuagcuagcauccucuucaauuccaacuagaaagcuuaccauggaacuccucauccuaaaagccaacgcgaucaccacaauccugacagccgucaccuucugcuucgccuccggccaaaacaucaccgaagaguucuaccaauccacaugcuccgccgucuccaagggcuaccugggcgcacuucguacaggcugguacaccuccguaauaaccaucgaacucuccaacaucaaagaaaacaaaugcaacggcacagacgcaaaagucaaacucaucaagcaagaacuugacaaauacaaaaaugcagucaccgaccuucaacuccucaugcaaucuacccccgccacaggcuccggcuccgcuaucugcuccggcgucgccgucugcaaaguccuccaccucgaaggugaaguaaacaaaauaaaauccgcccuccucuccaccaacaaagccgucgucucccuaucaaacggcgucuccgugcucaccuucaagguucucgaccugaaaaacuacauagacaaacagcuccuaccaauccuuaacaaacagagcugcuccauuccgaauaucgaaacgguaaucgaauuucaacagaaaaacaaccgccuccucgaaauaacgcgagaguucuccguaaacgcuggcgucaccacacccgucagcaccuacaugcuaacgaacuccgaacucuugucgcucaucaacgacaugcccauaaccaacgaccaaaagaaacuaauguccaauaacguacaaaucguacgccaacaaucuuacuccaucaugugcaucauaaaagaagaaguacuagcuuacgucguccaacucccacuguacggagucaucgacacccccugcuggaaacuccacaccucuccccucugcaccaccaacaccaaagagggcuccaacauuugccugacacgcaccgaccgcggcugguacugcgacaacgcaggcuccgucucguucuucccccaagccgaaaccugcaaaguccaauccaaccgcgucuucugcgacaccaugaacucccucacccuccccuccgaagucaaucuaugcaacguagacaucuucaacccgaaauaugacugcaaaauuaugacaucuaaaaccgacguguccuccucagucaucacuucccuaggagccaucguuuccuguuacggcaagaccaaaugcaccgccagcaacaaaaaccgaggcaucaucaaaaccuucuccaacggaugugacuaugucuccaacaagggcgucgacaccgucagcgucggcaacacccucuacugcgucaacaaacaagaaggccaaucccucuacgucaaaggagagcccauaaucaacuucuacgacccccucgucuucccauccgacgaguucgacgccucaaucucccaagucaacgagaaaaucaaccaauccuuagccuucauccguaaguccgacgaacuccuucacaacgucaacgccgguaaaucuaccaccaacaucaugauaacaacaauaauuaucgucaucaucgucauccuccuuucccucaucgcggucgggcuauugcucuacugcaaagcccgguccaccccaguaacccucucuaaagaccaacucagcggaaucaauaacauagccuucagcaauuaaggacuaguggaagcauuuuccuggcugauuaaaagaaauuacucagcuauggucaucuguuccuguuagaaggcuaugcagcauauuauauacuaugcgcauguuaugaaaugcauaauaaaaaauuuuaaaaaaucuaaaagaucuaaaaaaaaaaaaaaaaaaaaaaaaaaaaaaaaaaaaaaaaaaaaaaaaaaaaaaaaaaaaaaaaugcaucccccccccccccccccccccccccccccccaaaggcucuuuucagagccaccagaauu

SEQ ID NO: 2543 - RNA, 1937 nt, Artificial Sequence
  mRNA product Design e-1 comprising derived and/or modified sequence from HRSV(A2)__F_DSCav1_mut2 (opt1)
gggagaauauaagcguuggcggagcgucgguuguagcacucugcgcgcccgcucuucugcugcuguuugucuacuuccuccugcuuccccgccgccgccgccgccaucaagcuuaccauggagcugcucauccugaaggccaacgccaucaccaccauccugacggcggugaccuucugcuucgccagcggccagaacaucaccgaggaguucuaccaguccacgugcagcgccgucuccaagggguaccucggcgcccugcggaccggcugguacaccuccgugaucaccaucgagcugagcaacaucaaggagaacaagugcaacgggaccgacgccaaggugaagcucaucaagcaggagcuggacaaguacaagaacgcggucacggaccugcagcuccugaugcaguccaccccggcaaccggcuccggcuccgccaucugcagcggcgucgccgugugcaaggugcugcaccucgagggggaggucaacaagaucaagagcgcccugcuguccaccaacaaggccguggugagccucuccaacggcgucagcgugcugaccuucaaggugcuggaccucaagaacuacaucgacaagcagcugcugcccauccugaacaagcagagcugcuccauccccaacaucgagacggugaucgaguuccagcagaagaacaaccggcuccuggagaucacccgcgaguucagcgugaacgccggggucaccacccccguguccacguacaugcugaccaacagcgagcuccugucccugaucaacgacaugccgaucaccaacgaccagaagaagcucaugagcaacaacgugcagaucguccggcagcaguccuacagcaucaugugcaucaucaaggaggaggugcuggcguacgugguccagcugccccucuacggcgugaucgacacccccugcuggaagcugcacacgagcccccugugcaccaccaacaccaaggagggguccaacaucugccucacgcgcaccgaccggggcugguacugcgacaacgccggcagcgucuccuucuucccgcaggccgagaccugcaaggugcagagcaaccgcguguucugcgacaccaugaacucccugacgcugcccagcgagguaaaccucugcaacgucgacaucuucaaccccaaguacgacugcaagaucaugaccuccaagaccgacgugagcuccagcgugaucaccucccugggggccaucgucagcugcuacggcaagacgaagugcaccgccagcaacaagaaccgggggaucaucaagaccuucuccaacggcugcgacuacgugagcaacaagggcguggacaccguguccgucgggaacacccuguacugcgugaacaagcaggagggccagagccucuacgugaagggggagcccaucaucaacuucuacgacccgcuggucuuccccuccgacgaguucgacgcgagcaucucccaggugaacgagaagaucaaccagagccuggccuucauccgcaaguccgacgagcugcuccacaacgugaacgccggcaagagcacgaccaacaucaugaucaccaccaucaucaucgucaucaucgugauccugcugucccucaucgccguggggcugcugcucuacugcaaggcccggagcacgcccgucacccuguccaaggaccagcugagcggcaucaacaacaucgcguucuccaacugaggacuaguguccaccugucccuccugggcugcuggauugucucguuuuccugccaaauaaacaggaucagcgcuuuacagaucuaaaaaaaaaaaaaaaaaaaaaaaaaaaaaaaaaaaaaaaaaaaaaaaaaaaaaaaaaaaaaaaaugcaucccccccccccccccccccccccccccccccaaaggcucuuuucagagccaccagaauu

SEQ ID NO: 2544 - RNA, 1937 nt, Artificial Sequence
  mRNA product Design e-1 comprising derived and/or modified sequence from HRSV(A2)__F_DSCav1_mut2 (opt1)
gggagaauauaagcguuggcggagcgucgguuguagcacucugcgcgcccgcucuucugcugcuguuugucuacuuccuccugcuuccccgccgccgccgccgccaucaagcuuaccauggagcugcucauccugaaggccaacgccaucaccaccauccugacggcggugaccuucugcuucgccagcggccagaacaucaccgaggaguucuaccaguccacgugcagcgccgucuccaagggguaccucggcgcccugcgcaccgggugguacaccagcgugaucaccaucgagcuguccaacaucaaggagaacaagugcaacggcaccgacgccaaggugaagcucaucaagcaggagcuggacaaguacaagaacgcggucacggaccugcagcuccugaugcagagcacccccgccaccggguccggcagcgccaucugcuccggcguggccgugugcaagguccugcaccucgagggggaggugaacaagaucaagagcgcgcugcuguccaccaacaaggccguggucagccucuccaacggcgugagcgugcugacguucaagguccuggaccucaagaacuacaucgacaagcagcugcugccgauccucaacaagcaguccugcagcauccccaacaucgagaccgugaucgaguuccagcagaagaacaaccggcugcuggagaucacccgcgaguucuccgugaacgccggggucaccacgcccgugagcaccuacaugcucaccaacuccgagcugcugagccucaucaacgacaugcccaucaccaacgaccagaagaagcugaugagcaacaacgugcagaucguccggcagcaguccuacagcaucaugugcaucaucaaggaggaggugcuggccuacgugguccagcucccgcuguacggcgugaucgacacgcccugcuggaagcugcacaccagcccccucugcaccaccaacacgaaggagggguccaacaucugccugacccgcaccgaccggggcugguacugcgacaacgccggcuccgugagcuucuucccccaggcggagaccugcaagguccaguccaaccgcguguucugcgacacgaugaacagccugacccucccguccgaggucaaccugugcaacguggacaucuucaaccccaaguacgacugcaagaucaugaccagcaagaccgacguguccagcuccgucaucacgagccugggggccaucguguccugcuacggcaagaccaagugcaccgccagcaacaagaaccgggggaucaucaagaccuucuccaacggcugcgacuacgugagcaacaagggcgucgacacgguguccguggggaacacccucuacugcgucaacaagcaggagggccagagccuguacgugaagggggagcccaucaucaacuucuacgacccccugguguucccgagcgacgaguucgacgccuccaucagccaggucaacgagaagaucaaccagucccucgccuucauccgcaagagcgacgagcugcugcacaacgugaacgcgggcaaguccaccaccaacaucaugaucaccacgaucaucaucgugaucaucgucauccuccugagccugaucgccguggggcuccugcuguacugcaaggcccgguccacccccgugacccugagcaaggaccagcucuccggcaucaacaacaucgccuucagcaacugaggacuaguguccaccugucccuccugggcugcuggauugucucguuuuccugccaaauaaacaggaucagcgcuuuacagaucuaaaaaaaaaaaaaaaaaaaaaaaaaaaaaaaaaaaaaaaaaaaaaaaaaaaaaaaaaaaaaaaaugcaucccccccccccccccccccccccccccccccaaaggcucuuuucagagccaccagaauu

SEQ ID NO: 2545 - RNA, 1937 nt, Artificial Sequence
  mRNA product Design e-1 comprising derived and/or modified sequence from HRSV(A2)__F_DSCav1_mut2 (opt2)
gggagaauauaagcguuggcggagcgucgguuguagcacucugcgcgcccgcucuucugcugcuguuugucuacuuccuccugcuuccccgccgccgccgccgccaucaagcuuaccauggagcuccucauccucaaggccaacgccaucaccaccauccucaccgccgucaccuucugcuucgccuccggccagaacaucaccgaggaguucuaccaguccaccugcuccgccgucuccaagggcuaccucggcgcccuccgcaccggcugguacaccuccgucaucaccaucgagcucuccaacaucaaggagaacaagugcaacggcaccgacgccaaggucaagcucaucaagcaggagcucgacaaguacaagaacgccgucaccgaccuccagcuccucaugcaguccacccccgccaccggcuccggcuccgccaucugcuccggcgucgccgucugcaagguccuccaccucgagggcgaggucaacaagaucaaguccgcccuccucuccaccaacaaggccgucgucucccucuccaacggcgucuccguccucaccuucaagguccucgaccucaagaacuacaucgacaagcagcuccuccccauccucaacaagcaguccugcuccauccccaacaucgagaccgucaucgaguuccagcagaagaacaaccgccuccucgagaucacccgcgaguucuccgucaacgccggcgucaccacccccgucuccaccuacaugcucaccaacuccgagcuccucucccucaucaacgacaugcccaucaccaacgaccagaagaagcucauguccaacaacguccagaucguccgccagcaguccuacuccaucaugugcaucaucaaggaggagguccucgccuacgucguccagcucccccucuacggcgucaucgacacccccugcuggaagcuccacaccuccccccucugcaccaccaacaccaaggagggcuccaacaucugccucacccgcaccgaccgcggcugguacugcgacaacgccggcuccgucuccuucuucccccaggccgagaccugcaagguccaguccaaccgcgucuucugcgacaccaugaacucccucacccuccccuccgaggucaaccucugcaacgucgacaucuucaaccccaaguacgacugcaagaucaugaccuccaagaccgacgucuccuccuccgucaucaccucccucggcgccaucgucuccugcuacggcaagaccaagugcaccgccuccaacaagaaccgcggcaucaucaagaccuucuccaacggcugcgacuacgucuccaacaagggcgucgacaccgucuccgucggcaacacccucuacugcgucaacaagcaggagggccagucccucuacgucaagggcgagcccaucaucaacuucuacgacccccucgucuuccccuccgacgaguucgacgccuccaucucccaggucaacgagaagaucaaccagucccucgccuucauccgcaaguccgacgagcuccuccacaacgucaacgccggcaaguccaccaccaacaucaugaucaccaccaucaucaucgucaucaucgucauccuccucucccucaucgccgucggccuccuccucuacugcaaggcccgcuccacccccgucacccucuccaaggaccagcucuccggcaucaacaacaucgccuucuccaacugaggacuaguguccaccugucccuccugggcugcuggauugucucguuuuccugccaaauaaacaggaucagcgcuuuacagaucuaaaaaaaaaaaaaaaaaaaaaaaaaaaaaaaaaaaaaaaaaaaaaaaaaaaaaaaaaaaaaaaaugcaucccccccccccccccccccccccccccccccaaaggcucuuuucagagccaccagaauu

SEQ ID NO: 2546 - RNA, 1937 nt, Artificial Sequence
  mRNA product Design e-1 comprising derived and/or modified sequence from HRSV(A2)__F_DSCav1_mut2 (opt3)
gggagaauauaagcguuggcggagcgucgguuguagcacucugcgcgcccgcucuucugcugcuguuugucuacuuccuccugcuuccccgccgccgccgccgccaucaagcuuaccauggagcugcucauccuuaaggccaacgcuauuaccacaauacugacugcagugacguucugcuuugccagcggccagaauaucaccgaagaguucuaccaauccacauguucugcggucucaaaaggguauuugggagcuuuaagaacugguugguacaccaguguuauuacaaucgaacugagcaacauuaaggagaauaaaugcaacggcaccgacgccaaggugaaacuaaucaagcaggaacucgauaaguauaaaaaugcaguaacugaccugcagcuucugaugcaguccacacccgccaccgggucuggaucggcuauauguucaggcguggcagucugcaagguguugcaccucgagggugagguuaacaaaaucaagagcgcccugcugaguacgaauaaagcuguggucucccucucuaacggggugagcguauuaacuuuuaagguucuggaucuuaagaauuacauugacaaacaauugcugccuauccuaaacaagcaguccuguucaauuccaaauaucgaaaccgugauagaguuccagcagaaaaacaauaggcuccuggaaauuacacgggaguuuagugucaacgccggagugacuaccccggugagcacauauaugcuuaccaauucugagcuguugucccucaucaacgauaugcccauuacgaacgaccaaaagaaacugaugucaaauaacguccagaucguucgccagcagagcuacaguaucaugugcauuauaaaggaagagguguuagcguauguagugcaacugccucucuacggcgucaucgauacuccauguuggaaacuucauacaucuccccugugcaccacuaauacaaaggaaggcuccaacauuuguuugacccgaacggaccgugggugguacugcgauaaugcaggaagcgugucguucuuuccucaggccgagaccuguaagguucagucuaacagaguguucugcgacacaaugaacucccuaacucugccaucagaagucaaucucugcaauguggauaucuuuaaccccaaauaugacuguaagauaaugaccaguaaaacagauguaagcuccucuguuauuacuagccugggugcuaucgugucaugcuacggcaagaccaaauguacagccaguaauaagaacagggggaucauuaagaccuucuccaauggaugcgacuaugucagcaacaaaggcguggacacugucucuguggguaauacgcuuuacuguguuaacaagcaagaggggcagucacuguaugugaaaggagagccuaucauuaacuuuuacgauccauugguauucccgagugacgaauuugaugcaagcauaucccaggucaaugagaagaucaaccagucucucgcuuucauucggaaaucggacgaacuguuacacaaugugaacgccggcaagagcacaaccaauaucaugaucacuaccauuauaaucguuauuaucgugauucugcuaucccucaucgcggucggccugcuuuuguauugcaaggcccgcucaacacccgugacccugaguaaagaucaacucucugggauaaacaauaucgcauucagcaacugaggacuaguguccaccugucccuccugggcugcuggauugucucguuuuccugccaaauaaacaggaucagcgcuuuacagaucuaaaaaaaaaaaaaaaaaaaaaaaaaaaaaaaaaaaaaaaaaaaaaaaaaaaaaaaaaaaaaaaaugcaucccccccccccccccccccccccccccccccaaaggcucuuuucagagccaccagaauu

SEQ ID NO: 2547 - RNA, 1937 nt, Artificial Sequence
  mRNA product Design e-1 comprising derived and/or modified sequence from HRSV(A2)__F_DSCav1_mut2 (opt4)
gggagaauauaagcguuggcggagcgucgguuguagcacucugcgcgcccgcucuucugcugcuguuugucuacuuccuccugcuuccccgccgccgccgccgccaucaagcuuaccauggagcugcugauccugaaggccaacgccaucaccaccauccugaccgccgugaccuucugcuucgccagcggccagaacaucaccgaggaguucuaccagagcaccugcagcgccgugagcaagggcuaccugggcgcccugagaaccggcugguacaccagcgugaucaccaucgagcugagcaacaucaaggagaacaagugcaacggcaccgacgccaaggugaagcugaucaagcaggagcuggacaaguacaagaacgccgugaccgaccugcagcugcugaugcagagcacccccgccaccggcagcggcagcgccaucugcagcggcguggccgugugcaaggugcugcaccuggagggcgaggugaacaagaucaagagcgcccugcugagcaccaacaaggccguggugagccugagcaacggcgugagcgugcugaccuucaaggugcuggaccugaagaacuacaucgacaagcagcugcugcccauccugaacaagcagagcugcagcauccccaacaucgagaccgugaucgaguuccagcagaagaacaacagacugcuggagaucaccagagaguucagcgugaacgccggcgugaccacccccgugagcaccuacaugcugaccaacagcgagcugcugagccugaucaacgacaugcccaucaccaacgaccagaagaagcugaugagcaacaacgugcagaucgugagacagcagagcuacagcaucaugugcaucaucaaggaggaggugcuggccuacguggugcagcugccccuguacggcgugaucgacacccccugcuggaagcugcacaccagcccccugugcaccaccaacaccaaggagggcagcaacaucugccugaccagaaccgacagaggcugguacugcgacaacgccggcagcgugagcuucuucccccaggccgagaccugcaaggugcagagcaacagaguguucugcgacaccaugaacagccugacccugcccagcgaggugaaccugugcaacguggacaucuucaaccccaaguacgacugcaagaucaugaccagcaagaccgacgugagcagcagcgugaucaccagccugggcgccaucgugagcugcuacggcaagaccaagugcaccgccagcaacaagaacagaggcaucaucaagaccuucagcaacggcugcgacuacgugagcaacaagggcguggacaccgugagcgugggcaacacccuguacugcgugaacaagcaggagggccagagccuguacgugaagggcgagcccaucaucaacuucuacgacccccugguguuccccagcgacgaguucgacgccagcaucagccaggugaacgagaagaucaaccagagccuggccuucaucagaaagagcgacgagcugcugcacaacgugaacgccggcaagagcaccaccaacaucaugaucaccaccaucaucaucgugaucaucgugauccugcugagccugaucgccgugggccugcugcuguacugcaaggccagaagcacccccgugacccugagcaaggaccagcugagcggcaucaacaacaucgccuucagcaacugaggacuaguguccaccugucccuccugggcugcuggauugucucguuuuccugccaaauaaacaggaucagcgcuuuacagaucuaaaaaaaaaaaaaaaaaaaaaaaaaaaaaaaaaaaaaaaaaaaaaaaaaaaaaaaaaaaaaaaaugcaucccccccccccccccccccccccccccccccaaaggcucuuuucagagccaccagaauu

SEQ ID NO: 2548 - RNA, 1937 nt, Artificial Sequence
  mRNA product Design e-1 comprising derived and/or modified sequence from HRSV(A2)__F_DSCav1_mut2 (opt5)
gggagaauauaagcguuggcggagcgucgguuguagcacucugcgcgcccgcucuucugcugcuguuugucuacuuccuccugcuuccccgccgccgccgccgccaucaagcuuaccauggagcugcucauccugaaggccaacgcuauuaccacaauccuuacggccgugaccuucugcuuugcgagcggccagaauauuacagaagaguucuaccaauccaccuguucugcugucagcaaaggguaucugggagcccucagaacaggcugguacaccuccguuaucacaauugaacugucuaacaucaaggagaauaaaugcaacgggaccgacgccaaggugaaacuuaucaagcaggaacuggauaaguauaaaaaugcugugacggaccuccagcugcugaugcagagcacccccgccacaggauccggcucugcuauuuguagcggggucgccgugugcaagguucuccaccuggagggagaggugaacaaaaucaaguccgcgcuucugagcaccaauaaagccgucgugucucucuccaacggcguuagcgugcugacauuuaagguccuugaucugaagaauuacauugacaaacaacuccugccuauccugaacaagcagucuuguuccauuccgaauaucgaaaccgugauugaguuccagcagaaaaacaaucggcuccuggaaaucacgcgcgaguuuagcgugaacgcuggcgucacaacccccguuucuacauauaugcuuaccaauuccgagcugcucagccugaucaacgauaugccuauuaccaacgaccaaaagaaacuuauguccaauaacgugcagaucgugagacagcagucuuacagcauuaugugcaucauuaaggaagagguccuggccuaugugguucaacucccccuguacggggugaucgauacaccuuguuggaaacugcauacgagcccccucugcaccacaaauaccaaggaaggauccaacaucugucugacacggaccgaccgcggcugguacugcgauaaugcugggucugucuccuucuuuccucaggccgagacguguaaggugcagagcaacagaguuuucugcgacacaaugaacucucuuacccugccgagcgaagugaaucucugcaaugucgauauuuuuaaccccaaauaugacuguaagaucaugaccuccaaaacagaugugucuagcuccgucauuaccagccugggagcgaucgugucuugcuacggcaagacaaaauguacggccuccaauaagaaccgggggauuaucaagaccuucagcaauggaugcgacuauguuucuaacaaaggcguggacacagucuccgugggcaauacccuuuacuguguuaacaagcaagaggggcagagccuguaugugaaaggagagccuaucauuaacuuuuacgauccccucgucuucccuuccgacgaauuugaugcuucuaucagccaggugaaugagaagauuaaccagucccuggccuucauccgcaaaucugacgaacugcuccacaaugugaacgcuggcaagagcacaaccaauauuaugaucacgaccauuaucaucguuauuaucgucauucugcuuucccugaucgccguggggcuccugcuguauugcaaggccagaagcacacccgugacccuuucuaaagaucaacucuccggaauuaacaauaucgcuuucagcaacugaggacuaguguccaccugucccuccugggcugcuggauugucucguuuuccugccaaauaaacaggaucagcgcuuuacagaucuaaaaaaaaaaaaaaaaaaaaaaaaaaaaaaaaaaaaaaaaaaaaaaaaaaaaaaaaaaaaaaaaugcaucccccccccccccccccccccccccccccccaaaggcucuuuucagagccaccagaauu

SEQ ID NO: 2549 - RNA, 1937 nt, Artificial Sequence
  mRNA product Design e-1 comprising derived and/or modified sequence from HRSV(A2)__F_DSCav1_mut2 (opt6)
gggagaauauaagcguuggcggagcgucgguuguagcacucugcgcgcccgcucuucugcugcuguuugucuacuuccuccugcuuccccgccgccgccgccgccaucaagcuuaccauggaacuacuaauccuaaaagcaaacgcaauuacaacuauacuuaccgccguaacauuuugcuucgcaucugggcaaaacauuaccgaagaauuuuaucaaucaacaugcucagcagucuccaaaggauaccuuggagcauuaagaaccggcugguauaccuccguaauaacaauugaacuaucuaauauaaaagaaaauaaauguaauggaacugacgcaaaaguuaaacuaauaaaacaagaacucgacaaauacaaaaacgccgucacagaccuacaacuacuaaugcaaucaacccccgcaacaggaucaggauccgcaaucugcagcggcgucgcaguuugcaaaguccuacauuuagaaggagaaguaaacaaaauaaaaucugcucuccucucuacaaacaaagcaguagugucacuuucaaacggaguaucaguucuaacauucaaaguacuagaccuaaaaaauuacauagacaaacaacuacuuccaauucuaaacaaacaauccuguuccauacccaacauagaaacaguaauagaauuucaacaaaaaaauaacagacuccuagaaauuacaagagaauuuuccgucaaugcaggaguaacaaccccaguaucaaccuacauguuaacuaacucagaacucuuaucacuaauaaacgacaugccaaucacuaaugaccaaaaaaaacucaugucaaauaacguacaaauaguccgacaacaaucauacuccaucaugugcauuauaaaagaagaaguacuagcauacgucguccaauuaccacuauacggcgucauagacacaccauguuggaaacuccacacaucaccacuaugcacuacaaauacaaaagaaggcuccaacaucugccuaacaagaacagacagagguugguauugcgacaacgcaggaucaguaucauuuuucccccaagcagaaacauguaaaguacaaucaaauagagucuucugcgacaccaugaacucauuaacacuaccuucagaagucaaccuaugcaacguagacaucuucaacccuaaauaugacugcaaaaucaugaccagcaaaaccgacguuucaucuuccguaauaacaucacuaggcgcaauagucucauguuacggcaaaacaaaauguacagcaucaaauaaaaaccguggaauaauaaaaacauuuucuaaugguugugacuacguaagcaauaaaggaguagauacaguaucagucggcaacaccuuauacuguguaaacaaacaagaaggccaaaguuuauacgucaaaggagaacccaucaucaacuucuacgacccauuaguauucccaucagacgaauuugaugcaagcauuucacaagucaacgaaaaaaucaaucaaucauuagcauucauccgaaaaucagacgaauuauuacacaacguaaacgccggaaaaucaaccacuaauauaaugauaaccacaauaaucaucguaauaauaguaauacuucucucacuaaucgcagucggacuccuucuauacugcaaagcaagaucuacaccaguaacacuauccaaagaucaacuaaguggcauaaacaacauagcauuuucuaacuaaggacuaguguccaccugucccuccugggcugcuggauugucucguuuuccugccaaauaaacaggaucagcgcuuuacagaucuaaaaaaaaaaaaaaaaaaaaaaaaaaaaaaaaaaaaaaaaaaaaaaaaaaaaaaaaaaaaaaaaugcaucccccccccccccccccccccccccccccccaaaggcucuuuucagagccaccagaauu

SEQ ID NO: 2550 - RNA, 1937 nt, Artificial Sequence
  mRNA product Design e-1 comprising derived and/or modified sequence from HRSV(A2)__F_DSCav1_mut2 (opt11)
gggagaauauaagcguuggcggagcgucgguuguagcacucugcgcgcccgcucuucugcugcuguuugucuacuuccuccugcuuccccgccgccgccgccgccaucaagcuuaccauggaacuccucauccuaaaagccaacgcgaucaccacaauccugacagccgucaccuucugcuucgccuccggccaaaacaucaccgaagaguucuaccaauccacaugcuccgccgucuccaagggcuaccugggcgcacuucguacaggcugguacaccuccguaauaaccaucgaacucuccaacaucaaagaaaacaaaugcaacggcacagacgcaaaagucaaacucaucaagcaagaacuugacaaauacaaaaaugcagucaccgaccuucaacuccucaugcaaucuacccccgccacaggcuccggcuccgcuaucugcuccggcgucgccgucugcaaaguccuccaccucgaaggugaaguaaacaaaauaaaauccgcccuccucuccaccaacaaagccgucgucucccuaucaaacggcgucuccgugcucaccuucaagguucucgaccugaaaaacuacauagacaaacagcuccuaccaauccuuaacaaacagagcugcuccauuccgaauaucgaaacgguaaucgaauuucaacagaaaaacaaccgccuccucgaaauaacgcgagaguucuccguaaacgcuggcgucaccacacccgucagcaccuacaugcuaacgaacuccgaacucuugucgcucaucaacgacaugcccauaaccaacgaccaaaagaaacuaauguccaauaacguacaaaucguacgccaacaaucuuacuccaucaugugcaucauaaaagaagaaguacuagcuuacgucguccaacucccacuguacggagucaucgacacccccugcuggaaacuccacaccucuccccucugcaccaccaacaccaaagagggcuccaacauuugccugacacgcaccgaccgcggcugguacugcgacaacgcaggcuccgucucguucuucccccaagccgaaaccugcaaaguccaauccaaccgcgucuucugcgacaccaugaacucccucacccuccccuccgaagucaaucuaugcaacguagacaucuucaacccgaaauaugacugcaaaauuaugacaucuaaaaccgacguguccuccucagucaucacuucccuaggagccaucguuuccuguuacggcaagaccaaaugcaccgccagcaacaaaaaccgaggcaucaucaaaaccuucuccaacggaugugacuaugucuccaacaagggcgucgacaccgucagcgucggcaacacccucuacugcgucaacaaacaagaaggccaaucccucuacgucaaaggagagcccauaaucaacuucuacgacccccucgucuucccauccgacgaguucgacgccucaaucucccaagucaacgagaaaaucaaccaauccuuagccuucauccguaaguccgacgaacuccuucacaacgucaacgccgguaaaucuaccaccaacaucaugauaacaacaauaauuaucgucaucaucgucauccuccuuucccucaucgcggucgggcuauugcucuacugcaaagcccgguccaccccaguaacccucucuaaagaccaacucagcggaaucaauaacauagccuucagcaauuaaggacuaguguccaccugucccuccugggcugcuggauugucucguuuuccugccaaauaaacaggaucagcgcuuuacagaucuaaaaaaaaaaaaaaaaaaaaaaaaaaaaaaaaaaaaaaaaaaaaaaaaaaaaaaaaaaaaaaaaugcaucccccccccccccccccccccccccccccccaaaggcucuuuucagagccaccagaauu

SEQ ID NO: 2551 - RNA, 1919 nt, Artificial Sequence
  mRNA product Design e-2 comprising derived and/or modified sequence from HRSV(A2)__F_DSCav1_mut2 (opt1)
gggagacccgugacccggaaguuguacggcuacgcgacuuucccucccacaaacccucgcgcccuuccuuuccuacuugggcccggcagaaagcuuaccauggagcugcucauccugaaggccaacgccaucaccaccauccugacggcggugaccuucugcuucgccagcggccagaacaucaccgaggaguucuaccaguccacgugcagcgccgucuccaagggguaccucggcgcccugcggaccggcugguacaccuccgugaucaccaucgagcugagcaacaucaaggagaacaagugcaacgggaccgacgccaaggugaagcucaucaagcaggagcuggacaaguacaagaacgcggucacggaccugcagcuccugaugcaguccaccccggcaaccggcuccggcuccgccaucugcagcggcgucgccgugugcaaggugcugcaccucgagggggaggucaacaagaucaagagcgcccugcuguccaccaacaaggccguggugagccucuccaacggcgucagcgugcugaccuucaaggugcuggaccucaagaacuacaucgacaagcagcugcugcccauccugaacaagcagagcugcuccauccccaacaucgagacggugaucgaguuccagcagaagaacaaccggcuccuggagaucacccgcgaguucagcgugaacgccggggucaccacccccguguccacguacaugcugaccaacagcgagcuccugucccugaucaacgacaugccgaucaccaacgaccagaagaagcucaugagcaacaacgugcagaucguccggcagcaguccuacagcaucaugugcaucaucaaggaggaggugcuggcguacgugguccagcugccccucuacggcgugaucgacacccccugcuggaagcugcacacgagcccccugugcaccaccaacaccaaggagggguccaacaucugccucacgcgcaccgaccggggcugguacugcgacaacgccggcagcgucuccuucuucccgcaggccgagaccugcaaggugcagagcaaccgcguguucugcgacaccaugaacucccugacgcugcccagcgagguaaaccucugcaacgucgacaucuucaaccccaaguacgacugcaagaucaugaccuccaagaccgacgugagcuccagcgugaucaccucccugggggccaucgucagcugcuacggcaagacgaagugcaccgccagcaacaagaaccgggggaucaucaagaccuucuccaacggcugcgacuacgugagcaacaagggcguggacaccguguccgucgggaacacccuguacugcgugaacaagcaggagggccagagccucuacgugaagggggagcccaucaucaacuucuacgacccgcuggucuuccccuccgacgaguucgacgcgagcaucucccaggugaacgagaagaucaaccagagccuggccuucauccgcaaguccgacgagcugcuccacaacgugaacgccggcaagagcacgaccaacaucaugaucaccaccaucaucaucgucaucaucgugauccugcugucccucaucgccguggggcugcugcucuacugcaaggcccggagcacgcccgucacccuguccaaggaccagcugagcggcaucaacaacaucgcguucuccaacugaggacuaguguccaccugucccuccugggcugcuggauugucucguuuuccugccaaauaaacaggaucagcgcuuuacagaucuaaaaaaaaaaaaaaaaaaaaaaaaaaaaaaaaaaaaaaaaaaaaaaaaaaaaaaaaaaaaaaaaugcaucccccccccccccccccccccccccccccccaaaggcucuuuucagagccaccagaauu

SEQ ID NO: 2552 - RNA, 1919 nt, Artificial Sequence
  mRNA product Design e-2 comprising derived and/or modified sequence from HRSV(A2)__F_DSCav1_mut2 (opt1)
gggagacccgugacccggaaguuguacggcuacgcgacuuucccucccacaaacccucgcgcccuuccuuuccuacuugggcccggcagaaagcuuaccauggagcugcucauccugaaggccaacgccaucaccaccauccugacggcggugaccuucugcuucgccagcggccagaacaucaccgaggaguucuaccaguccacgugcagcgccgucuccaagggguaccucggcgcccugcgcaccgggugguacaccagcgugaucaccaucgagcuguccaacaucaaggagaacaagugcaacggcaccgacgccaaggugaagcucaucaagcaggagcuggacaaguacaagaacgcggucacggaccugcagcuccugaugcagagcacccccgccaccggguccggcagcgccaucugcuccggcguggccgugugcaagguccugcaccucgagggggaggugaacaagaucaagagcgcgcugcuguccaccaacaaggccguggucagccucuccaacggcgugagcgugcugacguucaagguccuggaccucaagaacuacaucgacaagcagcugcugccgauccucaacaagcaguccugcagcauccccaacaucgagaccgugaucgaguuccagcagaagaacaaccggcugcuggagaucacccgcgaguucuccgugaacgccggggucaccacgcccgugagcaccuacaugcucaccaacuccgagcugcugagccucaucaacgacaugcccaucaccaacgaccagaagaagcugaugagcaacaacgugcagaucguccggcagcaguccuacagcaucaugugcaucaucaaggaggaggugcuggccuacgugguccagcucccgcuguacggcgugaucgacacgcccugcuggaagcugcacaccagcccccucugcaccaccaacacgaaggagggguccaacaucugccugacccgcaccgaccggggcugguacugcgacaacgccggcuccgugagcuucuucccccaggcggagaccugcaagguccaguccaaccgcguguucugcgacacgaugaacagccugacccucccguccgaggucaaccugugcaacguggacaucuucaaccccaaguacgacugcaagaucaugaccagcaagaccgacguguccagcuccgucaucacgagccugggggccaucguguccugcuacggcaagaccaagugcaccgccagcaacaagaaccgggggaucaucaagaccuucuccaacggcugcgacuacgugagcaacaagggcgucgacacgguguccguggggaacacccucuacugcgucaacaagcaggagggccagagccuguacgugaagggggagcccaucaucaacuucuacgacccccugguguucccgagcgacgaguucgacgccuccaucagccaggucaacgagaagaucaaccagucccucgccuucauccgcaagagcgacgagcugcugcacaacgugaacgcgggcaaguccaccaccaacaucaugaucaccacgaucaucaucgugaucaucgucauccuccugagccugaucgccguggggcuccugcuguacugcaaggcccgguccacccccgugacccugagcaaggaccagcucuccggcaucaacaacaucgccuucagcaacugaggacuaguguccaccugucccuccugggcugcuggauugucucguuuuccugccaaauaaacaggaucagcgcuuuacagaucuaaaaaaaaaaaaaaaaaaaaaaaaaaaaaaaaaaaaaaaaaaaaaaaaaaaaaaaaaaaaaaaaugcaucccccccccccccccccccccccccccccccaaaggcucuuuucagagccaccagaauu

SEQ ID NO: 2553 - RNA, 1919 nt, Artificial Sequence
  mRNA product Design e-2 comprising derived and/or modified sequence from HRSV(A2)__F_DSCav1_mut2 (opt2)
gggagacccgugacccggaaguuguacggcuacgcgacuuucccucccacaaacccucgcgcccuuccuuuccuacuugggcccggcagaaagcuuaccauggagcuccucauccucaaggccaacgccaucaccaccauccucaccgccgucaccuucugcuucgccuccggccagaacaucaccgaggaguucuaccaguccaccugcuccgccgucuccaagggcuaccucggcgcccuccgcaccggcugguacaccuccgucaucaccaucgagcucuccaacaucaaggagaacaagugcaacggcaccgacgccaaggucaagcucaucaagcaggagcucgacaaguacaagaacgccgucaccgaccuccagcuccucaugcaguccacccccgccaccggcuccggcuccgccaucugcuccggcgucgccgucugcaagguccuccaccucgagggcgaggucaacaagaucaaguccgcccuccucuccaccaacaaggccgucgucucccucuccaacggcgucuccguccucaccuucaagguccucgaccucaagaacuacaucgacaagcagcuccuccccauccucaacaagcaguccugcuccauccccaacaucgagaccgucaucgaguuccagcagaagaacaaccgccuccucgagaucacccgcgaguucuccgucaacgccggcgucaccacccccgucuccaccuacaugcucaccaacuccgagcuccucucccucaucaacgacaugcccaucaccaacgaccagaagaagcucauguccaacaacguccagaucguccgccagcaguccuacuccaucaugugcaucaucaaggaggagguccucgccuacgucguccagcucccccucuacggcgucaucgacacccccugcuggaagcuccacaccuccccccucugcaccaccaacaccaaggagggcuccaacaucugccucacccgcaccgaccgcggcugguacugcgacaacgccggcuccgucuccuucuucccccaggccgagaccugcaagguccaguccaaccgcgucuucugcgacaccaugaacucccucacccuccccuccgaggucaaccucugcaacgucgacaucuucaaccccaaguacgacugcaagaucaugaccuccaagaccgacgucuccuccuccgucaucaccucccucggcgccaucgucuccugcuacggcaagaccaagugcaccgccuccaacaagaaccgcggcaucaucaagaccuucuccaacggcugcgacuacgucuccaacaagggcgucgacaccgucuccgucggcaacacccucuacugcgucaacaagcaggagggccagucccucuacgucaagggcgagcccaucaucaacuucuacgacccccucgucuuccccuccgacgaguucgacgccuccaucucccaggucaacgagaagaucaaccagucccucgccuucauccgcaaguccgacgagcuccuccacaacgucaacgccggcaaguccaccaccaacaucaugaucaccaccaucaucaucgucaucaucgucauccuccucucccucaucgccgucggccuccuccucuacugcaaggcccgcuccacccccgucacccucuccaaggaccagcucuccggcaucaacaacaucgccuucuccaacugaggacuaguguccaccugucccuccugggcugcuggauugucucguuuuccugccaaauaaacaggaucagcgcuuuacagaucuaaaaaaaaaaaaaaaaaaaaaaaaaaaaaaaaaaaaaaaaaaaaaaaaaaaaaaaaaaaaaaaaugcaucccccccccccccccccccccccccccccccaaaggcucuuuucagagccaccagaauu

SEQ ID NO: 2554 - RNA, 1919 nt, Artificial Sequence
  mRNA product Design e-2 comprising derived and/or modified sequence from HRSV(A2)__F_DSCav1_mut2 (opt3)
gggagacccgugacccggaaguuguacggcuacgcgacuuucccucccacaaacccucgcgcccuuccuuuccuacuugggcccggcagaaagcuuaccauggagcugcucauccuuaaggccaacgcuauuaccacaauacugacugcagugacguucugcuuugccagcggccagaauaucaccgaagaguucuaccaauccacauguucugcggucucaaaaggguauuugggagcuuuaagaacugguugguacaccaguguuauuacaaucgaacugagcaacauuaaggagaauaaaugcaacggcaccgacgccaaggugaaacuaaucaagcaggaacucgauaaguauaaaaaugcaguaacugaccugcagcuucugaugcaguccacacccgccaccgggucuggaucggcuauauguucaggcguggcagucugcaagguguugcaccucgagggugagguuaacaaaaucaagagcgcccugcugaguacgaauaaagcuguggucucccucucuaacggggugagcguauuaacuuuuaagguucuggaucuuaagaauuacauugacaaacaauugcugccuauccuaaacaagcaguccuguucaauuccaaauaucgaaaccgugauagaguuccagcagaaaaacaauaggcuccuggaaauuacacgggaguuuagugucaacgccggagugacuaccccggugagcacauauaugcuuaccaauucugagcuguugucccucaucaacgauaugcccauuacgaacgaccaaaagaaacugaugucaaauaacguccagaucguucgccagcagagcuacaguaucaugugcauuauaaaggaagagguguuagcguauguagugcaacugccucucuacggcgucaucgauacuccauguuggaaacuucauacaucuccccugugcaccacuaauacaaaggaaggcuccaacauuuguuugacccgaacggaccgugggugguacugcgauaaugcaggaagcgugucguucuuuccucaggccgagaccuguaagguucagucuaacagaguguucugcgacacaaugaacucccuaacucugccaucagaagucaaucucugcaauguggauaucuuuaaccccaaauaugacuguaagauaaugaccaguaaaacagauguaagcuccucuguuauuacuagccugggugcuaucgugucaugcuacggcaagaccaaauguacagccaguaauaagaacagggggaucauuaagaccuucuccaauggaugcgacuaugucagcaacaaaggcguggacacugucucuguggguaauacgcuuuacuguguuaacaagcaagaggggcagucacuguaugugaaaggagagccuaucauuaacuuuuacgauccauugguauucccgagugacgaauuugaugcaagcauaucccaggucaaugagaagaucaaccagucucucgcuuucauucggaaaucggacgaacuguuacacaaugugaacgccggcaagagcacaaccaauaucaugaucacuaccauuauaaucguuauuaucgugauucugcuaucccucaucgcggucggccugcuuuuguauugcaaggcccgcucaacacccgugacccugaguaaagaucaacucucugggauaaacaauaucgcauucagcaacugaggacuaguguccaccugucccuccugggcugcuggauugucucguuuuccugccaaauaaacaggaucagcgcuuuacagaucuaaaaaaaaaaaaaaaaaaaaaaaaaaaaaaaaaaaaaaaaaaaaaaaaaaaaaaaaaaaaaaaaugcaucccccccccccccccccccccccccccccccaaaggcucuuuucagagccaccagaauu

SEQ ID NO: 2555 - RNA, 1919 nt, Artificial Sequence
  mRNA product Design e-2 comprising derived and/or modified sequence from HRSV(A2)__F_DSCav1_mut2 (opt4)
gggagacccgugacccggaaguuguacggcuacgcgacuuucccucccacaaacccucgcgcccuuccuuuccuacuugggcccggcagaaagcuuaccauggagcugcugauccugaaggccaacgccaucaccaccauccugaccgccgugaccuucugcuucgccagcggccagaacaucaccgaggaguucuaccagagcaccugcagcgccgugagcaagggcuaccugggcgcccugagaaccggcugguacaccagcgugaucaccaucgagcugagcaacaucaaggagaacaagugcaacggcaccgacgccaaggugaagcugaucaagcaggagcuggacaaguacaagaacgccgugaccgaccugcagcugcugaugcagagcacccccgccaccggcagcggcagcgccaucugcagcggcguggccgugugcaaggugcugcaccuggagggcgaggugaacaagaucaagagcgcccugcugagcaccaacaaggccguggugagccugagcaacggcgugagcgugcugaccuucaaggugcuggaccugaagaacuacaucgacaagcagcugcugcccauccugaacaagcagagcugcagcauccccaacaucgagaccgugaucgaguuccagcagaagaacaacagacugcuggagaucaccagagaguucagcgugaacgccggcgugaccacccccgugagcaccuacaugcugaccaacagcgagcugcugagccugaucaacgacaugcccaucaccaacgaccagaagaagcugaugagcaacaacgugcagaucgugagacagcagagcuacagcaucaugugcaucaucaaggaggaggugcuggccuacguggugcagcugccccuguacggcgugaucgacacccccugcuggaagcugcacaccagcccccugugcaccaccaacaccaaggagggcagcaacaucugccugaccagaaccgacagaggcugguacugcgacaacgccggcagcgugagcuucuucccccaggccgagaccugcaaggugcagagcaacagaguguucugcgacaccaugaacagccugacccugcccagcgaggugaaccugugcaacguggacaucuucaaccccaaguacgacugcaagaucaugaccagcaagaccgacgugagcagcagcgugaucaccagccugggcgccaucgugagcugcuacggcaagaccaagugcaccgccagcaacaagaacagaggcaucaucaagaccuucagcaacggcugcgacuacgugagcaacaagggcguggacaccgugagcgugggcaacacccuguacugcgugaacaagcaggagggccagagccuguacgugaagggcgagcccaucaucaacuucuacgacccccugguguuccccagcgacgaguucgacgccagcaucagccaggugaacgagaagaucaaccagagccuggccuucaucagaaagagcgacgagcugcugcacaacgugaacgccggcaagagcaccaccaacaucaugaucaccaccaucaucaucgugaucaucgugauccugcugagccugaucgccgugggccugcugcuguacugcaaggccagaagcacccccgugacccugagcaaggaccagcugagcggcaucaacaacaucgccuucagcaacugaggacuaguguccaccugucccuccugggcugcuggauugucucguuuuccugccaaauaaacaggaucagcgcuuuacagaucuaaaaaaaaaaaaaaaaaaaaaaaaaaaaaaaaaaaaaaaaaaaaaaaaaaaaaaaaaaaaaaaaugcaucccccccccccccccccccccccccccccccaaaggcucuuuucagagccaccagaauu

SEQ ID NO: 2556 - RNA, 1919 nt, Artificial Sequence
  mRNA product Design e-2 comprising derived and/or modified sequence from HRSV(A2)__F_DSCav1_mut2 (opt5)
gggagacccgugacccggaaguuguacggcuacgcgacuuucccucccacaaacccucgcgcccuuccuuuccuacuugggcccggcagaaagcuuaccauggagcugcucauccugaaggccaacgcuauuaccacaauccuuacggccgugaccuucugcuuugcgagcggccagaauauuacagaagaguucuaccaauccaccuguucugcugucagcaaaggguaucugggagcccucagaacaggcugguacaccuccguuaucacaauugaacugucuaacaucaaggagaauaaaugcaacgggaccgacgccaaggugaaacuuaucaagcaggaacuggauaaguauaaaaaugcugugacggaccuccagcugcugaugcagagcacccccgccacaggauccggcucugcuauuuguagcggggucgccgugugcaagguucuccaccuggagggagaggugaacaaaaucaaguccgcgcuucugagcaccaauaaagccgucgugucucucuccaacggcguuagcgugcugacauuuaagguccuugaucugaagaauuacauugacaaacaacuccugccuauccugaacaagcagucuuguuccauuccgaauaucgaaaccgugauugaguuccagcagaaaaacaaucggcuccuggaaaucacgcgcgaguuuagcgugaacgcuggcgucacaacccccguuucuacauauaugcuuaccaauuccgagcugcucagccugaucaacgauaugccuauuaccaacgaccaaaagaaacuuauguccaauaacgugcagaucgugagacagcagucuuacagcauuaugugcaucauuaaggaagagguccuggccuaugugguucaacucccccuguacggggugaucgauacaccuuguuggaaacugcauacgagcccccucugcaccacaaauaccaaggaaggauccaacaucugucugacacggaccgaccgcggcugguacugcgauaaugcugggucugucuccuucuuuccucaggccgagacguguaaggugcagagcaacagaguuuucugcgacacaaugaacucucuuacccugccgagcgaagugaaucucugcaaugucgauauuuuuaaccccaaauaugacuguaagaucaugaccuccaaaacagaugugucuagcuccgucauuaccagccugggagcgaucgugucuugcuacggcaagacaaaauguacggccuccaauaagaaccgggggauuaucaagaccuucagcaauggaugcgacuauguuucuaacaaaggcguggacacagucuccgugggcaauacccuuuacuguguuaacaagcaagaggggcagagccuguaugugaaaggagagccuaucauuaacuuuuacgauccccucgucuucccuuccgacgaauuugaugcuucuaucagccaggugaaugagaagauuaaccagucccuggccuucauccgcaaaucugacgaacugcuccacaaugugaacgcuggcaagagcacaaccaauauuaugaucacgaccauuaucaucguuauuaucgucauucugcuuucccugaucgccguggggcuccugcuguauugcaaggccagaagcacacccgugacccuuucuaaagaucaacucuccggaauuaacaauaucgcuuucagcaacugaggacuaguguccaccugucccuccugggcugcuggauugucucguuuuccugccaaauaaacaggaucagcgcuuuacagaucuaaaaaaaaaaaaaaaaaaaaaaaaaaaaaaaaaaaaaaaaaaaaaaaaaaaaaaaaaaaaaaaaugcaucccccccccccccccccccccccccccccccaaaggcucuuuucagagccaccagaauu

SEQ ID NO: 2557 - RNA, 1919 nt, Artificial Sequence
  mRNA product Design e-2 comprising derived and/or modified sequence from HRSV(A2)__F_DSCav1_mut2 (opt6)
gggagacccgugacccggaaguuguacggcuacgcgacuuucccucccacaaacccucgcgcccuuccuuuccuacuugggcccggcagaaagcuuaccauggaacuacuaauccuaaaagcaaacgcaauuacaacuauacuuaccgccguaacauuuugcuucgcaucugggcaaaacauuaccgaagaauuuuaucaaucaacaugcucagcagucuccaaaggauaccuuggagcauuaagaaccggcugguauaccuccguaauaacaauugaacuaucuaauauaaaagaaaauaaauguaauggaacugacgcaaaaguuaaacuaauaaaacaagaacucgacaaauacaaaaacgccgucacagaccuacaacuacuaaugcaaucaacccccgcaacaggaucaggauccgcaaucugcagcggcgucgcaguuugcaaaguccuacauuuagaaggagaaguaaacaaaauaaaaucugcucuccucucuacaaacaaagcaguagugucacuuucaaacggaguaucaguucuaacauucaaaguacuagaccuaaaaaauuacauagacaaacaacuacuuccaauucuaaacaaacaauccuguuccauacccaacauagaaacaguaauagaauuucaacaaaaaaauaacagacuccuagaaauuacaagagaauuuuccgucaaugcaggaguaacaaccccaguaucaaccuacauguuaacuaacucagaacucuuaucacuaauaaacgacaugccaaucacuaaugaccaaaaaaaacucaugucaaauaacguacaaauaguccgacaacaaucauacuccaucaugugcauuauaaaagaagaaguacuagcauacgucguccaauuaccacuauacggcgucauagacacaccauguuggaaacuccacacaucaccacuaugcacuacaaauacaaaagaaggcuccaacaucugccuaacaagaacagacagagguugguauugcgacaacgcaggaucaguaucauuuuucccccaagcagaaacauguaaaguacaaucaaauagagucuucugcgacaccaugaacucauuaacacuaccuucagaagucaaccuaugcaacguagacaucuucaacccuaaauaugacugcaaaaucaugaccagcaaaaccgacguuucaucuuccguaauaacaucacuaggcgcaauagucucauguuacggcaaaacaaaauguacagcaucaaauaaaaaccguggaauaauaaaaacauuuucuaaugguugugacuacguaagcaauaaaggaguagauacaguaucagucggcaacaccuuauacuguguaaacaaacaagaaggccaaaguuuauacgucaaaggagaacccaucaucaacuucuacgacccauuaguauucccaucagacgaauuugaugcaagcauuucacaagucaacgaaaaaaucaaucaaucauuagcauucauccgaaaaucagacgaauuauuacacaacguaaacgccggaaaaucaaccacuaauauaaugauaaccacaauaaucaucguaauaauaguaauacuucucucacuaaucgcagucggacuccuucuauacugcaaagcaagaucuacaccaguaacacuauccaaagaucaacuaaguggcauaaacaacauagcauuuucuaacuaaggacuaguguccaccugucccuccugggcugcuggauugucucguuuuccugccaaauaaacaggaucagcgcuuuacagaucuaaaaaaaaaaaaaaaaaaaaaaaaaaaaaaaaaaaaaaaaaaaaaaaaaaaaaaaaaaaaaaaaugcaucccccccccccccccccccccccccccccccaaaggcucuuuucagagccaccagaauu

SEQ ID NO: 2558 - RNA, 1919 nt, Artificial Sequence
  mRNA product Design e-2 comprising derived and/or modified sequence from HRSV(A2)__F_DSCav1_mut2 (opt11)
gggagacccgugacccggaaguuguacggcuacgcgacuuucccucccacaaacccucgcgcccuuccuuuccuacuugggcccggcagaaagcuuaccauggaacuccucauccuaaaagccaacgcgaucaccacaauccugacagccgucaccuucugcuucgccuccggccaaaacaucaccgaagaguucuaccaauccacaugcuccgccgucuccaagggcuaccugggcgcacuucguacaggcugguacaccuccguaauaaccaucgaacucuccaacaucaaagaaaacaaaugcaacggcacagacgcaaaagucaaacucaucaagcaagaacuugacaaauacaaaaaugcagucaccgaccuucaacuccucaugcaaucuacccccgccacaggcuccggcuccgcuaucugcuccggcgucgccgucugcaaaguccuccaccucgaaggugaaguaaacaaaauaaaauccgcccuccucuccaccaacaaagccgucgucucccuaucaaacggcgucuccgugcucaccuucaagguucucgaccugaaaaacuacauagacaaacagcuccuaccaauccuuaacaaacagagcugcuccauuccgaauaucgaaacgguaaucgaauuucaacagaaaaacaaccgccuccucgaaauaacgcgagaguucuccguaaacgcuggcgucaccacacccgucagcaccuacaugcuaacgaacuccgaacucuugucgcucaucaacgacaugcccauaaccaacgaccaaaagaaacuaauguccaauaacguacaaaucguacgccaacaaucuuacuccaucaugugcaucauaaaagaagaaguacuagcuuacgucguccaacucccacuguacggagucaucgacacccccugcuggaaacuccacaccucuccccucugcaccaccaacaccaaagagggcuccaacauuugccugacacgcaccgaccgcggcugguacugcgacaacgcaggcuccgucucguucuucccccaagccgaaaccugcaaaguccaauccaaccgcgucuucugcgacaccaugaacucccucacccuccccuccgaagucaaucuaugcaacguagacaucuucaacccgaaauaugacugcaaaauuaugacaucuaaaaccgacguguccuccucagucaucacuucccuaggagccaucguuuccuguuacggcaagaccaaaugcaccgccagcaacaaaaaccgaggcaucaucaaaaccuucuccaacggaugugacuaugucuccaacaagggcgucgacaccgucagcgucggcaacacccucuacugcgucaacaaacaagaaggccaaucccucuacgucaaaggagagcccauaaucaacuucuacgacccccucgucuucccauccgacgaguucgacgccucaaucucccaagucaacgagaaaaucaaccaauccuuagccuucauccguaaguccgacgaacuccuucacaacgucaacgccgguaaaucuaccaccaacaucaugauaacaacaauaauuaucgucaucaucgucauccuccuuucccucaucgcggucgggcuauugcucuacugcaaagcccgguccaccccaguaacccucucuaaagaccaacucagcggaaucaauaacauagccuucagcaauuaaggacuaguguccaccugucccuccugggcugcuggauugucucguuuuccugccaaauaaacaggaucagcgcuuuacagaucuaaaaaaaaaaaaaaaaaaaaaaaaaaaaaaaaaaaaaaaaaaaaaaaaaaaaaaaaaaaaaaaaugcaucccccccccccccccccccccccccccccccaaaggcucuuuucagagccaccagaauu

SEQ ID NO: 2559 - RNA, 1889 nt, Artificial Sequence
  mRNA product Design e-3 comprising derived and/or modified sequence from HRSV(A2)__F_DSCav1_mut2 (opt1)
gggagacuuucccauucuguagcagaauuugguguugccuguggucuuggucccgcggagaagcuuaccauggagcugcucauccugaaggccaacgccaucaccaccauccugacggcggugaccuucugcuucgccagcggccagaacaucaccgaggaguucuaccaguccacgugcagcgccgucuccaagggguaccucggcgcccugcggaccggcugguacaccuccgugaucaccaucgagcugagcaacaucaaggagaacaagugcaacgggaccgacgccaaggugaagcucaucaagcaggagcuggacaaguacaagaacgcggucacggaccugcagcuccugaugcaguccaccccggcaaccggcuccggcuccgccaucugcagcggcgucgccgugugcaaggugcugcaccucgagggggaggucaacaagaucaagagcgcccugcuguccaccaacaaggccguggugagccucuccaacggcgucagcgugcugaccuucaaggugcuggaccucaagaacuacaucgacaagcagcugcugcccauccugaacaagcagagcugcuccauccccaacaucgagacggugaucgaguuccagcagaagaacaaccggcuccuggagaucacccgcgaguucagcgugaacgccggggucaccacccccguguccacguacaugcugaccaacagcgagcuccugucccugaucaacgacaugccgaucaccaacgaccagaagaagcucaugagcaacaacgugcagaucguccggcagcaguccuacagcaucaugugcaucaucaaggaggaggugcuggcguacgugguccagcugccccucuacggcgugaucgacacccccugcuggaagcugcacacgagcccccugugcaccaccaacaccaaggagggguccaacaucugccucacgcgcaccgaccggggcugguacugcgacaacgccggcagcgucuccuucuucccgcaggccgagaccugcaaggugcagagcaaccgcguguucugcgacaccaugaacucccugacgcugcccagcgagguaaaccucugcaacgucgacaucuucaaccccaaguacgacugcaagaucaugaccuccaagaccgacgugagcuccagcgugaucaccucccugggggccaucgucagcugcuacggcaagacgaagugcaccgccagcaacaagaaccgggggaucaucaagaccuucuccaacggcugcgacuacgugagcaacaagggcguggacaccguguccgucgggaacacccuguacugcgugaacaagcaggagggccagagccucuacgugaagggggagcccaucaucaacuucuacgacccgcuggucuuccccuccgacgaguucgacgcgagcaucucccaggugaacgagaagaucaaccagagccuggccuucauccgcaaguccgacgagcugcuccacaacgugaacgccggcaagagcacgaccaacaucaugaucaccaccaucaucaucgucaucaucgugauccugcugucccucaucgccguggggcugcugcucuacugcaaggcccggagcacgcccgucacccuguccaaggaccagcugagcggcaucaacaacaucgcguucuccaacugaggacuaguguccaccugucccuccugggcugcuggauugucucguuuuccugccaaauaaacaggaucagcgcuuuacagaucuaaaaaaaaaaaaaaaaaaaaaaaaaaaaaaaaaaaaaaaaaaaaaaaaaaaaaaaaaaaaaaaaugcaucccccccccccccccccccccccccccccccaaaggcucuuuucagagccaccagaauu

SEQ ID NO: 2560 - RNA, 1889 nt, Artificial Sequence
  mRNA product Design e-3 comprising derived and/or modified sequence from HRSV(A2)__F_DSCav1_mut2 (opt1)
gggagacuuucccauucuguagcagaauuugguguugccuguggucuuggucccgcggagaagcuuaccauggagcugcucauccugaaggccaacgccaucaccaccauccugacggcggugaccuucugcuucgccagcggccagaacaucaccgaggaguucuaccaguccacgugcagcgccgucuccaagggguaccucggcgcccugcgcaccgggugguacaccagcgugaucaccaucgagcuguccaacaucaaggagaacaagugcaacggcaccgacgccaaggugaagcucaucaagcaggagcuggacaaguacaagaacgcggucacggaccugcagcuccugaugcagagcacccccgccaccggguccggcagcgccaucugcuccggcguggccgugugcaagguccugcaccucgagggggaggugaacaagaucaagagcgcgcugcuguccaccaacaaggccguggucagccucuccaacggcgugagcgugcugacguucaagguccuggaccucaagaacuacaucgacaagcagcugcugccgauccucaacaagcaguccugcagcauccccaacaucgagaccgugaucgaguuccagcagaagaacaaccggcugcuggagaucacccgcgaguucuccgugaacgccggggucaccacgcccgugagcaccuacaugcucaccaacuccgagcugcugagccucaucaacgacaugcccaucaccaacgaccagaagaagcugaugagcaacaacgugcagaucguccggcagcaguccuacagcaucaugugcaucaucaaggaggaggugcuggccuacgugguccagcucccgcuguacggcgugaucgacacgcccugcuggaagcugcacaccagcccccucugcaccaccaacacgaaggagggguccaacaucugccugacccgcaccgaccggggcugguacugcgacaacgccggcuccgugagcuucuucccccaggcggagaccugcaagguccaguccaaccgcguguucugcgacacgaugaacagccugacccucccguccgaggucaaccugugcaacguggacaucuucaaccccaaguacgacugcaagaucaugaccagcaagaccgacguguccagcuccgucaucacgagccugggggccaucguguccugcuacggcaagaccaagugcaccgccagcaacaagaaccgggggaucaucaagaccuucuccaacggcugcgacuacgugagcaacaagggcgucgacacgguguccguggggaacacccucuacugcgucaacaagcaggagggccagagccuguacgugaagggggagcccaucaucaacuucuacgacccccugguguucccgagcgacgaguucgacgccuccaucagccaggucaacgagaagaucaaccagucccucgccuucauccgcaagagcgacgagcugcugcacaacgugaacgcgggcaaguccaccaccaacaucaugaucaccacgaucaucaucgugaucaucgucauccuccugagccugaucgccguggggcuccugcuguacugcaaggcccgguccacccccgugacccugagcaaggaccagcucuccggcaucaacaacaucgccuucagcaacugaggacuaguguccaccugucccuccugggcugcuggauugucucguuuuccugccaaauaaacaggaucagcgcuuuacagaucuaaaaaaaaaaaaaaaaaaaaaaaaaaaaaaaaaaaaaaaaaaaaaaaaaaaaaaaaaaaaaaaaugcaucccccccccccccccccccccccccccccccaaaggcucuuuucagagccaccagaauu

SEQ ID NO: 2561 - RNA, 1889 nt, Artificial Sequence
  mRNA product Design e-3 comprising derived and/or modified sequence from HRSV(A2)__F_DSCav1_mut2 (opt2)
gggagacuuucccauucuguagcagaauuugguguugccuguggucuuggucccgcggagaagcuuaccauggagcuccucauccucaaggccaacgccaucaccaccauccucaccgccgucaccuucugcuucgccuccggccagaacaucaccgaggaguucuaccaguccaccugcuccgccgucuccaagggcuaccucggcgcccuccgcaccggcugguacaccuccgucaucaccaucgagcucuccaacaucaaggagaacaagugcaacggcaccgacgccaaggucaagcucaucaagcaggagcucgacaaguacaagaacgccgucaccgaccuccagcuccucaugcaguccacccccgccaccggcuccggcuccgccaucugcuccggcgucgccgucugcaagguccuccaccucgagggcgaggucaacaagaucaaguccgcccuccucuccaccaacaaggccgucgucucccucuccaacggcgucuccguccucaccuucaagguccucgaccucaagaacuacaucgacaagcagcuccuccccauccucaacaagcaguccugcuccauccccaacaucgagaccgucaucgaguuccagcagaagaacaaccgccuccucgagaucacccgcgaguucuccgucaacgccggcgucaccacccccgucuccaccuacaugcucaccaacuccgagcuccucucccucaucaacgacaugcccaucaccaacgaccagaagaagcucauguccaacaacguccagaucguccgccagcaguccuacuccaucaugugcaucaucaaggaggagguccucgccuacgucguccagcucccccucuacggcgucaucgacacccccugcuggaagcuccacaccuccccccucugcaccaccaacaccaaggagggcuccaacaucugccucacccgcaccgaccgcggcugguacugcgacaacgccggcuccgucuccuucuucccccaggccgagaccugcaagguccaguccaaccgcgucuucugcgacaccaugaacucccucacccuccccuccgaggucaaccucugcaacgucgacaucuucaaccccaaguacgacugcaagaucaugaccuccaagaccgacgucuccuccuccgucaucaccucccucggcgccaucgucuccugcuacggcaagaccaagugcaccgccuccaacaagaaccgcggcaucaucaagaccuucuccaacggcugcgacuacgucuccaacaagggcgucgacaccgucuccgucggcaacacccucuacugcgucaacaagcaggagggccagucccucuacgucaagggcgagcccaucaucaacuucuacgacccccucgucuuccccuccgacgaguucgacgccuccaucucccaggucaacgagaagaucaaccagucccucgccuucauccgcaaguccgacgagcuccuccacaacgucaacgccggcaaguccaccaccaacaucaugaucaccaccaucaucaucgucaucaucgucauccuccucucccucaucgccgucggccuccuccucuacugcaaggcccgcuccacccccgucacccucuccaaggaccagcucuccggcaucaacaacaucgccuucuccaacugaggacuaguguccaccugucccuccugggcugcuggauugucucguuuuccugccaaauaaacaggaucagcgcuuuacagaucuaaaaaaaaaaaaaaaaaaaaaaaaaaaaaaaaaaaaaaaaaaaaaaaaaaaaaaaaaaaaaaaaugcaucccccccccccccccccccccccccccccccaaaggcucuuuucagagccaccagaauu

SEQ ID NO: 2562 - RNA, 1889 nt, Artificial Sequence
  mRNA product Design e-3 comprising derived and/or modified sequence from HRSV(A2)__F_DSCav1_mut2 (opt3)
gggagacuuucccauucuguagcagaauuugguguugccuguggucuuggucccgcggagaagcuuaccauggagcugcucauccuuaaggccaacgcuauuaccacaauacugacugcagugacguucugcuuugccagcggccagaauaucaccgaagaguucuaccaauccacauguucugcggucucaaaaggguauuugggagcuuuaagaacugguugguacaccaguguuauuacaaucgaacugagcaacauuaaggagaauaaaugcaacggcaccgacgccaaggugaaacuaaucaagcaggaacucgauaaguauaaaaaugcaguaacugaccugcagcuucugaugcaguccacacccgccaccgggucuggaucggcuauauguucaggcguggcagucugcaagguguugcaccucgagggugagguuaacaaaaucaagagcgcccugcugaguacgaauaaagcuguggucucccucucuaacggggugagcguauuaacuuuuaagguucuggaucuuaagaauuacauugacaaacaauugcugccuauccuaaacaagcaguccuguucaauuccaaauaucgaaaccgugauagaguuccagcagaaaaacaauaggcuccuggaaauuacacgggaguuuagugucaacgccggagugacuaccccggugagcacauauaugcuuaccaauucugagcuguugucccucaucaacgauaugcccauuacgaacgaccaaaagaaacugaugucaaauaacguccagaucguucgccagcagagcuacaguaucaugugcauuauaaaggaagagguguuagcguauguagugcaacugccucucuacggcgucaucgauacuccauguuggaaacuucauacaucuccccugugcaccacuaauacaaaggaaggcuccaacauuuguuugacccgaacggaccgugggugguacugcgauaaugcaggaagcgugucguucuuuccucaggccgagaccuguaagguucagucuaacagaguguucugcgacacaaugaacucccuaacucugccaucagaagucaaucucugcaauguggauaucuuuaaccccaaauaugacuguaagauaaugaccaguaaaacagauguaagcuccucuguuauuacuagccugggugcuaucgugucaugcuacggcaagaccaaauguacagccaguaauaagaacagggggaucauuaagaccuucuccaauggaugcgacuaugucagcaacaaaggcguggacacugucucuguggguaauacgcuuuacuguguuaacaagcaagaggggcagucacuguaugugaaaggagagccuaucauuaacuuuuacgauccauugguauucccgagugacgaauuugaugcaagcauaucccaggucaaugagaagaucaaccagucucucgcuuucauucggaaaucggacgaacuguuacacaaugugaacgccggcaagagcacaaccaauaucaugaucacuaccauuauaaucguuauuaucgugauucugcuaucccucaucgcggucggccugcuuuuguauugcaaggcccgcucaacacccgugacccugaguaaagaucaacucucugggauaaacaauaucgcauucagcaacugaggacuaguguccaccugucccuccugggcugcuggauugucucguuuuccugccaaauaaacaggaucagcgcuuuacagaucuaaaaaaaaaaaaaaaaaaaaaaaaaaaaaaaaaaaaaaaaaaaaaaaaaaaaaaaaaaaaaaaaugcaucccccccccccccccccccccccccccccccaaaggcucuuuucagagccaccagaauu

SEQ ID NO: 2563 - RNA, 1889 nt, Artificial Sequence
  mRNA product Design e-3 comprising derived and/or modified sequence from HRSV(A2)__F_DSCav1_mut2 (opt4)
gggagacuuucccauucuguagcagaauuugguguugccuguggucuuggucccgcggagaagcuuaccauggagcugcugauccugaaggccaacgccaucaccaccauccugaccgccgugaccuucugcuucgccagcggccagaacaucaccgaggaguucuaccagagcaccugcagcgccgugagcaagggcuaccugggcgcccugagaaccggcugguacaccagcgugaucaccaucgagcugagcaacaucaaggagaacaagugcaacggcaccgacgccaaggugaagcugaucaagcaggagcuggacaaguacaagaacgccgugaccgaccugcagcugcugaugcagagcacccccgccaccggcagcggcagcgccaucugcagcggcguggccgugugcaaggugcugcaccuggagggcgaggugaacaagaucaagagcgcccugcugagcaccaacaaggccguggugagccugagcaacggcgugagcgugcugaccuucaaggugcuggaccugaagaacuacaucgacaagcagcugcugcccauccugaacaagcagagcugcagcauccccaacaucgagaccgugaucgaguuccagcagaagaacaacagacugcuggagaucaccagagaguucagcgugaacgccggcgugaccacccccgugagcaccuacaugcugaccaacagcgagcugcugagccugaucaacgacaugcccaucaccaacgaccagaagaagcugaugagcaacaacgugcagaucgugagacagcagagcuacagcaucaugugcaucaucaaggaggaggugcuggccuacguggugcagcugccccuguacggcgugaucgacacccccugcuggaagcugcacaccagcccccugugcaccaccaacaccaaggagggcagcaacaucugccugaccagaaccgacagaggcugguacugcgacaacgccggcagcgugagcuucuucccccaggccgagaccugcaaggugcagagcaacagaguguucugcgacaccaugaacagccugacccugcccagcgaggugaaccugugcaacguggacaucuucaaccccaaguacgacugcaagaucaugaccagcaagaccgacgugagcagcagcgugaucaccagccugggcgccaucgugagcugcuacggcaagaccaagugcaccgccagcaacaagaacagaggcaucaucaagaccuucagcaacggcugcgacuacgugagcaacaagggcguggacaccgugagcgugggcaacacccuguacugcgugaacaagcaggagggccagagccuguacgugaagggcgagcccaucaucaacuucuacgacccccugguguuccccagcgacgaguucgacgccagcaucagccaggugaacgagaagaucaaccagagccuggccuucaucagaaagagcgacgagcugcugcacaacgugaacgccggcaagagcaccaccaacaucaugaucaccaccaucaucaucgugaucaucgugauccugcugagccugaucgccgugggccugcugcuguacugcaaggccagaagcacccccgugacccugagcaaggaccagcugagcggcaucaacaacaucgccuucagcaacugaggacuaguguccaccugucccuccugggcugcuggauugucucguuuuccugccaaauaaacaggaucagcgcuuuacagaucuaaaaaaaaaaaaaaaaaaaaaaaaaaaaaaaaaaaaaaaaaaaaaaaaaaaaaaaaaaaaaaaaugcaucccccccccccccccccccccccccccccccaaaggcucuuuucagagccaccagaauu

SEQ ID NO: 2564 - RNA, 1889 nt, Artificial Sequence
  mRNA product Design e-3 comprising derived and/or modified sequence from HRSV(A2)__F_DSCav1_mut2 (opt5)
gggagacuuucccauucuguagcagaauuugguguugccuguggucuuggucccgcggagaagcuuaccauggagcugcucauccugaaggccaacgcuauuaccacaauccuuacggccgugaccuucugcuuugcgagcggccagaauauuacagaagaguucuaccaauccaccuguucugcugucagcaaaggguaucugggagcccucagaacaggcugguacaccuccguuaucacaauugaacugucuaacaucaaggagaauaaaugcaacgggaccgacgccaaggugaaacuuaucaagcaggaacuggauaaguauaaaaaugcugugacggaccuccagcugcugaugcagagcacccccgccacaggauccggcucugcuauuuguagcggggucgccgugugcaagguucuccaccuggagggagaggugaacaaaaucaaguccgcgcuucugagcaccaauaaagccgucgugucucucuccaacggcguuagcgugcugacauuuaagguccuugaucugaagaauuacauugacaaacaacuccugccuauccugaacaagcagucuuguuccauuccgaauaucgaaaccgugauugaguuccagcagaaaaacaaucggcuccuggaaaucacgcgcgaguuuagcgugaacgcuggcgucacaacccccguuucuacauauaugcuuaccaauuccgagcugcucagccugaucaacgauaugccuauuaccaacgaccaaaagaaacuuauguccaauaacgugcagaucgugagacagcagucuuacagcauuaugugcaucauuaaggaagagguccuggccuaugugguucaacucccccuguacggggugaucgauacaccuuguuggaaacugcauacgagcccccucugcaccacaaauaccaaggaaggauccaacaucugucugacacggaccgaccgcggcugguacugcgauaaugcugggucugucuccuucuuuccucaggccgagacguguaaggugcagagcaacagaguuuucugcgacacaaugaacucucuuacccugccgagcgaagugaaucucugcaaugucgauauuuuuaaccccaaauaugacuguaagaucaugaccuccaaaacagaugugucuagcuccgucauuaccagccugggagcgaucgugucuugcuacggcaagacaaaauguacggccuccaauaagaaccgggggauuaucaagaccuucagcaauggaugcgacuauguuucuaacaaaggcguggacacagucuccgugggcaauacccuuuacuguguuaacaagcaagaggggcagagccuguaugugaaaggagagccuaucauuaacuuuuacgauccccucgucuucccuuccgacgaauuugaugcuucuaucagccaggugaaugagaagauuaaccagucccuggccuucauccgcaaaucugacgaacugcuccacaaugugaacgcuggcaagagcacaaccaauauuaugaucacgaccauuaucaucguuauuaucgucauucugcuuucccugaucgccguggggcuccugcuguauugcaaggccagaagcacacccgugacccuuucuaaagaucaacucuccggaauuaacaauaucgcuuucagcaacugaggacuaguguccaccugucccuccugggcugcuggauugucucguuuuccugccaaauaaacaggaucagcgcuuuacagaucuaaaaaaaaaaaaaaaaaaaaaaaaaaaaaaaaaaaaaaaaaaaaaaaaaaaaaaaaaaaaaaaaugcaucccccccccccccccccccccccccccccccaaaggcucuuuucagagccaccagaauu

SEQ ID NO: 2565 - RNA, 1889 nt, Artificial Sequence
  mRNA product Design e-3 comprising derived and/or modified sequence from HRSV(A2)__F_DSCav1_mut2 (opt6)
gggagacuuucccauucuguagcagaauuugguguugccuguggucuuggucccgcggagaagcuuaccauggaacuacuaauccuaaaagcaaacgcaauuacaacuauacuuaccgccguaacauuuugcuucgcaucugggcaaaacauuaccgaagaauuuuaucaaucaacaugcucagcagucuccaaaggauaccuuggagcauuaagaaccggcugguauaccuccguaauaacaauugaacuaucuaauauaaaagaaaauaaauguaauggaacugacgcaaaaguuaaacuaauaaaacaagaacucgacaaauacaaaaacgccgucacagaccuacaacuacuaaugcaaucaacccccgcaacaggaucaggauccgcaaucugcagcggcgucgcaguuugcaaaguccuacauuuagaaggagaaguaaacaaaauaaaaucugcucuccucucuacaaacaaagcaguagugucacuuucaaacggaguaucaguucuaacauucaaaguacuagaccuaaaaaauuacauagacaaacaacuacuuccaauucuaaacaaacaauccuguuccauacccaacauagaaacaguaauagaauuucaacaaaaaaauaacagacuccuagaaauuacaagagaauuuuccgucaaugcaggaguaacaaccccaguaucaaccuacauguuaacuaacucagaacucuuaucacuaauaaacgacaugccaaucacuaaugaccaaaaaaaacucaugucaaauaacguacaaauaguccgacaacaaucauacuccaucaugugcauuauaaaagaagaaguacuagcauacgucguccaauuaccacuauacggcgucauagacacaccauguuggaaacuccacacaucaccacuaugcacuacaaauacaaaagaaggcuccaacaucugccuaacaagaacagacagagguugguauugcgacaacgcaggaucaguaucauuuuucccccaagcagaaacauguaaaguacaaucaaauagagucuucugcgacaccaugaacucauuaacacuaccuucagaagucaaccuaugcaacguagacaucuucaacccuaaauaugacugcaaaaucaugaccagcaaaaccgacguuucaucuuccguaauaacaucacuaggcgcaauagucucauguuacggcaaaacaaaauguacagcaucaaauaaaaaccguggaauaauaaaaacauuuucuaaugguugugacuacguaagcaauaaaggaguagauacaguaucagucggcaacaccuuauacuguguaaacaaacaagaaggccaaaguuuauacgucaaaggagaacccaucaucaacuucuacgacccauuaguauucccaucagacgaauuugaugcaagcauuucacaagucaacgaaaaaaucaaucaaucauuagcauucauccgaaaaucagacgaauuauuacacaacguaaacgccggaaaaucaaccacuaauauaaugauaaccacaauaaucaucguaauaauaguaauacuucucucacuaaucgcagucggacuccuucuauacugcaaagcaagaucuacaccaguaacacuauccaaagaucaacuaaguggcauaaacaacauagcauuuucuaacuaaggacuaguguccaccugucccuccugggcugcuggauugucucguuuuccugccaaauaaacaggaucagcgcuuuacagaucuaaaaaaaaaaaaaaaaaaaaaaaaaaaaaaaaaaaaaaaaaaaaaaaaaaaaaaaaaaaaaaaaugcaucccccccccccccccccccccccccccccccaaaggcucuuuucagagccaccagaauu

SEQ ID NO: 2566 - RNA, 1889 nt, Artificial Sequence
  mRNA product Design e-3 comprising derived and/or modified sequence from HRSV(A2)__F_DSCav1_mut2 (opt11)
gggagacuuucccauucuguagcagaauuugguguugccuguggucuuggucccgcggagaagcuuaccauggaacuccucauccuaaaagccaacgcgaucaccacaauccugacagccgucaccuucugcuucgccuccggccaaaacaucaccgaagaguucuaccaauccacaugcuccgccgucuccaagggcuaccugggcgcacuucguacaggcugguacaccuccguaauaaccaucgaacucuccaacaucaaagaaaacaaaugcaacggcacagacgcaaaagucaaacucaucaagcaagaacuugacaaauacaaaaaugcagucaccgaccuucaacuccucaugcaaucuacccccgccacaggcuccggcuccgcuaucugcuccggcgucgccgucugcaaaguccuccaccucgaaggugaaguaaacaaaauaaaauccgcccuccucuccaccaacaaagccgucgucucccuaucaaacggcgucuccgugcucaccuucaagguucucgaccugaaaaacuacauagacaaacagcuccuaccaauccuuaacaaacagagcugcuccauuccgaauaucgaaacgguaaucgaauuucaacagaaaaacaaccgccuccucgaaauaacgcgagaguucuccguaaacgcuggcgucaccacacccgucagcaccuacaugcuaacgaacuccgaacucuugucgcucaucaacgacaugcccauaaccaacgaccaaaagaaacuaauguccaauaacguacaaaucguacgccaacaaucuuacuccaucaugugcaucauaaaagaagaaguacuagcuuacgucguccaacucccacuguacggagucaucgacacccccugcuggaaacuccacaccucuccccucugcaccaccaacaccaaagagggcuccaacauuugccugacacgcaccgaccgcggcugguacugcgacaacgcaggcuccgucucguucuucccccaagccgaaaccugcaaaguccaauccaaccgcgucuucugcgacaccaugaacucccucacccuccccuccgaagucaaucuaugcaacguagacaucuucaacccgaaauaugacugcaaaauuaugacaucuaaaaccgacguguccuccucagucaucacuucccuaggagccaucguuuccuguuacggcaagaccaaaugcaccgccagcaacaaaaaccgaggcaucaucaaaaccuucuccaacggaugugacuaugucuccaacaagggcgucgacaccgucagcgucggcaacacccucuacugcgucaacaaacaagaaggccaaucccucuacgucaaaggagagcccauaaucaacuucuacgacccccucgucuucccauccgacgaguucgacgccucaaucucccaagucaacgagaaaaucaaccaauccuuagccuucauccguaaguccgacgaacuccuucacaacgucaacgccgguaaaucuaccaccaacaucaugauaacaacaauaauuaucgucaucaucgucauccuccuuucccucaucgcggucgggcuauugcucuacugcaaagcccgguccaccccaguaacccucucuaaagaccaacucagcggaaucaauaacauagccuucagcaauuaaggacuaguguccaccugucccuccugggcugcuggauugucucguuuuccugccaaauaaacaggaucagcgcuuuacagaucuaaaaaaaaaaaaaaaaaaaaaaaaaaaaaaaaaaaaaaaaaaaaaaaaaaaaaaaaaaaaaaaaugcaucccccccccccccccccccccccccccccccaaaggcucuuuucagagccaccagaauu

SEQ ID NO: 2567 - RNA, 1943 nt, Artificial Sequence
  mRNA product Design e-4 comprising derived and/or modified sequence from HRSV(A2)__F_DSCav1_mut2 (opt1)
gggagacuccugucgggcggaaguaggaggaguagaguuuaaaaacaguacucuuuuuccgguucgggacguaguugaagcaacgacaagccggauaaccgcucuugagacaggaagcuuaccauggagcugcucauccugaaggccaacgccaucaccaccauccugacggcggugaccuucugcuucgccagcggccagaacaucaccgaggaguucuaccaguccacgugcagcgccgucuccaagggguaccucggcgcccugcggaccggcugguacaccuccgugaucaccaucgagcugagcaacaucaaggagaacaagugcaacgggaccgacgccaaggugaagcucaucaagcaggagcuggacaaguacaagaacgcggucacggaccugcagcuccugaugcaguccaccccggcaaccggcuccggcuccgccaucugcagcggcgucgccgugugcaaggugcugcaccucgagggggaggucaacaagaucaagagcgcccugcuguccaccaacaaggccguggugagccucuccaacggcgucagcgugcugaccuucaaggugcuggaccucaagaacuacaucgacaagcagcugcugcccauccugaacaagcagagcugcuccauccccaacaucgagacggugaucgaguuccagcagaagaacaaccggcuccuggagaucacccgcgaguucagcgugaacgccggggucaccacccccguguccacguacaugcugaccaacagcgagcuccugucccugaucaacgacaugccgaucaccaacgaccagaagaagcucaugagcaacaacgugcagaucguccggcagcaguccuacagcaucaugugcaucaucaaggaggaggugcuggcguacgugguccagcugccccucuacggcgugaucgacacccccugcuggaagcugcacacgagcccccugugcaccaccaacaccaaggagggguccaacaucugccucacgcgcaccgaccggggcugguacugcgacaacgccggcagcgucuccuucuucccgcaggccgagaccugcaaggugcagagcaaccgcguguucugcgacaccaugaacucccugacgcugcccagcgagguaaaccucugcaacgucgacaucuucaaccccaaguacgacugcaagaucaugaccuccaagaccgacgugagcuccagcgugaucaccucccugggggccaucgucagcugcuacggcaagacgaagugcaccgccagcaacaagaaccgggggaucaucaagaccuucuccaacggcugcgacuacgugagcaacaagggcguggacaccguguccgucgggaacacccuguacugcgugaacaagcaggagggccagagccucuacgugaagggggagcccaucaucaacuucuacgacccgcuggucuuccccuccgacgaguucgacgcgagcaucucccaggugaacgagaagaucaaccagagccuggccuucauccgcaaguccgacgagcugcuccacaacgugaacgccggcaagagcacgaccaacaucaugaucaccaccaucaucaucgucaucaucgugauccugcugucccucaucgccguggggcugcugcucuacugcaaggcccggagcacgcccgucacccuguccaaggaccagcugagcggcaucaacaacaucgcguucuccaacugaggacuaguguccaccugucccuccugggcugcuggauugucucguuuuccugccaaauaaacaggaucagcgcuuuacagaucuaaaaaaaaaaaaaaaaaaaaaaaaaaaaaaaaaaaaaaaaaaaaaaaaaaaaaaaaaaaaaaaaugcaucccccccccccccccccccccccccccccccaaaggcucuuuucagagccaccagaauu

SEQ ID NO: 2568 - RNA, 1943 nt, Artificial Sequence
  mRNA product Design e-4 comprising derived and/or modified sequence from HRSV(A2)__F_DSCav1_mut2 (opt1)
gggagacuccugucgggcggaaguaggaggaguagaguuuaaaaacaguacucuuuuuccgguucgggacguaguugaagcaacgacaagccggauaaccgcucuugagacaggaagcuuaccauggagcugcucauccugaaggccaacgccaucaccaccauccugacggcggugaccuucugcuucgccagcggccagaacaucaccgaggaguucuaccaguccacgugcagcgccgucuccaagggguaccucggcgcccugcgcaccgggugguacaccagcgugaucaccaucgagcuguccaacaucaaggagaacaagugcaacggcaccgacgccaaggugaagcucaucaagcaggagcuggacaaguacaagaacgcggucacggaccugcagcuccugaugcagagcacccccgccaccggguccggcagcgccaucugcuccggcguggccgugugcaagguccugcaccucgagggggaggugaacaagaucaagagcgcgcugcuguccaccaacaaggccguggucagccucuccaacggcgugagcgugcugacguucaagguccuggaccucaagaacuacaucgacaagcagcugcugccgauccucaacaagcaguccugcagcauccccaacaucgagaccgugaucgaguuccagcagaagaacaaccggcugcuggagaucacccgcgaguucuccgugaacgccggggucaccacgcccgugagcaccuacaugcucaccaacuccgagcugcugagccucaucaacgacaugcccaucaccaacgaccagaagaagcugaugagcaacaacgugcagaucguccggcagcaguccuacagcaucaugugcaucaucaaggaggaggugcuggccuacgugguccagcucccgcuguacggcgugaucgacacgcccugcuggaagcugcacaccagcccccucugcaccaccaacacgaaggagggguccaacaucugccugacccgcaccgaccggggcugguacugcgacaacgccggcuccgugagcuucuucccccaggcggagaccugcaagguccaguccaaccgcguguucugcgacacgaugaacagccugacccucccguccgaggucaaccugugcaacguggacaucuucaaccccaaguacgacugcaagaucaugaccagcaagaccgacguguccagcuccgucaucacgagccugggggccaucguguccugcuacggcaagaccaagugcaccgccagcaacaagaaccgggggaucaucaagaccuucuccaacggcugcgacuacgugagcaacaagggcgucgacacgguguccguggggaacacccucuacugcgucaacaagcaggagggccagagccuguacgugaagggggagcccaucaucaacuucuacgacccccugguguucccgagcgacgaguucgacgccuccaucagccaggucaacgagaagaucaaccagucccucgccuucauccgcaagagcgacgagcugcugcacaacgugaacgcgggcaaguccaccaccaacaucaugaucaccacgaucaucaucgugaucaucgucauccuccugagccugaucgccguggggcuccugcuguacugcaaggcccgguccacccccgugacccugagcaaggaccagcucuccggcaucaacaacaucgccuucagcaacugaggacuaguguccaccugucccuccugggcugcuggauugucucguuuuccugccaaauaaacaggaucagcgcuuuacagaucuaaaaaaaaaaaaaaaaaaaaaaaaaaaaaaaaaaaaaaaaaaaaaaaaaaaaaaaaaaaaaaaaugcaucccccccccccccccccccccccccccccccaaaggcucuuuucagagccaccagaauu

SEQ ID NO: 2569 - RNA, 1943 nt, Artificial Sequence
  mRNA product Design e-4 comprising derived and/or modified sequence from HRSV(A2)__F_DSCav1_mut2 (opt2)
gggagacuccugucgggcggaaguaggaggaguagaguuuaaaaacaguacucuuuuuccgguucgggacguaguugaagcaacgacaagccggauaaccgcucuugagacaggaagcuuaccauggagcuccucauccucaaggccaacgccaucaccaccauccucaccgccgucaccuucugcuucgccuccggccagaacaucaccgaggaguucuaccaguccaccugcuccgccgucuccaagggcuaccucggcgcccuccgcaccggcugguacaccuccgucaucaccaucgagcucuccaacaucaaggagaacaagugcaacggcaccgacgccaaggucaagcucaucaagcaggagcucgacaaguacaagaacgccgucaccgaccuccagcuccucaugcaguccacccccgccaccggcuccggcuccgccaucugcuccggcgucgccgucugcaagguccuccaccucgagggcgaggucaacaagaucaaguccgcccuccucuccaccaacaaggccgucgucucccucuccaacggcgucuccguccucaccuucaagguccucgaccucaagaacuacaucgacaagcagcuccuccccauccucaacaagcaguccugcuccauccccaacaucgagaccgucaucgaguuccagcagaagaacaaccgccuccucgagaucacccgcgaguucuccgucaacgccggcgucaccacccccgucuccaccuacaugcucaccaacuccgagcuccucucccucaucaacgacaugcccaucaccaacgaccagaagaagcucauguccaacaacguccagaucguccgccagcaguccuacuccaucaugugcaucaucaaggaggagguccucgccuacgucguccagcucccccucuacggcgucaucgacacccccugcuggaagcuccacaccuccccccucugcaccaccaacaccaaggagggcuccaacaucugccucacccgcaccgaccgcggcugguacugcgacaacgccggcuccgucuccuucuucccccaggccgagaccugcaagguccaguccaaccgcgucuucugcgacaccaugaacucccucacccuccccuccgaggucaaccucugcaacgucgacaucuucaaccccaaguacgacugcaagaucaugaccuccaagaccgacgucuccuccuccgucaucaccucccucggcgccaucgucuccugcuacggcaagaccaagugcaccgccuccaacaagaaccgcggcaucaucaagaccuucuccaacggcugcgacuacgucuccaacaagggcgucgacaccgucuccgucggcaacacccucuacugcgucaacaagcaggagggccagucccucuacgucaagggcgagcccaucaucaacuucuacgacccccucgucuuccccuccgacgaguucgacgccuccaucucccaggucaacgagaagaucaaccagucccucgccuucauccgcaaguccgacgagcuccuccacaacgucaacgccggcaaguccaccaccaacaucaugaucaccaccaucaucaucgucaucaucgucauccuccucucccucaucgccgucggccuccuccucuacugcaaggcccgcuccacccccgucacccucuccaaggaccagcucuccggcaucaacaacaucgccuucuccaacugaggacuaguguccaccugucccuccugggcugcuggauugucucguuuuccugccaaauaaacaggaucagcgcuuuacagaucuaaaaaaaaaaaaaaaaaaaaaaaaaaaaaaaaaaaaaaaaaaaaaaaaaaaaaaaaaaaaaaaaugcaucccccccccccccccccccccccccccccccaaaggcucuuuucagagccaccagaauu

SEQ ID NO: 2570 - RNA, 1943 nt, Artificial Sequence
  mRNA product Design e-4 comprising derived and/or modified sequence from HRSV(A2)__F_DSCav1_mut2 (opt3)
gggagacuccugucgggcggaaguaggaggaguagaguuuaaaaacaguacucuuuuuccgguucgggacguaguugaagcaacgacaagccggauaaccgcucuugagacaggaagcuuaccauggagcugcucauccuuaaggccaacgcuauuaccacaauacugacugcagugacguucugcuuugccagcggccagaauaucaccgaagaguucuaccaauccacauguucugcggucucaaaaggguauuugggagcuuuaagaacugguugguacaccaguguuauuacaaucgaacugagcaacauuaaggagaauaaaugcaacggcaccgacgccaaggugaaacuaaucaagcaggaacucgauaaguauaaaaaugcaguaacugaccugcagcuucugaugcaguccacacccgccaccgggucuggaucggcuauauguucaggcguggcagucugcaagguguugcaccucgagggugagguuaacaaaaucaagagcgcccugcugaguacgaauaaagcuguggucucccucucuaacggggugagcguauuaacuuuuaagguucuggaucuuaagaauuacauugacaaacaauugcugccuauccuaaacaagcaguccuguucaauuccaaauaucgaaaccgugauagaguuccagcagaaaaacaauaggcuccuggaaauuacacgggaguuuagugucaacgccggagugacuaccccggugagcacauauaugcuuaccaauucugagcuguugucccucaucaacgauaugcccauuacgaacgaccaaaagaaacugaugucaaauaacguccagaucguucgccagcagagcuacaguaucaugugcauuauaaaggaagagguguuagcguauguagugcaacugccucucuacggcgucaucgauacuccauguuggaaacuucauacaucuccccugugcaccacuaauacaaaggaaggcuccaacauuuguuugacccgaacggaccgugggugguacugcgauaaugcaggaagcgugucguucuuuccucaggccgagaccuguaagguucagucuaacagaguguucugcgacacaaugaacucccuaacucugccaucagaagucaaucucugcaauguggauaucuuuaaccccaaauaugacuguaagauaaugaccaguaaaacagauguaagcuccucuguuauuacuagccugggugcuaucgugucaugcuacggcaagaccaaauguacagccaguaauaagaacagggggaucauuaagaccuucuccaauggaugcgacuaugucagcaacaaaggcguggacacugucucuguggguaauacgcuuuacuguguuaacaagcaagaggggcagucacuguaugugaaaggagagccuaucauuaacuuuuacgauccauugguauucccgagugacgaauuugaugcaagcauaucccaggucaaugagaagaucaaccagucucucgcuuucauucggaaaucggacgaacuguuacacaaugugaacgccggcaagagcacaaccaauaucaugaucacuaccauuauaaucguuauuaucgugauucugcuaucccucaucgcggucggccugcuuuuguauugcaaggcccgcucaacacccgugacccugaguaaagaucaacucucugggauaaacaauaucgcauucagcaacugaggacuaguguccaccugucccuccugggcugcuggauugucucguuuuccugccaaauaaacaggaucagcgcuuuacagaucuaaaaaaaaaaaaaaaaaaaaaaaaaaaaaaaaaaaaaaaaaaaaaaaaaaaaaaaaaaaaaaaaugcaucccccccccccccccccccccccccccccccaaaggcucuuuucagagccaccagaauu

SEQ ID NO: 2571 - RNA, 1943 nt, Artificial Sequence
  mRNA product Design e-4 comprising derived and/or modified sequence from HRSV(A2)__F_DSCav1_mut2 (opt4)
gggagacuccugucgggcggaaguaggaggaguagaguuuaaaaacaguacucuuuuuccgguucgggacguaguugaagcaacgacaagccggauaaccgcucuugagacaggaagcuuaccauggagcugcugauccugaaggccaacgccaucaccaccauccugaccgccgugaccuucugcuucgccagcggccagaacaucaccgaggaguucuaccagagcaccugcagcgccgugagcaagggcuaccugggcgcccugagaaccggcugguacaccagcgugaucaccaucgagcugagcaacaucaaggagaacaagugcaacggcaccgacgccaaggugaagcugaucaagcaggagcuggacaaguacaagaacgccgugaccgaccugcagcugcugaugcagagcacccccgccaccggcagcggcagcgccaucugcagcggcguggccgugugcaaggugcugcaccuggagggcgaggugaacaagaucaagagcgcccugcugagcaccaacaaggccguggugagccugagcaacggcgugagcgugcugaccuucaaggugcuggaccugaagaacuacaucgacaagcagcugcugcccauccugaacaagcagagcugcagcauccccaacaucgagaccgugaucgaguuccagcagaagaacaacagacugcuggagaucaccagagaguucagcgugaacgccggcgugaccacccccgugagcaccuacaugcugaccaacagcgagcugcugagccugaucaacgacaugcccaucaccaacgaccagaagaagcugaugagcaacaacgugcagaucgugagacagcagagcuacagcaucaugugcaucaucaaggaggaggugcuggccuacguggugcagcugccccuguacggcgugaucgacacccccugcuggaagcugcacaccagcccccugugcaccaccaacaccaaggagggcagcaacaucugccugaccagaaccgacagaggcugguacugcgacaacgccggcagcgugagcuucuucccccaggccgagaccugcaaggugcagagcaacagaguguucugcgacaccaugaacagccugacccugcccagcgaggugaaccugugcaacguggacaucuucaaccccaaguacgacugcaagaucaugaccagcaagaccgacgugagcagcagcgugaucaccagccugggcgccaucgugagcugcuacggcaagaccaagugcaccgccagcaacaagaacagaggcaucaucaagaccuucagcaacggcugcgacuacgugagcaacaagggcguggacaccgugagcgugggcaacacccuguacugcgugaacaagcaggagggccagagccuguacgugaagggcgagcccaucaucaacuucuacgacccccugguguuccccagcgacgaguucgacgccagcaucagccaggugaacgagaagaucaaccagagccuggccuucaucagaaagagcgacgagcugcugcacaacgugaacgccggcaagagcaccaccaacaucaugaucaccaccaucaucaucgugaucaucgugauccugcugagccugaucgccgugggccugcugcuguacugcaaggccagaagcacccccgugacccugagcaaggaccagcugagcggcaucaacaacaucgccuucagcaacugaggacuaguguccaccugucccuccugggcugcuggauugucucguuuuccugccaaauaaacaggaucagcgcuuuacagaucuaaaaaaaaaaaaaaaaaaaaaaaaaaaaaaaaaaaaaaaaaaaaaaaaaaaaaaaaaaaaaaaaugcaucccccccccccccccccccccccccccccccaaaggcucuuuucagagccaccagaauu

SEQ ID NO: 2572 - RNA, 1943 nt, Artificial Sequence
  mRNA product Design e-4 comprising derived and/or modified sequence from HRSV(A2)__F_DSCav1_mut2 (opt5)
gggagacuccugucgggcggaaguaggaggaguagaguuuaaaaacaguacucuuuuuccgguucgggacguaguugaagcaacgacaagccggauaaccgcucuugagacaggaagcuuaccauggagcugcucauccugaaggccaacgcuauuaccacaauccuuacggccgugaccuucugcuuugcgagcggccagaauauuacagaagaguucuaccaauccaccuguucugcugucagcaaaggguaucugggagcccucagaacaggcugguacaccuccguuaucacaauugaacugucuaacaucaaggagaauaaaugcaacgggaccgacgccaaggugaaacuuaucaagcaggaacuggauaaguauaaaaaugcugugacggaccuccagcugcugaugcagagcacccccgccacaggauccggcucugcuauuuguagcggggucgccgugugcaagguucuccaccuggagggagaggugaacaaaaucaaguccgcgcuucugagcaccaauaaagccgucgugucucucuccaacggcguuagcgugcugacauuuaagguccuugaucugaagaauuacauugacaaacaacuccugccuauccugaacaagcagucuuguuccauuccgaauaucgaaaccgugauugaguuccagcagaaaaacaaucggcuccuggaaaucacgcgcgaguuuagcgugaacgcuggcgucacaacccccguuucuacauauaugcuuaccaauuccgagcugcucagccugaucaacgauaugccuauuaccaacgaccaaaagaaacuuauguccaauaacgugcagaucgugagacagcagucuuacagcauuaugugcaucauuaaggaagagguccuggccuaugugguucaacucccccuguacggggugaucgauacaccuuguuggaaacugcauacgagcccccucugcaccacaaauaccaaggaaggauccaacaucugucugacacggaccgaccgcggcugguacugcgauaaugcugggucugucuccuucuuuccucaggccgagacguguaaggugcagagcaacagaguuuucugcgacacaaugaacucucuuacccugccgagcgaagugaaucucugcaaugucgauauuuuuaaccccaaauaugacuguaagaucaugaccuccaaaacagaugugucuagcuccgucauuaccagccugggagcgaucgugucuugcuacggcaagacaaaauguacggccuccaauaagaaccgggggauuaucaagaccuucagcaauggaugcgacuauguuucuaacaaaggcguggacacagucuccgugggcaauacccuuuacuguguuaacaagcaagaggggcagagccuguaugugaaaggagagccuaucauuaacuuuuacgauccccucgucuucccuuccgacgaauuugaugcuucuaucagccaggugaaugagaagauuaaccagucccuggccuucauccgcaaaucugacgaacugcuccacaaugugaacgcuggcaagagcacaaccaauauuaugaucacgaccauuaucaucguuauuaucgucauucugcuuucccugaucgccguggggcuccugcuguauugcaaggccagaagcacacccgugacccuuucuaaagaucaacucuccggaauuaacaauaucgcuuucagcaacugaggacuaguguccaccugucccuccugggcugcuggauugucucguuuuccugccaaauaaacaggaucagcgcuuuacagaucuaaaaaaaaaaaaaaaaaaaaaaaaaaaaaaaaaaaaaaaaaaaaaaaaaaaaaaaaaaaaaaaaugcaucccccccccccccccccccccccccccccccaaaggcucuuuucagagccaccagaauu

SEQ ID NO: 2573 - RNA, 1943 nt, Artificial Sequence
  mRNA product Design e-4 comprising derived and/or modified sequence from HRSV(A2)__F_DSCav1_mut2 (opt6)
gggagacuccugucgggcggaaguaggaggaguagaguuuaaaaacaguacucuuuuuccgguucgggacguaguugaagcaacgacaagccggauaaccgcucuugagacaggaagcuuaccauggaacuacuaauccuaaaagcaaacgcaauuacaacuauacuuaccgccguaacauuuugcuucgcaucugggcaaaacauuaccgaagaauuuuaucaaucaacaugcucagcagucuccaaaggauaccuuggagcauuaagaaccggcugguauaccuccguaauaacaauugaacuaucuaauauaaaagaaaauaaauguaauggaacugacgcaaaaguuaaacuaauaaaacaagaacucgacaaauacaaaaacgccgucacagaccuacaacuacuaaugcaaucaacccccgcaacaggaucaggauccgcaaucugcagcggcgucgcaguuugcaaaguccuacauuuagaaggagaaguaaacaaaauaaaaucugcucuccucucuacaaacaaagcaguagugucacuuucaaacggaguaucaguucuaacauucaaaguacuagaccuaaaaaauuacauagacaaacaacuacuuccaauucuaaacaaacaauccuguuccauacccaacauagaaacaguaauagaauuucaacaaaaaaauaacagacuccuagaaauuacaagagaauuuuccgucaaugcaggaguaacaaccccaguaucaaccuacauguuaacuaacucagaacucuuaucacuaauaaacgacaugccaaucacuaaugaccaaaaaaaacucaugucaaauaacguacaaauaguccgacaacaaucauacuccaucaugugcauuauaaaagaagaaguacuagcauacgucguccaauuaccacuauacggcgucauagacacaccauguuggaaacuccacacaucaccacuaugcacuacaaauacaaaagaaggcuccaacaucugccuaacaagaacagacagagguugguauugcgacaacgcaggaucaguaucauuuuucccccaagcagaaacauguaaaguacaaucaaauagagucuucugcgacaccaugaacucauuaacacuaccuucagaagucaaccuaugcaacguagacaucuucaacccuaaauaugacugcaaaaucaugaccagcaaaaccgacguuucaucuuccguaauaacaucacuaggcgcaauagucucauguuacggcaaaacaaaauguacagcaucaaauaaaaaccguggaauaauaaaaacauuuucuaaugguugugacuacguaagcaauaaaggaguagauacaguaucagucggcaacaccuuauacuguguaaacaaacaagaaggccaaaguuuauacgucaaaggagaacccaucaucaacuucuacgacccauuaguauucccaucagacgaauuugaugcaagcauuucacaagucaacgaaaaaaucaaucaaucauuagcauucauccgaaaaucagacgaauuauuacacaacguaaacgccggaaaaucaaccacuaauauaaugauaaccacaauaaucaucguaauaauaguaauacuucucucacuaaucgcagucggacuccuucuauacugcaaagcaagaucuacaccaguaacacuauccaaagaucaacuaaguggcauaaacaacauagcauuuucuaacuaaggacuaguguccaccugucccuccugggcugcuggauugucucguuuuccugccaaauaaacaggaucagcgcuuuacagaucuaaaaaaaaaaaaaaaaaaaaaaaaaaaaaaaaaaaaaaaaaaaaaaaaaaaaaaaaaaaaaaaaugcaucccccccccccccccccccccccccccccccaaaggcucuuuucagagccaccagaauu

SEQ ID NO: 2574 - RNA, 1943 nt, Artificial Sequence
  mRNA product Design e-4 comprising derived and/or modified sequence from HRSV(A2)__F_DSCav1_mut2 (opt11)
gggagacuccugucgggcggaaguaggaggaguagaguuuaaaaacaguacucuuuuuccgguucgggacguaguugaagcaacgacaagccggauaaccgcucuugagacaggaagcuuaccauggaacuccucauccuaaaagccaacgcgaucaccacaauccugacagccgucaccuucugcuucgccuccggccaaaacaucaccgaagaguucuaccaauccacaugcuccgccgucuccaagggcuaccugggcgcacuucguacaggcugguacaccuccguaauaaccaucgaacucuccaacaucaaagaaaacaaaugcaacggcacagacgcaaaagucaaacucaucaagcaagaacuugacaaauacaaaaaugcagucaccgaccuucaacuccucaugcaaucuacccccgccacaggcuccggcuccgcuaucugcuccggcgucgccgucugcaaaguccuccaccucgaaggugaaguaaacaaaauaaaauccgcccuccucuccaccaacaaagccgucgucucccuaucaaacggcgucuccgugcucaccuucaagguucucgaccugaaaaacuacauagacaaacagcuccuaccaauccuuaacaaacagagcugcuccauuccgaauaucgaaacgguaaucgaauuucaacagaaaaacaaccgccuccucgaaauaacgcgagaguucuccguaaacgcuggcgucaccacacccgucagcaccuacaugcuaacgaacuccgaacucuugucgcucaucaacgacaugcccauaaccaacgaccaaaagaaacuaauguccaauaacguacaaaucguacgccaacaaucuuacuccaucaugugcaucauaaaagaagaaguacuagcuuacgucguccaacucccacuguacggagucaucgacacccccugcuggaaacuccacaccucuccccucugcaccaccaacaccaaagagggcuccaacauuugccugacacgcaccgaccgcggcugguacugcgacaacgcaggcuccgucucguucuucccccaagccgaaaccugcaaaguccaauccaaccgcgucuucugcgacaccaugaacucccucacccuccccuccgaagucaaucuaugcaacguagacaucuucaacccgaaauaugacugcaaaauuaugacaucuaaaaccgacguguccuccucagucaucacuucccuaggagccaucguuuccuguuacggcaagaccaaaugcaccgccagcaacaaaaaccgaggcaucaucaaaaccuucuccaacggaugugacuaugucuccaacaagggcgucgacaccgucagcgucggcaacacccucuacugcgucaacaaacaagaaggccaaucccucuacgucaaaggagagcccauaaucaacuucuacgacccccucgucuucccauccgacgaguucgacgccucaaucucccaagucaacgagaaaaucaaccaauccuuagccuucauccguaaguccgacgaacuccuucacaacgucaacgccgguaaaucuaccaccaacaucaugauaacaacaauaauuaucgucaucaucgucauccuccuuucccucaucgcggucgggcuauugcucuacugcaaagcccgguccaccccaguaacccucucuaaagaccaacucagcggaaucaauaacauagccuucagcaauuaaggacuaguguccaccugucccuccugggcugcuggauugucucguuuuccugccaaauaaacaggaucagcgcuuuacagaucuaaaaaaaaaaaaaaaaaaaaaaaaaaaaaaaaaaaaaaaaaaaaaaaaaaaaaaaaaaaaaaaaugcaucccccccccccccccccccccccccccccccaaaggcucuuuucagagccaccagaauu

SEQ ID NO: 2575 - RNA, 1910 nt, Artificial Sequence
  mRNA product Design e-5 comprising derived and/or modified sequence from HRSV(A2)__F_DSCav1_mut2 (opt1)
gggagagcggcucggccauuuugucccagucaguccggaggcugcggcugcagaaguaccgccugcggaguaacugcaaagaagcuuaccauggagcugcucauccugaaggccaacgccaucaccaccauccugacggcggugaccuucugcuucgccagcggccagaacaucaccgaggaguucuaccaguccacgugcagcgccgucuccaagggguaccucggcgcccugcggaccggcugguacaccuccgugaucaccaucgagcugagcaacaucaaggagaacaagugcaacgggaccgacgccaaggugaagcucaucaagcaggagcuggacaaguacaagaacgcggucacggaccugcagcuccugaugcaguccaccccggcaaccggcuccggcuccgccaucugcagcggcgucgccgugugcaaggugcugcaccucgagggggaggucaacaagaucaagagcgcccugcuguccaccaacaaggccguggugagccucuccaacggcgucagcgugcugaccuucaaggugcuggaccucaagaacuacaucgacaagcagcugcugcccauccugaacaagcagagcugcuccauccccaacaucgagacggugaucgaguuccagcagaagaacaaccggcuccuggagaucacccgcgaguucagcgugaacgccggggucaccacccccguguccacguacaugcugaccaacagcgagcuccugucccugaucaacgacaugccgaucaccaacgaccagaagaagcucaugagcaacaacgugcagaucguccggcagcaguccuacagcaucaugugcaucaucaaggaggaggugcuggcguacgugguccagcugccccucuacggcgugaucgacacccccugcuggaagcugcacacgagcccccugugcaccaccaacaccaaggagggguccaacaucugccucacgcgcaccgaccggggcugguacugcgacaacgccggcagcgucuccuucuucccgcaggccgagaccugcaaggugcagagcaaccgcguguucugcgacaccaugaacucccugacgcugcccagcgagguaaaccucugcaacgucgacaucuucaaccccaaguacgacugcaagaucaugaccuccaagaccgacgugagcuccagcgugaucaccucccugggggccaucgucagcugcuacggcaagacgaagugcaccgccagcaacaagaaccgggggaucaucaagaccuucuccaacggcugcgacuacgugagcaacaagggcguggacaccguguccgucgggaacacccuguacugcgugaacaagcaggagggccagagccucuacgugaagggggagcccaucaucaacuucuacgacccgcuggucuuccccuccgacgaguucgacgcgagcaucucccaggugaacgagaagaucaaccagagccuggccuucauccgcaaguccgacgagcugcuccacaacgugaacgccggcaagagcacgaccaacaucaugaucaccaccaucaucaucgucaucaucgugauccugcugucccucaucgccguggggcugcugcucuacugcaaggcccggagcacgcccgucacccuguccaaggaccagcugagcggcaucaacaacaucgcguucuccaacugaggacuaguguccaccugucccuccugggcugcuggauugucucguuuuccugccaaauaaacaggaucagcgcuuuacagaucuaaaaaaaaaaaaaaaaaaaaaaaaaaaaaaaaaaaaaaaaaaaaaaaaaaaaaaaaaaaaaaaaugcaucccccccccccccccccccccccccccccccaaaggcucuuuucagagccaccagaauu

SEQ ID NO: 2576 - RNA, 1910 nt, Artificial Sequence
  mRNA product Design e-5 comprising derived and/or modified sequence from HRSV(A2)__F_DSCav1_mut2 (opt1)
gggagagcggcucggccauuuugucccagucaguccggaggcugcggcugcagaaguaccgccugcggaguaacugcaaagaagcuuaccauggagcugcucauccugaaggccaacgccaucaccaccauccugacggcggugaccuucugcuucgccagcggccagaacaucaccgaggaguucuaccaguccacgugcagcgccgucuccaagggguaccucggcgcccugcgcaccgggugguacaccagcgugaucaccaucgagcuguccaacaucaaggagaacaagugcaacggcaccgacgccaaggugaagcucaucaagcaggagcuggacaaguacaagaacgcggucacggaccugcagcuccugaugcagagcacccccgccaccggguccggcagcgccaucugcuccggcguggccgugugcaagguccugcaccucgagggggaggugaacaagaucaagagcgcgcugcuguccaccaacaaggccguggucagccucuccaacggcgugagcgugcugacguucaagguccuggaccucaagaacuacaucgacaagcagcugcugccgauccucaacaagcaguccugcagcauccccaacaucgagaccgugaucgaguuccagcagaagaacaaccggcugcuggagaucacccgcgaguucuccgugaacgccggggucaccacgcccgugagcaccuacaugcucaccaacuccgagcugcugagccucaucaacgacaugcccaucaccaacgaccagaagaagcugaugagcaacaacgugcagaucguccggcagcaguccuacagcaucaugugcaucaucaaggaggaggugcuggccuacgugguccagcucccgcuguacggcgugaucgacacgcccugcuggaagcugcacaccagcccccucugcaccaccaacacgaaggagggguccaacaucugccugacccgcaccgaccggggcugguacugcgacaacgccggcuccgugagcuucuucccccaggcggagaccugcaagguccaguccaaccgcguguucugcgacacgaugaacagccugacccucccguccgaggucaaccugugcaacguggacaucuucaaccccaaguacgacugcaagaucaugaccagcaagaccgacguguccagcuccgucaucacgagccugggggccaucguguccugcuacggcaagaccaagugcaccgccagcaacaagaaccgggggaucaucaagaccuucuccaacggcugcgacuacgugagcaacaagggcgucgacacgguguccguggggaacacccucuacugcgucaacaagcaggagggccagagccuguacgugaagggggagcccaucaucaacuucuacgacccccugguguucccgagcgacgaguucgacgccuccaucagccaggucaacgagaagaucaaccagucccucgccuucauccgcaagagcgacgagcugcugcacaacgugaacgcgggcaaguccaccaccaacaucaugaucaccacgaucaucaucgugaucaucgucauccuccugagccugaucgccguggggcuccugcuguacugcaaggcccgguccacccccgugacccugagcaaggaccagcucuccggcaucaacaacaucgccuucagcaacugaggacuaguguccaccugucccuccugggcugcuggauugucucguuuuccugccaaauaaacaggaucagcgcuuuacagaucuaaaaaaaaaaaaaaaaaaaaaaaaaaaaaaaaaaaaaaaaaaaaaaaaaaaaaaaaaaaaaaaaugcaucccccccccccccccccccccccccccccccaaaggcucuuuucagagccaccagaauu

SEQ ID NO: 2577 - RNA, 1910 nt, Artificial Sequence
  mRNA product Design e-5 comprising derived and/or modified sequence from HRSV(A2)__F_DSCav1_mut2 (opt2)
gggagagcggcucggccauuuugucccagucaguccggaggcugcggcugcagaaguaccgccugcggaguaacugcaaagaagcuuaccauggagcuccucauccucaaggccaacgccaucaccaccauccucaccgccgucaccuucugcuucgccuccggccagaacaucaccgaggaguucuaccaguccaccugcuccgccgucuccaagggcuaccucggcgcccuccgcaccggcugguacaccuccgucaucaccaucgagcucuccaacaucaaggagaacaagugcaacggcaccgacgccaaggucaagcucaucaagcaggagcucgacaaguacaagaacgccgucaccgaccuccagcuccucaugcaguccacccccgccaccggcuccggcuccgccaucugcuccggcgucgccgucugcaagguccuccaccucgagggcgaggucaacaagaucaaguccgcccuccucuccaccaacaaggccgucgucucccucuccaacggcgucuccguccucaccuucaagguccucgaccucaagaacuacaucgacaagcagcuccuccccauccucaacaagcaguccugcuccauccccaacaucgagaccgucaucgaguuccagcagaagaacaaccgccuccucgagaucacccgcgaguucuccgucaacgccggcgucaccacccccgucuccaccuacaugcucaccaacuccgagcuccucucccucaucaacgacaugcccaucaccaacgaccagaagaagcucauguccaacaacguccagaucguccgccagcaguccuacuccaucaugugcaucaucaaggaggagguccucgccuacgucguccagcucccccucuacggcgucaucgacacccccugcuggaagcuccacaccuccccccucugcaccaccaacaccaaggagggcuccaacaucugccucacccgcaccgaccgcggcugguacugcgacaacgccggcuccgucuccuucuucccccaggccgagaccugcaagguccaguccaaccgcgucuucugcgacaccaugaacucccucacccuccccuccgaggucaaccucugcaacgucgacaucuucaaccccaaguacgacugcaagaucaugaccuccaagaccgacgucuccuccuccgucaucaccucccucggcgccaucgucuccugcuacggcaagaccaagugcaccgccuccaacaagaaccgcggcaucaucaagaccuucuccaacggcugcgacuacgucuccaacaagggcgucgacaccgucuccgucggcaacacccucuacugcgucaacaagcaggagggccagucccucuacgucaagggcgagcccaucaucaacuucuacgacccccucgucuuccccuccgacgaguucgacgccuccaucucccaggucaacgagaagaucaaccagucccucgccuucauccgcaaguccgacgagcuccuccacaacgucaacgccggcaaguccaccaccaacaucaugaucaccaccaucaucaucgucaucaucgucauccuccucucccucaucgccgucggccuccuccucuacugcaaggcccgcuccacccccgucacccucuccaaggaccagcucuccggcaucaacaacaucgccuucuccaacugaggacuaguguccaccugucccuccugggcugcuggauugucucguuuuccugccaaauaaacaggaucagcgcuuuacagaucuaaaaaaaaaaaaaaaaaaaaaaaaaaaaaaaaaaaaaaaaaaaaaaaaaaaaaaaaaaaaaaaaugcaucccccccccccccccccccccccccccccccaaaggcucuuuucagagccaccagaauu

SEQ ID NO: 2578 - RNA, 1910 nt, Artificial Sequence
  mRNA product Design e-5 comprising derived and/or modified sequence from HRSV(A2)__F_DSCav1_mut2 (opt3)
gggagagcggcucggccauuuugucccagucaguccggaggcugcggcugcagaaguaccgccugcggaguaacugcaaagaagcuuaccauggagcugcucauccuuaaggccaacgcuauuaccacaauacugacugcagugacguucugcuuugccagcggccagaauaucaccgaagaguucuaccaauccacauguucugcggucucaaaaggguauuugggagcuuuaagaacugguugguacaccaguguuauuacaaucgaacugagcaacauuaaggagaauaaaugcaacggcaccgacgccaaggugaaacuaaucaagcaggaacucgauaaguauaaaaaugcaguaacugaccugcagcuucugaugcaguccacacccgccaccgggucuggaucggcuauauguucaggcguggcagucugcaagguguugcaccucgagggugagguuaacaaaaucaagagcgcccugcugaguacgaauaaagcuguggucucccucucuaacggggugagcguauuaacuuuuaagguucuggaucuuaagaauuacauugacaaacaauugcugccuauccuaaacaagcaguccuguucaauuccaaauaucgaaaccgugauagaguuccagcagaaaaacaauaggcuccuggaaauuacacgggaguuuagugucaacgccggagugacuaccccggugagcacauauaugcuuaccaauucugagcuguugucccucaucaacgauaugcccauuacgaacgaccaaaagaaacugaugucaaauaacguccagaucguucgccagcagagcuacaguaucaugugcauuauaaaggaagagguguuagcguauguagugcaacugccucucuacggcgucaucgauacuccauguuggaaacuucauacaucuccccugugcaccacuaauacaaaggaaggcuccaacauuuguuugacccgaacggaccgugggugguacugcgauaaugcaggaagcgugucguucuuuccucaggccgagaccuguaagguucagucuaacagaguguucugcgacacaaugaacucccuaacucugccaucagaagucaaucucugcaauguggauaucuuuaaccccaaauaugacuguaagauaaugaccaguaaaacagauguaagcuccucuguuauuacuagccugggugcuaucgugucaugcuacggcaagaccaaauguacagccaguaauaagaacagggggaucauuaagaccuucuccaauggaugcgacuaugucagcaacaaaggcguggacacugucucuguggguaauacgcuuuacuguguuaacaagcaagaggggcagucacuguaugugaaaggagagccuaucauuaacuuuuacgauccauugguauucccgagugacgaauuugaugcaagcauaucccaggucaaugagaagaucaaccagucucucgcuuucauucggaaaucggacgaacuguuacacaaugugaacgccggcaagagcacaaccaauaucaugaucacuaccauuauaaucguuauuaucgugauucugcuaucccucaucgcggucggccugcuuuuguauugcaaggcccgcucaacacccgugacccugaguaaagaucaacucucugggauaaacaauaucgcauucagcaacugaggacuaguguccaccugucccuccugggcugcuggauugucucguuuuccugccaaauaaacaggaucagcgcuuuacagaucuaaaaaaaaaaaaaaaaaaaaaaaaaaaaaaaaaaaaaaaaaaaaaaaaaaaaaaaaaaaaaaaaugcaucccccccccccccccccccccccccccccccaaaggcucuuuucagagccaccagaauu

SEQ ID NO: 2579 - RNA, 1910 nt, Artificial Sequence
  mRNA product Design e-5 comprising derived and/or modified sequence from HRSV(A2)__F_DSCav1_mut2 (opt4)
gggagagcggcucggccauuuugucccagucaguccggaggcugcggcugcagaaguaccgccugcggaguaacugcaaagaagcuuaccauggagcugcugauccugaaggccaacgccaucaccaccauccugaccgccgugaccuucugcuucgccagcggccagaacaucaccgaggaguucuaccagagcaccugcagcgccgugagcaagggcuaccugggcgcccugagaaccggcugguacaccagcgugaucaccaucgagcugagcaacaucaaggagaacaagugcaacggcaccgacgccaaggugaagcugaucaagcaggagcuggacaaguacaagaacgccgugaccgaccugcagcugcugaugcagagcacccccgccaccggcagcggcagcgccaucugcagcggcguggccgugugcaaggugcugcaccuggagggcgaggugaacaagaucaagagcgcccugcugagcaccaacaaggccguggugagccugagcaacggcgugagcgugcugaccuucaaggugcuggaccugaagaacuacaucgacaagcagcugcugcccauccugaacaagcagagcugcagcauccccaacaucgagaccgugaucgaguuccagcagaagaacaacagacugcuggagaucaccagagaguucagcgugaacgccggcgugaccacccccgugagcaccuacaugcugaccaacagcgagcugcugagccugaucaacgacaugcccaucaccaacgaccagaagaagcugaugagcaacaacgugcagaucgugagacagcagagcuacagcaucaugugcaucaucaaggaggaggugcuggccuacguggugcagcugccccuguacggcgugaucgacacccccugcuggaagcugcacaccagcccccugugcaccaccaacaccaaggagggcagcaacaucugccugaccagaaccgacagaggcugguacugcgacaacgccggcagcgugagcuucuucccccaggccgagaccugcaaggugcagagcaacagaguguucugcgacaccaugaacagccugacccugcccagcgaggugaaccugugcaacguggacaucuucaaccccaaguacgacugcaagaucaugaccagcaagaccgacgugagcagcagcgugaucaccagccugggcgccaucgugagcugcuacggcaagaccaagugcaccgccagcaacaagaacagaggcaucaucaagaccuucagcaacggcugcgacuacgugagcaacaagggcguggacaccgugagcgugggcaacacccuguacugcgugaacaagcaggagggccagagccuguacgugaagggcgagcccaucaucaacuucuacgacccccugguguuccccagcgacgaguucgacgccagcaucagccaggugaacgagaagaucaaccagagccuggccuucaucagaaagagcgacgagcugcugcacaacgugaacgccggcaagagcaccaccaacaucaugaucaccaccaucaucaucgugaucaucgugauccugcugagccugaucgccgugggccugcugcuguacugcaaggccagaagcacccccgugacccugagcaaggaccagcugagcggcaucaacaacaucgccuucagcaacugaggacuaguguccaccugucccuccugggcugcuggauugucucguuuuccugccaaauaaacaggaucagcgcuuuacagaucuaaaaaaaaaaaaaaaaaaaaaaaaaaaaaaaaaaaaaaaaaaaaaaaaaaaaaaaaaaaaaaaaugcaucccccccccccccccccccccccccccccccaaaggcucuuuucagagccaccagaauu

SEQ ID NO: 2580 - RNA, 1910 nt, Artificial Sequence
  mRNA product Design e-5 comprising derived and/or modified sequence from HRSV(A2)__F_DSCav1_mut2 (opt5)
gggagagcggcucggccauuuugucccagucaguccggaggcugcggcugcagaaguaccgccugcggaguaacugcaaagaagcuuaccauggagcugcucauccugaaggccaacgcuauuaccacaauccuuacggccgugaccuucugcuuugcgagcggccagaauauuacagaagaguucuaccaauccaccuguucugcugucagcaaaggguaucugggagcccucagaacaggcugguacaccuccguuaucacaauugaacugucuaacaucaaggagaauaaaugcaacgggaccgacgccaaggugaaacuuaucaagcaggaacuggauaaguauaaaaaugcugugacggaccuccagcugcugaugcagagcacccccgccacaggauccggcucugcuauuuguagcggggucgccgugugcaagguucuccaccuggagggagaggugaacaaaaucaaguccgcgcuucugagcaccaauaaagccgucgugucucucuccaacggcguuagcgugcugacauuuaagguccuugaucugaagaauuacauugacaaacaacuccugccuauccugaacaagcagucuuguuccauuccgaauaucgaaaccgugauugaguuccagcagaaaaacaaucggcuccuggaaaucacgcgcgaguuuagcgugaacgcuggcgucacaacccccguuucuacauauaugcuuaccaauuccgagcugcucagccugaucaacgauaugccuauuaccaacgaccaaaagaaacuuauguccaauaacgugcagaucgugagacagcagucuuacagcauuaugugcaucauuaaggaagagguccuggccuaugugguucaacucccccuguacggggugaucgauacaccuuguuggaaacugcauacgagcccccucugcaccacaaauaccaaggaaggauccaacaucugucugacacggaccgaccgcggcugguacugcgauaaugcugggucugucuccuucuuuccucaggccgagacguguaaggugcagagcaacagaguuuucugcgacacaaugaacucucuuacccugccgagcgaagugaaucucugcaaugucgauauuuuuaaccccaaauaugacuguaagaucaugaccuccaaaacagaugugucuagcuccgucauuaccagccugggagcgaucgugucuugcuacggcaagacaaaauguacggccuccaauaagaaccgggggauuaucaagaccuucagcaauggaugcgacuauguuucuaacaaaggcguggacacagucuccgugggcaauacccuuuacuguguuaacaagcaagaggggcagagccuguaugugaaaggagagccuaucauuaacuuuuacgauccccucgucuucccuuccgacgaauuugaugcuucuaucagccaggugaaugagaagauuaaccagucccuggccuucauccgcaaaucugacgaacugcuccacaaugugaacgcuggcaagagcacaaccaauauuaugaucacgaccauuaucaucguuauuaucgucauucugcuuucccugaucgccguggggcuccugcuguauugcaaggccagaagcacacccgugacccuuucuaaagaucaacucuccggaauuaacaauaucgcuuucagcaacugaggacuaguguccaccugucccuccugggcugcuggauugucucguuuuccugccaaauaaacaggaucagcgcuuuacagaucuaaaaaaaaaaaaaaaaaaaaaaaaaaaaaaaaaaaaaaaaaaaaaaaaaaaaaaaaaaaaaaaaugcaucccccccccccccccccccccccccccccccaaaggcucuuuucagagccaccagaauu

SEQ ID NO: 2581 - RNA, 1910 nt, Artificial Sequence
  mRNA product Design e-5 comprising derived and/or modified sequence from HRSV(A2)__F_DSCav1_mut2 (opt6)
gggagagcggcucggccauuuugucccagucaguccggaggcugcggcugcagaaguaccgccugcggaguaacugcaaagaagcuuaccauggaacuacuaauccuaaaagcaaacgcaauuacaacuauacuuaccgccguaacauuuugcuucgcaucugggcaaaacauuaccgaagaauuuuaucaaucaacaugcucagcagucuccaaaggauaccuuggagcauuaagaaccggcugguauaccuccguaauaacaauugaacuaucuaauauaaaagaaaauaaauguaauggaacugacgcaaaaguuaaacuaauaaaacaagaacucgacaaauacaaaaacgccgucacagaccuacaacuacuaaugcaaucaacccccgcaacaggaucaggauccgcaaucugcagcggcgucgcaguuugcaaaguccuacauuuagaaggagaaguaaacaaaauaaaaucugcucuccucucuacaaacaaagcaguagugucacuuucaaacggaguaucaguucuaacauucaaaguacuagaccuaaaaaauuacauagacaaacaacuacuuccaauucuaaacaaacaauccuguuccauacccaacauagaaacaguaauagaauuucaacaaaaaaauaacagacuccuagaaauuacaagagaauuuuccgucaaugcaggaguaacaaccccaguaucaaccuacauguuaacuaacucagaacucuuaucacuaauaaacgacaugccaaucacuaaugaccaaaaaaaacucaugucaaauaacguacaaauaguccgacaacaaucauacuccaucaugugcauuauaaaagaagaaguacuagcauacgucguccaauuaccacuauacggcgucauagacacaccauguuggaaacuccacacaucaccacuaugcacuacaaauacaaaagaaggcuccaacaucugccuaacaagaacagacagagguugguauugcgacaacgcaggaucaguaucauuuuucccccaagcagaaacauguaaaguacaaucaaauagagucuucugcgacaccaugaacucauuaacacuaccuucagaagucaaccuaugcaacguagacaucuucaacccuaaauaugacugcaaaaucaugaccagcaaaaccgacguuucaucuuccguaauaacaucacuaggcgcaauagucucauguuacggcaaaacaaaauguacagcaucaaauaaaaaccguggaauaauaaaaacauuuucuaaugguugugacuacguaagcaauaaaggaguagauacaguaucagucggcaacaccuuauacuguguaaacaaacaagaaggccaaaguuuauacgucaaaggagaacccaucaucaacuucuacgacccauuaguauucccaucagacgaauuugaugcaagcauuucacaagucaacgaaaaaaucaaucaaucauuagcauucauccgaaaaucagacgaauuauuacacaacguaaacgccggaaaaucaaccacuaauauaaugauaaccacaauaaucaucguaauaauaguaauacuucucucacuaaucgcagucggacuccuucuauacugcaaagcaagaucuacaccaguaacacuauccaaagaucaacuaaguggcauaaacaacauagcauuuucuaacuaaggacuaguguccaccugucccuccugggcugcuggauugucucguuuuccugccaaauaaacaggaucagcgcuuuacagaucuaaaaaaaaaaaaaaaaaaaaaaaaaaaaaaaaaaaaaaaaaaaaaaaaaaaaaaaaaaaaaaaaugcaucccccccccccccccccccccccccccccccaaaggcucuuuucagagccaccagaauu

SEQ ID NO: 2582 - RNA, 1910 nt, Artificial Sequence
  mRNA product Design e-5 comprising derived and/or modified sequence from HRSV(A2)__F_DSCav1_mut2 (opt11)
gggagagcggcucggccauuuugucccagucaguccggaggcugcggcugcagaaguaccgccugcggaguaacugcaaagaagcuuaccauggaacuccucauccuaaaagccaacgcgaucaccacaauccugacagccgucaccuucugcuucgccuccggccaaaacaucaccgaagaguucuaccaauccacaugcuccgccgucuccaagggcuaccugggcgcacuucguacaggcugguacaccuccguaauaaccaucgaacucuccaacaucaaagaaaacaaaugcaacggcacagacgcaaaagucaaacucaucaagcaagaacuugacaaauacaaaaaugcagucaccgaccuucaacuccucaugcaaucuacccccgccacaggcuccggcuccgcuaucugcuccggcgucgccgucugcaaaguccuccaccucgaaggugaaguaaacaaaauaaaauccgcccuccucuccaccaacaaagccgucgucucccuaucaaacggcgucuccgugcucaccuucaagguucucgaccugaaaaacuacauagacaaacagcuccuaccaauccuuaacaaacagagcugcuccauuccgaauaucgaaacgguaaucgaauuucaacagaaaaacaaccgccuccucgaaauaacgcgagaguucuccguaaacgcuggcgucaccacacccgucagcaccuacaugcuaacgaacuccgaacucuugucgcucaucaacgacaugcccauaaccaacgaccaaaagaaacuaauguccaauaacguacaaaucguacgccaacaaucuuacuccaucaugugcaucauaaaagaagaaguacuagcuuacgucguccaacucccacuguacggagucaucgacacccccugcuggaaacuccacaccucuccccucugcaccaccaacaccaaagagggcuccaacauuugccugacacgcaccgaccgcggcugguacugcgacaacgcaggcuccgucucguucuucccccaagccgaaaccugcaaaguccaauccaaccgcgucuucugcgacaccaugaacucccucacccuccccuccgaagucaaucuaugcaacguagacaucuucaacccgaaauaugacugcaaaauuaugacaucuaaaaccgacguguccuccucagucaucacuucccuaggagccaucguuuccuguuacggcaagaccaaaugcaccgccagcaacaaaaaccgaggcaucaucaaaaccuucuccaacggaugugacuaugucuccaacaagggcgucgacaccgucagcgucggcaacacccucuacugcgucaacaaacaagaaggccaaucccucuacgucaaaggagagcccauaaucaacuucuacgacccccucgucuucccauccgacgaguucgacgccucaaucucccaagucaacgagaaaaucaaccaauccuuagccuucauccguaaguccgacgaacuccuucacaacgucaacgccgguaaaucuaccaccaacaucaugauaacaacaauaauuaucgucaucaucgucauccuccuuucccucaucgcggucgggcuauugcucuacugcaaagcccgguccaccccaguaacccucucuaaagaccaacucagcggaaucaauaacauagccuucagcaauuaaggacuaguguccaccugucccuccugggcugcuggauugucucguuuuccugccaaauaaacaggaucagcgcuuuacagaucuaaaaaaaaaaaaaaaaaaaaaaaaaaaaaaaaaaaaaaaaaaaaaaaaaaaaaaaaaaaaaaaaugcaucccccccccccccccccccccccccccccccaaaggcucuuuucagagccaccagaauu

SEQ ID NO: 2583 - RNA, 1977 nt, Artificial Sequence
  mRNA product Design e-6 comprising derived and/or modified sequence from HRSV(A2)__F_DSCav1_mut2 (opt1)
gggagagcggcucggccauuuugucccagucaguccggaggcugcggcugcagaaguaccgccugcggaguaacugcaaagaagcuuaccauggagcugcucauccugaaggccaacgccaucaccaccauccugacggcggugaccuucugcuucgccagcggccagaacaucaccgaggaguucuaccaguccacgugcagcgccgucuccaagggguaccucggcgcccugcggaccggcugguacaccuccgugaucaccaucgagcugagcaacaucaaggagaacaagugcaacgggaccgacgccaaggugaagcucaucaagcaggagcuggacaaguacaagaacgcggucacggaccugcagcuccugaugcaguccaccccggcaaccggcuccggcuccgccaucugcagcggcgucgccgugugcaaggugcugcaccucgagggggaggucaacaagaucaagagcgcccugcuguccaccaacaaggccguggugagccucuccaacggcgucagcgugcugaccuucaaggugcuggaccucaagaacuacaucgacaagcagcugcugcccauccugaacaagcagagcugcuccauccccaacaucgagacggugaucgaguuccagcagaagaacaaccggcuccuggagaucacccgcgaguucagcgugaacgccggggucaccacccccguguccacguacaugcugaccaacagcgagcuccugucccugaucaacgacaugccgaucaccaacgaccagaagaagcucaugagcaacaacgugcagaucguccggcagcaguccuacagcaucaugugcaucaucaaggaggaggugcuggcguacgugguccagcugccccucuacggcgugaucgacacccccugcuggaagcugcacacgagcccccugugcaccaccaacaccaaggagggguccaacaucugccucacgcgcaccgaccggggcugguacugcgacaacgccggcagcgucuccuucuucccgcaggccgagaccugcaaggugcagagcaaccgcguguucugcgacaccaugaacucccugacgcugcccagcgagguaaaccucugcaacgucgacaucuucaaccccaaguacgacugcaagaucaugaccuccaagaccgacgugagcuccagcgugaucaccucccugggggccaucgucagcugcuacggcaagacgaagugcaccgccagcaacaagaaccgggggaucaucaagaccuucuccaacggcugcgacuacgugagcaacaagggcguggacaccguguccgucgggaacacccuguacugcgugaacaagcaggagggccagagccucuacgugaagggggagcccaucaucaacuucuacgacccgcuggucuuccccuccgacgaguucgacgcgagcaucucccaggugaacgagaagaucaaccagagccuggccuucauccgcaaguccgacgagcugcuccacaacgugaacgccggcaagagcacgaccaacaucaugaucaccaccaucaucaucgucaucaucgugauccugcugucccucaucgccguggggcugcugcucuacugcaaggcccggagcacgcccgucacccuguccaaggaccagcugagcggcaucaacaacaucgcguucuccaacugaggacuaguacuggcugcaucucccuuuccucuguccuccauccuucucccaggauggugaagggggaccugguacccagugauccccaccccaggauccuaaaucaugacuuaccugcuaauaaaaacucauuggaaaagugagaagaucuaaaaaaaaaaaaaaaaaaaaaaaaaaaaaaaaaaaaaaaaaaaaaaaaaaaaaaaaaaaaaaaaugcaucccccccccccccccccccccccccccccccaaaggcucuuuucagagccaccagaauu

SEQ ID NO: 2584 - RNA, 1977 nt, Artificial Sequence
  mRNA product Design e-6 comprising derived and/or modified sequence from HRSV(A2)__F_DSCav1_mut2 (opt1)
gggagagcggcucggccauuuugucccagucaguccggaggcugcggcugcagaaguaccgccugcggaguaacugcaaagaagcuuaccauggagcugcucauccugaaggccaacgccaucaccaccauccugacggcggugaccuucugcuucgccagcggccagaacaucaccgaggaguucuaccaguccacgugcagcgccgucuccaagggguaccucggcgcccugcgcaccgggugguacaccagcgugaucaccaucgagcuguccaacaucaaggagaacaagugcaacggcaccgacgccaaggugaagcucaucaagcaggagcuggacaaguacaagaacgcggucacggaccugcagcuccugaugcagagcacccccgccaccggguccggcagcgccaucugcuccggcguggccgugugcaagguccugcaccucgagggggaggugaacaagaucaagagcgcgcugcuguccaccaacaaggccguggucagccucuccaacggcgugagcgugcugacguucaagguccuggaccucaagaacuacaucgacaagcagcugcugccgauccucaacaagcaguccugcagcauccccaacaucgagaccgugaucgaguuccagcagaagaacaaccggcugcuggagaucacccgcgaguucuccgugaacgccggggucaccacgcccgugagcaccuacaugcucaccaacuccgagcugcugagccucaucaacgacaugcccaucaccaacgaccagaagaagcugaugagcaacaacgugcagaucguccggcagcaguccuacagcaucaugugcaucaucaaggaggaggugcuggccuacgugguccagcucccgcuguacggcgugaucgacacgcccugcuggaagcugcacaccagcccccucugcaccaccaacacgaaggagggguccaacaucugccugacccgcaccgaccggggcugguacugcgacaacgccggcuccgugagcuucuucccccaggcggagaccugcaagguccaguccaaccgcguguucugcgacacgaugaacagccugacccucccguccgaggucaaccugugcaacguggacaucuucaaccccaaguacgacugcaagaucaugaccagcaagaccgacguguccagcuccgucaucacgagccugggggccaucguguccugcuacggcaagaccaagugcaccgccagcaacaagaaccgggggaucaucaagaccuucuccaacggcugcgacuacgugagcaacaagggcgucgacacgguguccguggggaacacccucuacugcgucaacaagcaggagggccagagccuguacgugaagggggagcccaucaucaacuucuacgacccccugguguucccgagcgacgaguucgacgccuccaucagccaggucaacgagaagaucaaccagucccucgccuucauccgcaagagcgacgagcugcugcacaacgugaacgcgggcaaguccaccaccaacaucaugaucaccacgaucaucaucgugaucaucgucauccuccugagccugaucgccguggggcuccugcuguacugcaaggcccgguccacccccgugacccugagcaaggaccagcucuccggcaucaacaacaucgccuucagcaacugaggacuaguacuggcugcaucucccuuuccucuguccuccauccuucucccaggauggugaagggggaccugguacccagugauccccaccccaggauccuaaaucaugacuuaccugcuaauaaaaacucauuggaaaagugagaagaucuaaaaaaaaaaaaaaaaaaaaaaaaaaaaaaaaaaaaaaaaaaaaaaaaaaaaaaaaaaaaaaaaugcaucccccccccccccccccccccccccccccccaaaggcucuuuucagagccaccagaauu

SEQ ID NO: 2585 - RNA, 1977 nt, Artificial Sequence
  mRNA product Design e-6 comprising derived and/or modified sequence from HRSV(A2)__F_DSCav1_mut2 (opt2)
gggagagcggcucggccauuuugucccagucaguccggaggcugcggcugcagaaguaccgccugcggaguaacugcaaagaagcuuaccauggagcuccucauccucaaggccaacgccaucaccaccauccucaccgccgucaccuucugcuucgccuccggccagaacaucaccgaggaguucuaccaguccaccugcuccgccgucuccaagggcuaccucggcgcccuccgcaccggcugguacaccuccgucaucaccaucgagcucuccaacaucaaggagaacaagugcaacggcaccgacgccaaggucaagcucaucaagcaggagcucgacaaguacaagaacgccgucaccgaccuccagcuccucaugcaguccacccccgccaccggcuccggcuccgccaucugcuccggcgucgccgucugcaagguccuccaccucgagggcgaggucaacaagaucaaguccgcccuccucuccaccaacaaggccgucgucucccucuccaacggcgucuccguccucaccuucaagguccucgaccucaagaacuacaucgacaagcagcuccuccccauccucaacaagcaguccugcuccauccccaacaucgagaccgucaucgaguuccagcagaagaacaaccgccuccucgagaucacccgcgaguucuccgucaacgccggcgucaccacccccgucuccaccuacaugcucaccaacuccgagcuccucucccucaucaacgacaugcccaucaccaacgaccagaagaagcucauguccaacaacguccagaucguccgccagcaguccuacuccaucaugugcaucaucaaggaggagguccucgccuacgucguccagcucccccucuacggcgucaucgacacccccugcuggaagcuccacaccuccccccucugcaccaccaacaccaaggagggcuccaacaucugccucacccgcaccgaccgcggcugguacugcgacaacgccggcuccgucuccuucuucccccaggccgagaccugcaagguccaguccaaccgcgucuucugcgacaccaugaacucccucacccuccccuccgaggucaaccucugcaacgucgacaucuucaaccccaaguacgacugcaagaucaugaccuccaagaccgacgucuccuccuccgucaucaccucccucggcgccaucgucuccugcuacggcaagaccaagugcaccgccuccaacaagaaccgcggcaucaucaagaccuucuccaacggcugcgacuacgucuccaacaagggcgucgacaccgucuccgucggcaacacccucuacugcgucaacaagcaggagggccagucccucuacgucaagggcgagcccaucaucaacuucuacgacccccucgucuuccccuccgacgaguucgacgccuccaucucccaggucaacgagaagaucaaccagucccucgccuucauccgcaaguccgacgagcuccuccacaacgucaacgccggcaaguccaccaccaacaucaugaucaccaccaucaucaucgucaucaucgucauccuccucucccucaucgccgucggccuccuccucuacugcaaggcccgcuccacccccgucacccucuccaaggaccagcucuccggcaucaacaacaucgccuucuccaacugaggacuaguacuggcugcaucucccuuuccucuguccuccauccuucucccaggauggugaagggggaccugguacccagugauccccaccccaggauccuaaaucaugacuuaccugcuaauaaaaacucauuggaaaagugagaagaucuaaaaaaaaaaaaaaaaaaaaaaaaaaaaaaaaaaaaaaaaaaaaaaaaaaaaaaaaaaaaaaaaugcaucccccccccccccccccccccccccccccccaaaggcucuuuucagagccaccagaauu

SEQ ID NO: 2586 - RNA, 1977 nt, Artificial Sequence
  mRNA product Design e-6 comprising derived and/or modified sequence from HRSV(A2)__F_DSCav1_mut2 (opt3)
gggagagcggcucggccauuuugucccagucaguccggaggcugcggcugcagaaguaccgccugcggaguaacugcaaagaagcuuaccauggagcugcucauccuuaaggccaacgcuauuaccacaauacugacugcagugacguucugcuuugccagcggccagaauaucaccgaagaguucuaccaauccacauguucugcggucucaaaaggguauuugggagcuuuaagaacugguugguacaccaguguuauuacaaucgaacugagcaacauuaaggagaauaaaugcaacggcaccgacgccaaggugaaacuaaucaagcaggaacucgauaaguauaaaaaugcaguaacugaccugcagcuucugaugcaguccacacccgccaccgggucuggaucggcuauauguucaggcguggcagucugcaagguguugcaccucgagggugagguuaacaaaaucaagagcgcccugcugaguacgaauaaagcuguggucucccucucuaacggggugagcguauuaacuuuuaagguucuggaucuuaagaauuacauugacaaacaauugcugccuauccuaaacaagcaguccuguucaauuccaaauaucgaaaccgugauagaguuccagcagaaaaacaauaggcuccuggaaauuacacgggaguuuagugucaacgccggagugacuaccccggugagcacauauaugcuuaccaauucugagcuguugucccucaucaacgauaugcccauuacgaacgaccaaaagaaacugaugucaaauaacguccagaucguucgccagcagagcuacaguaucaugugcauuauaaaggaagagguguuagcguauguagugcaacugccucucuacggcgucaucgauacuccauguuggaaacuucauacaucuccccugugcaccacuaauacaaaggaaggcuccaacauuuguuugacccgaacggaccgugggugguacugcgauaaugcaggaagcgugucguucuuuccucaggccgagaccuguaagguucagucuaacagaguguucugcgacacaaugaacucccuaacucugccaucagaagucaaucucugcaauguggauaucuuuaaccccaaauaugacuguaagauaaugaccaguaaaacagauguaagcuccucuguuauuacuagccugggugcuaucgugucaugcuacggcaagaccaaauguacagccaguaauaagaacagggggaucauuaagaccuucuccaauggaugcgacuaugucagcaacaaaggcguggacacugucucuguggguaauacgcuuuacuguguuaacaagcaagaggggcagucacuguaugugaaaggagagccuaucauuaacuuuuacgauccauugguauucccgagugacgaauuugaugcaagcauaucccaggucaaugagaagaucaaccagucucucgcuuucauucggaaaucggacgaacuguuacacaaugugaacgccggcaagagcacaaccaauaucaugaucacuaccauuauaaucguuauuaucgugauucugcuaucccucaucgcggucggccugcuuuuguauugcaaggcccgcucaacacccgugacccugaguaaagaucaacucucugggauaaacaauaucgcauucagcaacugaggacuaguacuggcugcaucucccuuuccucuguccuccauccuucucccaggauggugaagggggaccugguacccagugauccccaccccaggauccuaaaucaugacuuaccugcuaauaaaaacucauuggaaaagugagaagaucuaaaaaaaaaaaaaaaaaaaaaaaaaaaaaaaaaaaaaaaaaaaaaaaaaaaaaaaaaaaaaaaaugcaucccccccccccccccccccccccccccccccaaaggcucuuuucagagccaccagaauu

SEQ ID NO: 2587 - RNA, 1977 nt, Artificial Sequence
  mRNA product Design e-6 comprising derived and/or modified sequence from HRSV(A2)__F_DSCav1_mut2 (opt4)
gggagagcggcucggccauuuugucccagucaguccggaggcugcggcugcagaaguaccgccugcggaguaacugcaaagaagcuuaccauggagcugcugauccugaaggccaacgccaucaccaccauccugaccgccgugaccuucugcuucgccagcggccagaacaucaccgaggaguucuaccagagcaccugcagcgccgugagcaagggcuaccugggcgcccugagaaccggcugguacaccagcgugaucaccaucgagcugagcaacaucaaggagaacaagugcaacggcaccgacgccaaggugaagcugaucaagcaggagcuggacaaguacaagaacgccgugaccgaccugcagcugcugaugcagagcacccccgccaccggcagcggcagcgccaucugcagcggcguggccgugugcaaggugcugcaccuggagggcgaggugaacaagaucaagagcgcccugcugagcaccaacaaggccguggugagccugagcaacggcgugagcgugcugaccuucaaggugcuggaccugaagaacuacaucgacaagcagcugcugcccauccugaacaagcagagcugcagcauccccaacaucgagaccgugaucgaguuccagcagaagaacaacagacugcuggagaucaccagagaguucagcgugaacgccggcgugaccacccccgugagcaccuacaugcugaccaacagcgagcugcugagccugaucaacgacaugcccaucaccaacgaccagaagaagcugaugagcaacaacgugcagaucgugagacagcagagcuacagcaucaugugcaucaucaaggaggaggugcuggccuacguggugcagcugccccuguacggcgugaucgacacccccugcuggaagcugcacaccagcccccugugcaccaccaacaccaaggagggcagcaacaucugccugaccagaaccgacagaggcugguacugcgacaacgccggcagcgugagcuucuucccccaggccgagaccugcaaggugcagagcaacagaguguucugcgacaccaugaacagccugacccugcccagcgaggugaaccugugcaacguggacaucuucaaccccaaguacgacugcaagaucaugaccagcaagaccgacgugagcagcagcgugaucaccagccugggcgccaucgugagcugcuacggcaagaccaagugcaccgccagcaacaagaacagaggcaucaucaagaccuucagcaacggcugcgacuacgugagcaacaagggcguggacaccgugagcgugggcaacacccuguacugcgugaacaagcaggagggccagagccuguacgugaagggcgagcccaucaucaacuucuacgacccccugguguuccccagcgacgaguucgacgccagcaucagccaggugaacgagaagaucaaccagagccuggccuucaucagaaagagcgacgagcugcugcacaacgugaacgccggcaagagcaccaccaacaucaugaucaccaccaucaucaucgugaucaucgugauccugcugagccugaucgccgugggccugcugcuguacugcaaggccagaagcacccccgugacccugagcaaggaccagcugagcggcaucaacaacaucgccuucagcaacugaggacuaguacuggcugcaucucccuuuccucuguccuccauccuucucccaggauggugaagggggaccugguacccagugauccccaccccaggauccuaaaucaugacuuaccugcuaauaaaaacucauuggaaaagugagaagaucuaaaaaaaaaaaaaaaaaaaaaaaaaaaaaaaaaaaaaaaaaaaaaaaaaaaaaaaaaaaaaaaaugcaucccccccccccccccccccccccccccccccaaaggcucuuuucagagccaccagaauu

SEQ ID NO: 2588 - RNA, 1977 nt, Artificial Sequence
  mRNA product Design e-6 comprising derived and/or modified sequence from HRSV(A2)__F_DSCav1_mut2 (opt5)
gggagagcggcucggccauuuugucccagucaguccggaggcugcggcugcagaaguaccgccugcggaguaacugcaaagaagcuuaccauggagcugcucauccugaaggccaacgcuauuaccacaauccuuacggccgugaccuucugcuuugcgagcggccagaauauuacagaagaguucuaccaauccaccuguucugcugucagcaaaggguaucugggagcccucagaacaggcugguacaccuccguuaucacaauugaacugucuaacaucaaggagaauaaaugcaacgggaccgacgccaaggugaaacuuaucaagcaggaacuggauaaguauaaaaaugcugugacggaccuccagcugcugaugcagagcacccccgccacaggauccggcucugcuauuuguagcggggucgccgugugcaagguucuccaccuggagggagaggugaacaaaaucaaguccgcgcuucugagcaccaauaaagccgucgugucucucuccaacggcguuagcgugcugacauuuaagguccuugaucugaagaauuacauugacaaacaacuccugccuauccugaacaagcagucuuguuccauuccgaauaucgaaaccgugauugaguuccagcagaaaaacaaucggcuccuggaaaucacgcgcgaguuuagcgugaacgcuggcgucacaacccccguuucuacauauaugcuuaccaauuccgagcugcucagccugaucaacgauaugccuauuaccaacgaccaaaagaaacuuauguccaauaacgugcagaucgugagacagcagucuuacagcauuaugugcaucauuaaggaagagguccuggccuaugugguucaacucccccuguacggggugaucgauacaccuuguuggaaacugcauacgagcccccucugcaccacaaauaccaaggaaggauccaacaucugucugacacggaccgaccgcggcugguacugcgauaaugcugggucugucuccuucuuuccucaggccgagacguguaaggugcagagcaacagaguuuucugcgacacaaugaacucucuuacccugccgagcgaagugaaucucugcaaugucgauauuuuuaaccccaaauaugacuguaagaucaugaccuccaaaacagaugugucuagcuccgucauuaccagccugggagcgaucgugucuugcuacggcaagacaaaauguacggccuccaauaagaaccgggggauuaucaagaccuucagcaauggaugcgacuauguuucuaacaaaggcguggacacagucuccgugggcaauacccuuuacuguguuaacaagcaagaggggcagagccuguaugugaaaggagagccuaucauuaacuuuuacgauccccucgucuucccuuccgacgaauuugaugcuucuaucagccaggugaaugagaagauuaaccagucccuggccuucauccgcaaaucugacgaacugcuccacaaugugaacgcuggcaagagcacaaccaauauuaugaucacgaccauuaucaucguuauuaucgucauucugcuuucccugaucgccguggggcuccugcuguauugcaaggccagaagcacacccgugacccuuucuaaagaucaacucuccggaauuaacaauaucgcuuucagcaacugaggacuaguacuggcugcaucucccuuuccucuguccuccauccuucucccaggauggugaagggggaccugguacccagugauccccaccccaggauccuaaaucaugacuuaccugcuaauaaaaacucauuggaaaagugagaagaucuaaaaaaaaaaaaaaaaaaaaaaaaaaaaaaaaaaaaaaaaaaaaaaaaaaaaaaaaaaaaaaaaugcaucccccccccccccccccccccccccccccccaaaggcucuuuucagagccaccagaauu

SEQ ID NO: 2589 - RNA, 1977 nt, Artificial Sequence
  mRNA product Design e-6 comprising derived and/or modified sequence from HRSV(A2)__F_DSCav1_mut2 (opt6)
gggagagcggcucggccauuuugucccagucaguccggaggcugcggcugcagaaguaccgccugcggaguaacugcaaagaagcuuaccauggaacuacuaauccuaaaagcaaacgcaauuacaacuauacuuaccgccguaacauuuugcuucgcaucugggcaaaacauuaccgaagaauuuuaucaaucaacaugcucagcagucuccaaaggauaccuuggagcauuaagaaccggcugguauaccuccguaauaacaauugaacuaucuaauauaaaagaaaauaaauguaauggaacugacgcaaaaguuaaacuaauaaaacaagaacucgacaaauacaaaaacgccgucacagaccuacaacuacuaaugcaaucaacccccgcaacaggaucaggauccgcaaucugcagcggcgucgcaguuugcaaaguccuacauuuagaaggagaaguaaacaaaauaaaaucugcucuccucucuacaaacaaagcaguagugucacuuucaaacggaguaucaguucuaacauucaaaguacuagaccuaaaaaauuacauagacaaacaacuacuuccaauucuaaacaaacaauccuguuccauacccaacauagaaacaguaauagaauuucaacaaaaaaauaacagacuccuagaaauuacaagagaauuuuccgucaaugcaggaguaacaaccccaguaucaaccuacauguuaacuaacucagaacucuuaucacuaauaaacgacaugccaaucacuaaugaccaaaaaaaacucaugucaaauaacguacaaauaguccgacaacaaucauacuccaucaugugcauuauaaaagaagaaguacuagcauacgucguccaauuaccacuauacggcgucauagacacaccauguuggaaacuccacacaucaccacuaugcacuacaaauacaaaagaaggcuccaacaucugccuaacaagaacagacagagguugguauugcgacaacgcaggaucaguaucauuuuucccccaagcagaaacauguaaaguacaaucaaauagagucuucugcgacaccaugaacucauuaacacuaccuucagaagucaaccuaugcaacguagacaucuucaacccuaaauaugacugcaaaaucaugaccagcaaaaccgacguuucaucuuccguaauaacaucacuaggcgcaauagucucauguuacggcaaaacaaaauguacagcaucaaauaaaaaccguggaauaauaaaaacauuuucuaaugguugugacuacguaagcaauaaaggaguagauacaguaucagucggcaacaccuuauacuguguaaacaaacaagaaggccaaaguuuauacgucaaaggagaacccaucaucaacuucuacgacccauuaguauucccaucagacgaauuugaugcaagcauuucacaagucaacgaaaaaaucaaucaaucauuagcauucauccgaaaaucagacgaauuauuacacaacguaaacgccggaaaaucaaccacuaauauaaugauaaccacaauaaucaucguaauaauaguaauacuucucucacuaaucgcagucggacuccuucuauacugcaaagcaagaucuacaccaguaacacuauccaaagaucaacuaaguggcauaaacaacauagcauuuucuaacuaaggacuaguacuggcugcaucucccuuuccucuguccuccauccuucucccaggauggugaagggggaccugguacccagugauccccaccccaggauccuaaaucaugacuuaccugcuaauaaaaacucauuggaaaagugagaagaucuaaaaaaaaaaaaaaaaaaaaaaaaaaaaaaaaaaaaaaaaaaaaaaaaaaaaaaaaaaaaaaaaugcaucccccccccccccccccccccccccccccccaaaggcucuuuucagagccaccagaauu

SEQ ID NO: 2590 - RNA, 1977 nt, Artificial Sequence
  mRNA product Design e-6 comprising derived and/or modified sequence from HRSV(A2)__F_DSCav1_mut2 (opt11)
gggagagcggcucggccauuuugucccagucaguccggaggcugcggcugcagaaguaccgccugcggaguaacugcaaagaagcuuaccauggaacuccucauccuaaaagccaacgcgaucaccacaauccugacagccgucaccuucugcuucgccuccggccaaaacaucaccgaagaguucuaccaauccacaugcuccgccgucuccaagggcuaccugggcgcacuucguacaggcugguacaccuccguaauaaccaucgaacucuccaacaucaaagaaaacaaaugcaacggcacagacgcaaaagucaaacucaucaagcaagaacuugacaaauacaaaaaugcagucaccgaccuucaacuccucaugcaaucuacccccgccacaggcuccggcuccgcuaucugcuccggcgucgccgucugcaaaguccuccaccucgaaggugaaguaaacaaaauaaaauccgcccuccucuccaccaacaaagccgucgucucccuaucaaacggcgucuccgugcucaccuucaagguucucgaccugaaaaacuacauagacaaacagcuccuaccaauccuuaacaaacagagcugcuccauuccgaauaucgaaacgguaaucgaauuucaacagaaaaacaaccgccuccucgaaauaacgcgagaguucuccguaaacgcuggcgucaccacacccgucagcaccuacaugcuaacgaacuccgaacucuugucgcucaucaacgacaugcccauaaccaacgaccaaaagaaacuaauguccaauaacguacaaaucguacgccaacaaucuuacuccaucaugugcaucauaaaagaagaaguacuagcuuacgucguccaacucccacuguacggagucaucgacacccccugcuggaaacuccacaccucuccccucugcaccaccaacaccaaagagggcuccaacauuugccugacacgcaccgaccgcggcugguacugcgacaacgcaggcuccgucucguucuucccccaagccgaaaccugcaaaguccaauccaaccgcgucuucugcgacaccaugaacucccucacccuccccuccgaagucaaucuaugcaacguagacaucuucaacccgaaauaugacugcaaaauuaugacaucuaaaaccgacguguccuccucagucaucacuucccuaggagccaucguuuccuguuacggcaagaccaaaugcaccgccagcaacaaaaaccgaggcaucaucaaaaccuucuccaacggaugugacuaugucuccaacaagggcgucgacaccgucagcgucggcaacacccucuacugcgucaacaaacaagaaggccaaucccucuacgucaaaggagagcccauaaucaacuucuacgacccccucgucuucccauccgacgaguucgacgccucaaucucccaagucaacgagaaaaucaaccaauccuuagccuucauccguaaguccgacgaacuccuucacaacgucaacgccgguaaaucuaccaccaacaucaugauaacaacaauaauuaucgucaucaucgucauccuccuuucccucaucgcggucgggcuauugcucuacugcaaagcccgguccaccccaguaacccucucuaaagaccaacucagcggaaucaauaacauagccuucagcaauuaaggacuaguacuggcugcaucucccuuuccucuguccuccauccuucucccaggauggugaagggggaccugguacccagugauccccaccccaggauccuaaaucaugacuuaccugcuaauaaaaacucauuggaaaagugagaagaucuaaaaaaaaaaaaaaaaaaaaaaaaaaaaaaaaaaaaaaaaaaaaaaaaaaaaaaaaaaaaaaaaugcaucccccccccccccccccccccccccccccccaaaggcucuuuucagagccaccagaauu
